United States Patent Application Publication US 2024/0404707 A1 - sequence listing, part 3

SEQ ID NO: 263 - DNA, 32742 bp, Homo sapiens
  source 1..32742: mol_type = other DNA
ctttcactggcaagagacggagtcctgggtttcagttccagttgcctgcggtgggctgtgtgagtttgccaaagtcccctgccctctctgggtctcggttccctcgcctgtccacgtgaggttggaggagctgaacgccgacgtcatttttagctaagagggagcagggtccccgagtcgccggcccagggtctgcgcatccgaggccgcgcgccctttcccctcccccacggctcctccgggccccgcactctgcgccccggctgccgcccagcgccctacaccgccctcagggggccctcgcgggctccccccggccgggatgccagtgccccgcgccacgcgcgcctgctcccgcgccgcctgccctgcagcctgcccgcggcgcctttatacccagcgggctcggcgctcactaatgtttaactcggggccgaaacttgccagcggcgagtgactccaccgcccggagcagcggtgcaggacgcgcgtctccgccgcccgcggtgacttctgcctgcgctccttctctgaacgctcacttccgaggagacgccgacgatgaaggtgagtgccgcgccacgtacgtccccggggcgagctgtggggacctcttcgccaaactccccaaatggcccaaaagctggcgaaaccggaccagggactccccttaggcggaagccccaaggccaccctctgacaggtgaagggacgtcccagagctctcgcttagctttcggaccctggcttctgctaggaccctggcgtcgagctttgaatgtcccggagagccactcacagaacgcacgcccgaacccgggcaggggtagagaaaccaacgctaatgtgctctgaaggcacaagttcaagggcacccgccttagagaactccaactggcgcactccagacgccacccccacccccagcccgcggtctccctcttctaacgcactcccacctgcaaatcctgctgcctctggagcagccccgaccctcctacggaaactggggccacacgcttccctctaattggacttgatctgctcggcttgcagacaccgtggaaggttcttctgggactgctgggtgctgctgcgcttgtcaccatcatcaccgtgcccgtggttctgctgaacaaaggcagtaagtttgaaacatttgaaaaagataggacagttggagctcaggtcaggctccgtcttaccacgctaagggaaacgagggattttgcgtggggttggaccagtgccccgaagtgtagctgagaaggcttcccagttgttgttgctgcttgtagagcagcagctggattcacttcgcggggtcttcagtgtttaggctgaaactcttgcggctttcacgtcttgttatgtataataaatgcatgcttcctgaaattagggagagtcgggatttttaaaatttcaattttaaatttaatttgtaaatttttaaatttacatgtaatttttgagaaaagtttttgggtgtgatcgaaaaaggaaaaaaggcagtgtttaaagagcccaaagacagcagtaaggatatctgaaatggaaaggaaaaatgagaaagcaagccccaaaatacagttttgagaaatgatgttccacagggaacccagactgttttccctcaagggtggtgagaattcagttggagggtggggaggcagggaagtaattgaccaatttagcagtattgcagagctaaataataaagctggtatacacgataatatttaagaagggtctggaatcagtgatgttttggtggattcttttatttaaggactttcatgtctttttagcttgcctaaatgtataaaacactcacataatggaatactcactgtaggatgcaagcaagtgagaactactagtttcagtctcccctggccttactttccttttaaacacttgctttcatttcagcattacacactataaattagtcagccagttaaagcattctctctggaagatttagtcaactgaggaatgtatagtcagtgcttgcatactcaaggagtcttatctagattttaggatgacagttcagaattagattgtagagctatgaaaaccatgcttgctgtgcaattcaaggccagggcaaatgtgccaaaggttaaataactgaatgggttgacctactgctaatgaaatttgaagaaaccagtggttgctactattttataccattaaatgacagtccacttaagcttgactcttgtggactgttaaaatataactattttcataaagcaactctttgtgtaaaccatacatgcaaagccttgtgggagaagaatgtgctagtcatacaattgataaatatagggcttacaggcttacattatgttccaggcaccgcgttagttgctgcaaatacaaagattaaattttgtaaatataaatataaaggccctgacctcaaggactgtataagctagtgggaacatgcaaacaaatatgacttgttttacatatatatgtgtgtatgtgtgtgtgtggatacacacatatataaatagaaataatctgtatgtttctctccaaaacatcactgaggcatcacagcatcgctggaagtttgagtaaaactgtaattatcagaacttccgttaaagcaagttggaaggaatactgtactttgataagccacttgagatggccagtgaaaaggcctagggatctgaggcttgctgcagttaactctgagaattttgttttgctgggtagggtatacaggccaggaagagctgttttgccatttctgctaaatagcacctggtatcttctccaaatgaaatttgaacacatttcaagaatgttctcttgaggaggacttcctgagagactcaacttgtttccatataactactcttatgattcaaaaaaataacttagaggtgcttgagcagactgctctggaggttagaaggaacacttctgggaaagtctccccctcccgggttcaagtgattcccttgcctcagcctcccgagtagctgggactacaggcacacaccaccacgcccggataattttttgtattttagtatagatggggttttaccatgttggccaggatggtctttatctcctgacctcatgatctgcccactttggcctcccaaagtgctggaatgaaaggtgtaagccactgcacccggcggagagacttcttataagaggtttcttttgtgggccaagcttgaatagttaacatcagtttctggagataagatattccagaaaatgcaaatgccctgtgtttcaacacagagacatgagatcacatcctgtgttagggattataaaaggatccagggccccagaggagggtgggaaacaggcaaaagagtttgattctaagctggagatgatgcagtgaatgatgttttgagcatgcctgaactgttggccatgacagtgggaaggtgagttgcaatggagcaacactggagggggaagtgagggaaatggcccaggacacttacagtacaggtcagaatttggaggctccagagctactcagaaatgtgaatgactggacttcggtaaccggttaaacagagagaggtaaaggagagggtggctaaggatacctcttggacaaccaggtggagatgttgtttcatggtggctttatttatttaccactctagtaatttcttgtctgtatttcttaacttgtatgtatgtatgtttaaggaaaaaagggaagtcatcttgttaacacttctgccttatcataggaataaagataaaagctcaggaatgcagcattttcactaaatcagcaatacctttcctgggctgtgccataataaaggtcagcattccttacaaaaaagtcaaagtcatcacccaagaaatgccctccatgttgtcaatcaagctttcaagtaaacaaatagagtgaaggaaaaaggaaggaagtagggagaaaggaaatgtaaagggaaggggaagggaaaggaaaggaagaaggaaggaaggaaaggaatttgatagaaaaacaaagcaaagacctaaattacgtggaaactaaagaattaaacagccaaaaggaaggaggaagccatgagcaaacccaagttcatcccctgagaggttgatttaagaggtcaagcatttccatgtgaaatgcttactttagcaaaactagacacacccagaacaggacgggggctagtgaatggggagccagagagagagagagagaggcttaatactattgtcatatatttaagaataaaaactccttgaagtcatattattcatttcaccaagcacaatcaaaagttcaccctcttctgtgtatataataaatgattgtatgttttaaattttttttcaatcatcctactataggaggatattgcatatgtaagcattcagtttccccaagaatcagtgagaaatacgtaaaaatacttgtatggaattgtagaactcttcatggcttagtggtaataaaattcacatgcagcatttatgattcctttattttttcttttacactatattatatgctgaaatttgaaatatttggttatttgtcaaatagttttattattattgaattttattatggaaaagaagtatatctcttcttttgctcctttcactgctttagtggtaaatttcttctataccttctttcggtggaaaggaaatttgactgctcacccatccatcagtaataagagaaaacccaaatgtgaaggagacaggaataatcagagagaaaagatagcatctatgaggtttgcctgaggaagtccaggatctgttccaggtttaaagcacagaaatgcgcctgaatgaaagctttgtatgtttcaggggacaatttctaaacagtatgctctgtaaaagctggagttgactccagcttgctcagttaactattgtcaacctttgtggaatgctcatgaggtcagcaggttagtctttttcaggccagttattttgggttttgcttccctagccatagcatatgccttaagtttctctatcttagaaatctctgcctctcttctcaaaggggatcacaaagagagagaaaatgaagactactcagttgatggtcagagaaagacaatataaaaagactggagctggatcgtgtctttcaaattttatgacttaagaaattactgaggcccatggagaatgtggctgtaaataacatgcaggagcgccttgcttgaggaagagaaggcatgcaagctacaataatagccaatatgcatttactaagtgctaaatttggggctgagggctttcaatgtatttttcatttaatccttagaacaactctttgaaagagaggtactattaccctctccattcctacagaagatttatagaaactttgagagggtactttagttatctgtaattgcataatgaattacctcagaacttaaaacaataaatatttattatctcatagtttctgtgtataaggaattttggagtggcttagctgggtggttctgcctcagggtctctcatgaggttgcaatcaagatgttatctgaaagcctgactggggctgaaggatccccttccaagctcactcatgtgcctgttagctagaggcctcagttccctagtgtgtgggccccagttccccaccatgtgggaattatattataatttcatgacttctaatctctgtgtcgtaagcattctgaagaagagcctactgtggatgccttcattcctatataaagctgtatacaggcaatgactgacatctcaagcttttgaatggttctgtttagtagtattagtagtaataataggtccagatttacttacttgcactaaattatacttaggataatatggtagctactttcccttagaatgaaggatccaagagaggaactaagcaggaagctgagttgccttttatgacctagcctcagaagtggcaggtataccattccttctgctgtgtactattggtcacacagaccaaccctgatacaatgtgggagggcactacacaagtgtgtaaataccaggaggtggagatcattgggaaccatgatggaggctggctccaatgactatcaaagaagttaaggaacttgctcaaagttccacaaagttgggattcatactcaggcaatgtgactctacagctgatactcagtactgttcaactccatatcattctgtcagcttgtaatcaagtataaaatcaacttggccatattagcataattgttataacttctcatttgcatagcgatattataatttcatggcttctaatctctatgtgttaagtatcctgaggaagagcctactgctgctgccttcattctcatataaagctgtatataggcaatgactgacatctcaagcttttgaatggtttcgatttttagtattagtagtaataatagattcagatttacctactggcactaaattacacttgctttgcttctgatgtaagttacattatttcatttgatcttcacagagaagttcattttagagagatatattaatatcttgactttttacacgtgaaagtttaggggtttgcaagtaagtactggatcttgggaatccaaatcttttgactaccaaccttccctgagcctgctggttcccatgaatggctaatttatagaaatgccttggtgagagtttttctgagttaatgtttaatcattactttatggttggatgctaatcctttcattgctgtaaatcaatatcttgtaaatatttttaactttagtcttcacagctccattatgacctccaaaagagggtgtgtctctcaatttgagagtaacctgaaaccatgaaattagaactaactgttttattatttgccaagcattgtattgttttatattgttcttcaaaattataacttcctaggaagcttttacaaatttaaagataaactatgtgctttctttaactgggggcattaatgtgcacatttcttaattatttggttcagtgaggaagaaagtagacctatgagttcagggtcctagaagaggaggtaatgtaaggcagagccaaagccactagagattttattcatggcactctaggagccatggtggctcaggatgtataactgaggtagagggagtaggagaggtgagtatcaagcaggtcttatcatccaccccttccctgacttcttaaaactggggaccccaaaactgagcttagtggcctctgtggcctaataccatttctgtgaggctggaaccctcttttcttgttttcctcagttgttctaaagcccaccctgctcaaactcatgtccataagtttcatggatgactcttatttctctattatattcttccattatttgattccaggcataaaactctttcagtatgagatttaaaacctcttcagggccaaggtccaacagtggctaaatacaatatttttcaattcaaaaacatatattgaatgcttactgcatgtcaagtgttattgaaggtatgggggatatggcctgctatgattgcgtatttgtcccctccaaacctcatgttgaaatttgatctccagtgttggaggtgaggcctaatggaaggtatctgcataatgggatcagagccctcccacaggggtgagtgagttcttgctctattcgtttccgtaacagctgattattaaaaagagcctagcacctccctctttcttgctttctttctcaccatgtgatctctgcacatgccagcctccccttcaccttctgctataagtagaagcagcctgagaccatcatcagatgtaaatgcccaatattgaactttccagtcaccagaatcatgatccaaataatcttttaaaaagataaattactagcctcagatattcctttatagcaatacaaaatgagctaagatctagccctaagcagtatagataatgtccctgttccactggacctttacagttcatagagcaggcaaattataggcaagtgcagaaataatttcagatggtaataaatgctatgacagaaatcaagtgggatagagaggaccggcagacacagaaaggagtttctctcttattccaagtatgattttgagctcctggaggatttcagcatgaatgtgacatgatcttttcacatttcaaaaatatgcctctgactcttgtgtggatagtagtttggggttggtgtggtttgtccaggtgatcaatgatggtggcttggagaaggatggtagcactggaggtgaaaataagtttaaaaaaaaaaaagaaacgcaggatgtattttggaggtaagacaatgtgcaggcatgtgaagagtgagggaaggagagaaggtaaggatggctccttggacagctggctagatagcttaagtaaagaatttctcttgcctcctggctgtttcctttttatcagagcttgtctgcagaggttcctctggcttaactcccctttcctattggatcagccttcccctttcaaggatgtgctcaggaacacctcctacttcatattcacccagcacagatttgttgacagaaggtaattctccaacttggcaaatatttattgaggattttctatatgccaggtactttgtgggtccctagggatagaaagacaatagatatggcctttgtcctcaaataattgacagcattaaaagacacataaacattaactacaatcaaaagagctaagtgcccttctagtaaatgatcaaagtgctatggaagcactagtgaccaaatgataaatgctgccccaggaagtttctacataaacaaccaagcataaagcattaataattaatgggtcttaatattatccttccaatccttcagcccccaaactggctctgaggcatgcagtgcacctccgtgtccatcctcactgacttacagccccctgatgctgtatgaggattgtatcaggatgttttgggcttcaaggaacccaatacctggccaaaagttatttgaatgatagcgttttattactgtattgtcattagcatcttttataattggaagtgcagaagtaaagtggttcttgggtttgttaatgtaatggcctgaacacatcaagaacatggggcctttccacctttcagctctgccatccttggagttttgtcttttgatctccagtatgtcatctcatggttgagcatggcttctgcagctcaacccagcacttgctcatacagctcattcacagggcagaagaggatgctcttcctcattcatgttctgctgtatcagggaggaaaaccatttccataagtcctctgaccagatgcaaactttcagatcttactggcgacatttgtgtcacttgtccatatccaaaccaatcaccggcaaggagaatgaattgccgtgattgaaccagactactcaagactcacctttctcaggttggaaagtatcttcttttgctagcacatggaaggagaagggcaaatacctaagttgaattgaaaattctgaaagacagaaatcggggagacggcctatgtaggcatatcgtgtatttggttattgctctcttttcattacgttagaaagatttaatttttcaacaaaagaggacagacatcaagccagctctgatctccaaaaatctggagctgtaattctctcctttccttctcctcactttctttcctaactgggtttattgcaaatcagtgtgctttgttgctgcctttctgatctcaaggacattttgacctcagccctttctttcttttggcatccaaagtgatcaagaggagaaaataattgaattgcaatgttaaaatataaatctgagataatagagcaggtaagaaacatctgaggggaattactgacaatttacctctagaaaatccacataaactgtcacatttcatccagttcataatagcagaaagtggtagaaatagtcaacataaaataagatgggcaaaatttttaaaaaatggtaaaacttagatctgctaaagttaacccaggaaagtaggacttaaaataattaatggccataaaaataaaatagtaaataacaaaagcaaacaaaataacctcacaaggtccagaagctataatttaatctaacatgggcaaaaaaaatctaattgatgactcaaatctttgttttaaaatttccagcgaaaaaattactctgcatggtaatgattttcttaaaatgaaaagggtttggctgtactgaaaggagaacccagaacccagcagccagtggacccttattccttcctggcaatctggccctattttccctgtctgctcactcgcttgcttttctggtgaactattccaggtatctcctctccactcaaacttccaacacctcctccatatgctcattcatagctaaggacctggcttcctgttttgataagaaaactgaaaccattagaagagaacttcaattctcaccggctcatcagtgcattcacctgtatcggctcccctcccaagttagaggaatgaatgctcaggctcctacccaagaccaggccctttgtttgtgccctgggtcccatcccttttgcctactgaaagattaggctccagctgtccccttgcatgtggcaacatcattttttccatctctatttgatcatgaacatacagtagtgtctcatattcttaaaaaataagaaggaaactgtctttttccaccctcatccctgccaacctaccactccctttctctgctctctttaccacaaaacttcttaaagagtttctattatcactgtctgttacccctctccctttttttctcttaagcctcctggaataagggttatccccaccacaccactaaaacagctgtattcttgtcaaggtccctaatctctgtgttgcagattgggagttgcttctcactctgtgtctcgtgtgcctgtcaattagtcatccttcttctccacctcccctcggggctctcactctctcctggttgtccttctacctcactgtgcagtctttcccagcctccttaggtattcttcctgatgtcttcaacttctcaccttggactactctggggctccatcctaagaccttttcctttttcaccttagatgacctcatccactcccatggcctcaaataccatttacaacttggcaactttccaattttacctgcaaaccagaccttttcctgagctctaggtgcagtatacaactgcttactggacatctccatttggatgtgatattggcatctcatactgacatcttccaaaactctttgtcttcccttagtacatcttatttcagcaaatggcaattctatttttgtagttactgaggccaatatccatgcaagttctcctcaactcctctctttcatccacaagtcacatccaatgtgtcggcagttttatcatctgtatcttcatattctctcagagtttgaccctacctcaccacctcatctcctactaccctggtcaaagacacaattgcccttcccctaaattattgccaacatctctctttttttttttcttacttccctatggtgtattctcaacacaacagacaaggtgattgtggtaggcagaatgctaaggtgacccccaagaaccctctcctccgctcctgtgtactaatctctgagattgtggatatgatgaattttcttcctgtagttaagtttcgttatgatgcacagttggctttaagaaagggagattacctgcttgggcctgactgaatcacatgaactgtttaaaagcagagtttctctggctagtcacagaacaggcagtcaggaatcccaggcatgagaaggatttaacatgccattgctgacttggaagatggaggggccatatggccaggaatgtgggtcatctctaggaggtgagagcagccctggcttatagtcaacaagtaaatgagaacttcactctcacaacctcaatgaactgaattttgccaacaacctgtgtgagcctgggagcaggtaatttttccccagagcctccagctgacaactcattccagccaaaactttgattttaacctcacaatactttgaacagagaactcagcaaaatgggctggactgctgacttttagaactctaagctgatacatgtgtgctgtgttaagtcactaagtttgtggtgatttgttacatagcaatagaaaaccattaataatatagtgataaaattgttttaatttattatttatttatttattttgagatggagtcttgctctgtcgctcaggctggagtgcagcgatgcagtctcagctcactgcaaccactgcctcccagtttcaagcgattctcccgcctcagcctcccagatagctggcactataggtgtgcaccaccacgcccagctaattttttttttttttttttgtatttttagtagagacagggttttgccatgttggccaggctggtctcatactcctgacctcaggtgatttgcctgtcttggcctcccaaagtgctgggattataggtgtaagccaccatgcccaggctggcgaccacatttaaacataagtcaaatcatgtccttttctgcttaacatcgttcattggctttccattgtgaaggctccatggcacttgttaccacctagcatatggcattgcttactcattatctgttcctatgtctcccccagttaaaatataagcttcataagggcaggagtttttcatgctttattcactgtgatgtctctagtgcctagaacactgaataacacagtaagtgctaagtaaatatttggtgaattaaagaaattatcttggagctcaggcaagaaaatttttttaatgaacatttattaatattgctgtaattctgaataaaattattatatttataaaccactcagtactaaatcatgtatacctacaatttgtaagtgctagcaactgtttgaaaaaagatagaatacgtttatcctcatggcttattaatagtttggttaagaaaagactgttaaagtaagtacttaaatagatataaaattacttgattaattggcaaaatatgtggtacagaaaataaacattttaataagatgaggagagagaaatgaatgtggactaagtagtaagggatagatcaagagacatgaagaggaatagtgggaaaatgaaggccatgaatgtagactgtttatttgagaagtttgtccagatggcttggggatgcagcaggatcaggtaagtatttctttaagatcagtacacactctgcatccttaaccacagagcagaagtgagcagtggaaagaaactgaagatgcagctgggcacagtggctcacacatgtaatcctagctctttgggatgctgaggcaggaggatcgcttgagcccaggagttcgttcaaggctttagtgagccatgatagtgccattgcactctagcctgggtgacagagtgagaccctgtttcaagtaaaaaagagaaagaggaaggaaggaaggaaggaaggaaggaaggagggagggagggagggagggagggagggaaggaaggaagctaagaaagaaggaggctaggaaggaaggaagctaggaacgaaggaagctagggagggagggagggaggaggaaggaaggaaagaaagagggaaggaaggaaggaaggagctttgtgttttagagggaaaaggtaagattttaaaaaaatcccttgggaacaagaggacaagcatctgagtcatagattggggtgtggaatgatcggggaggaagctcacctctccctcagagttctaaggaaagagttgaacaatggcaggagggacagataccacagaactgatgagcttggtagaaaataagctcctatggtagcttttgctgtaaaggaggaatcattgaatttttttgttggctaattttataattttttcaaaatgtatactgcaggacctgagttgttcagcattgtataatatttaaaatctagagaacatgaaaaaagggaagaaaacaaacctattttaaagcttacgtgactactttttaatgagttcaggaaaaagatgatgaaagttattgggtattcccatggaaaagagaatagagatggtaaaacttcctttctaggaagttaccttctaggaagccacagagttgccatccttcttactgtccagagggaaaattctagagttttctgaatttgcactcttttgactttgaagcagaacaaattaagtttcaactgacccaagtcctaaggatactaccaacctgcttatttaaaatagttgcaaaccatgaatttaaacacttccataaagcctaattcatctccaccaattcacaaaaaaatgccaagaaagcatttaccacatgcaatcactgttccaaagatttagagaggtttagaagagtgattgtaaccacaggctttggcgccatattgcctggtccaaatgtggctttggtgcatactaatcacagaattttagtctagttactggctgtgcctatctgtgcctcagtctccttatttgtaaaatgggaatgagcataagaagaataagtgggttgaaagtctacattgcctagaacaacccagcaaactagaagaacaccataagaatgcgtaattattattctttatatgtttataacattttttgtttgtttgttttaacagctccagacgcaggtagtatagtaatttttgccccatactgctgaatgttttgcctggcaaatactgggaatggggcaattcctgtggcagttttgttttccaataattgttttttcttatatcggggatgacaaatgcttgtcacaaagagtagccttgttgattacacttataaatcttcgggagacttcttcaatgagtcagtgttagagctttcagtttccataaatgcagatttcctttactcagttttcttttaaacatgagctgatctttcttagtttgcactataataccctccactgaagtctcactgcaactgcttttaagtatatgtgaagagaaactagccctttgctaaaatagttgcatgtttcacgggccagtgagtcatttagtcatacacttaagaactttccacctttcaagtgtttatcatcacctcggatttcacggcctaatgccagtcaatttcatggggcatagaagccctgtacgtattagtttgggccattattgtatcagtcttgtttattcccagaaaagtcttatcaagaaaagagggagtgactataatcagaaaaaaaaaaattcatttcagaaagggataaagcagtcctgccaccttgcttagtgctggctccctgtgtgtgtagagcttcctgactctgcatgatagcagagggaaccaggcagtgtaactcggcttagttcggtcagtccttccagccttgcatttctttaccaacatgttcatatttgggttaagatgaaaatagatatctgatacttgaatactgagacatacatattctgcccacttttacttttctgctacatatattggagtcgtatgctgatattgtttcagggtaattggagtttcagtctcaacatttgtctttcaagtccagtcttgtgagcagtttttgtttttgctttaatggtgctcacaattttgaggaatgtccagatgagattgtcaaactgtagtcaggactggccacctgatgttttaaaaggaaagttttatgggaacacagctgtgcccattcactcacagattggctgtagctgcctgcaagttacaatggcagacttgagtagttataacagaaactaaagaccataaggcccacaaagcctaaactattgaccaaccagctatttaagaaaatgtttgccaactccaggtctagatgttgtattcttaccacttaaaaatactttcgttataatgtctaacttgaataacgagattcagaaaaacgattaaatatagagtttattcaagtgcaaagcttgaggatgacctcttggaaaacatactccagacaaatggggttagcattaccaagtgaggaattgaaagtttcactcatataggcagttaacagggttgcaacattttccatacaaggtcagtatgtatattacagtgattttgttggttacagattgctatattccaactaagatttctttaacattccatgagcaggggtgatgatctgaggggttcctacctcgggcaccacagggtcttttctggtcatttacaggaaaaagcagaagttacagctgcatggtatgtgactcaggccacatacctctcaaggctcaaaataacctaaagttccaacagatttaagttctaattatttaatttcatcacaataggtaagatgaatcagttcttatatcagttagggaaatcacactagaggccaggcgtggtggctccagttagggaaatcatactagaggccaggcatggtggctcaggcctgtaatcccagcactttgggaggccgggacaggcagatcatctgaggccaggagttcaagaccagcctggccaacatggtgaaaccccgtccctactaaaaatacaaaaattagctgggtgtggtggcacatgcctgtagttgcagttacttgggaggatgagacagaaaaatcgcttgaacctggaaggcagtggttgcagtgagccaagattgtgccactgcactccagcctgggtgacagagtaagactctgtctcaaaaaaaagaaatcacactagatatttcagcagagagatttaatatgaaaattggttacacagataaaagagcaaaagagaaactctgaggtaactgagaaagtgtaactgcaggaaggaggaacacagaagatctcagatcaaagctctaaggtttataatccccctagctgctactggtacctccgtgaggcatgatgaagcaggttctggatattacaaaggaagctagaggctggagcaggtgctactgctgggtgcatgctgtcagcaagaaggaggaaaggaggagtccctcctcttctctaattgccatccaattttttctctattttctcctattaacagaacctagcaagaatcctgcagatgaggcttcttggaaatatagctgtagagcccttccccagaattactgagcaaggaagggtatgtatatttggaggtgaaagccagtaggtgactggctcaggcttacggaagtgtgctgacctaacagtagctagtggtggtctagaacctgagttgtaatagtctgacaggttcttcttgcccactgcacagataaaaccaattcactgtgacagtgatattgcaatagagaatttcatagtcacaggaacagccaagtgaaaggacaggagacagttctcaaattgactccctcaaagcttggaggttagggtttttaaggatgatttggcaggcagggacctagggaatgggtgctgttgattggttggggatgaaatcataggactgtccaaaatggtctttatgcactgagtcattttatgggtgacggtcacaggactggttgatttagttccttggtatgagtcacaggtccaggtggagtcagcaggtccaactgaatgcaaaagtctgaaaaatatctcaaagaccagtcttaggtcttgacaacttgacaatagtgatgttatctataagaacaattggagaagttacaaatcttctgacctctggaataatggctggttatcatttaactactagcctacatcttggcagaattcaggcccctcctatagtcctcactgtgtggctttttcttcgtcttagaaaggcaatctcagtcctcagagtgggtcagttttgggagggactattaccatccttgctgcaaagttaaactataaactaaattccttccatagtttgcttggcctgcacccagtaatgagcaaaggtaattagtttgtgaggttagaggcaagatggagtcagttagtttagatttctctcactgtcataatttttgcaaaggccgtttcagaggctcctgtgctcactctgtctagtcctatctggctaagctcactcctcttcctacactacagccacttggagttcacatattgtacttggagctgttggtgcttattttcagattgtctgacttttatgttttcattcaacaactatttattgagtgtctactgtataccaggcactgttctaggctgtagtaatataatagtaaacagaatgaaacaaaataaaatcagtgccctcacggagcttacatccaattaagggaggcacacagtgaacaatataaaaaagtaaaatgtataatcagttagatggtatcattgctaagggaaaaatgagtaatgctggaaagagtagtagagaattccatggggaagaaggctgcagtgctagtccagggaaggaatgcagcatttaaataaacacctgaaggaggtgaggaaggaagcactggccatatctgggggaagaacattccaggaagagcatatagcaagtgcaaagtctctgaggcaggcatgagcctggtgtgtctggccactgggtggccagtgtggatggagtggaaaggcaaaagaggaggagaaggaggcataggaggagggggaactaaaccccattaagatgttttatttttttcgaagtgttgctattctaggaaatgtgcattatactatttcaggtggacacattggaaaatgattatgtccctaaccaaagtttggtcacctggcagtcccaacattctacagcctccagctagatggcaatgcatttatcatatgcccctggatgtaccacagtgttctttttttttttttttgagacagagtttcactttgttgcccaggctggagtgcagtggcacagtctcggctcactgcaacctctcatgactcagcttcctgcgtagctgggtttacaggtacaccatgccaggatgacttttttttgtattttagtagagatggggtttcaccatgttgcccaggctggtctcgaactcctgagctcaagcaatccacccatctcggcctcccaaagtgctaggattacaggcatgagtcactgcacccagctgtaccacagtgttctattgttgacaaggtaaatctgctattgtgattatatgctaatgtcccttatgtatagtaatcagagaaacatcagtcttcagacattctctaattccattaggtccaatattttcccttcatactgaaaactgctgacttccaatatggaggctatggatggtgttaggcatgtattaatagaagggagaaagtgatattcactggcacttaggaaatgattagattgcacttatcctaaatatttttctcaatgtaattgtttcatgcttttttattaggatcatttttcattatgaacgtagtgaaacttaactggctgttattttattgcagttaaattcttaatctcaccgttaggtgcttcagaggaaagactcttttatattcttttttgtattctggttgcctaacatatgcttggaacaaaacaataatgtgcagtgtaacatatctacaggtgcttcttaagttctaagtcctgagctaagcatatgacatacattatcttgtttaatcattgaaaatccccatgggctattagtctcatgttatagatttttaaaatgaaactttaaaaggtgtgttagtttgtgctgctgtaacaaaataccacagactaggtaatttataagcaacagaaacttattttctcacaattctggagatgggaggtttaatatcaaggcattggcatttagggtctggtgagggccttcttgctgcattctcacacggcagaagagtagaaagacaaaaaggcttagactagttccctccagcccttttataaggcacctaaccattcatgagtggggagccctcatgacttaatcacttcaaatggttccacctcttaatatcacaacaaagatttagtttcaagacattaattttgggggacactcagaccatagcattcacccttgaatcccaaacttcatgtgcttttcgtacgcaaaatgcattcattccatcctaatagccccccaaatcttaactttttctagcatcaactcagaaggctagaggccagagtctcatctaaattagtttttacctaaattaggtgaaacccaaggtaagtttcaccctgaggcaaattgctctccagctgtgactctgtgaaatcaaataagttgtgtgcttccaaaatacaatggtggggtaggcctaggatagatatttccattccaaatgggagaaatagcaagaaacggttaataagtgccaaataaatctaaagcccaacagggtaaacaacattacatcttgaggtttaaaaataatctttgactccatgtcccatgtttcagacatgctagggtgggggttgggttcccaaggcctcagaggaccacccccacccccccagtaaggctttgctgggcacggcccatggtgcagctctcatgggttgaagtcttgtgcctgtgactctcccggctgacattgcatgctggtgactctacagttgtggggcctcaagggtagccttgccccgcagttccattaagcattgccctagctgggactctgcagtagcttctgtggcagttctcttcatgggccgctagcctttctgaggaatcttttgaaatctaggtggaggtagccatgtccccatgcttgtgcactctatgcttctgcagaattagcaccacatgagtgctgccaaggtttatagcttatacatgctagagtggcagctgagcctgcttgagtcatatatgtggcagctgaagagtgctgcaccagaatgctgacagcagagacaaggaggtgcaggggagtcaatgatgaggtcccatgggtgcccaaggctccttttttgacatagtcctttcccctaggccaagcttgtccaacctgtggcctacggacggcatgtggctggacggctttgaatgcagcccaacacaaatttgtaaactttcttaaaacattatgagttatttttgttttttttttttaaagttattcagctatcgttggtgtattttatgtgtggcccaagacaattcttctcacgtggcccagggaaaccaaaacattggacacccctggcctaggccgtggcactctgggcctgtgatgggagggacagcagcaataatctccaaaatgccttcagggttgttgttccattgtcttgatgaatagcatctggcttcctattctccatactaatctccttattaaacttaaacattgcttggccacaccctgggttttctctctgaacttgccttttagtctttacaacctggggaggatcaggccaggctgagacttttccaaatcttcccttatgattatgaactctgtctataatttgtttttctcttctcacattttcctataggatgtcaggagaaaccattcagcaacctgaatacatttttttcttctgccggatatccttgtttatcctctaattctgccttccagaagggcacagacacaattcagccgagtgccactttctggtatgaaaggccatttctctagttccaatgagatctttatttctatctgagatctcatcaaaagggtcctttactgccatatttctaccagcattctgatcacaatcacttagataatttctgagaagaccgaggttctatccacagctctcttcttcttctgagccctcgccagaattgtgtttaacactctgtggatgtaatctaggctttttctagcctgcacttcaaaactattccagcatcacccattacccagttccaagccacttccacatttttaggtatctgtaacagcaacactccatttctctggtaccaatttctttctaggtccatttgtcttgttataacaaaatacctaagaatgggtaacctttaaagaacagaaatgtatttctcacagttctggaggctgagaagtgccagattaaaatgcaggcaggtcagtgtctggtgaggccccaccccatcgaaggcattgtctctccaggcagcatccccacatggtgaaaggtagagggtcacaaaggcagcagcgagttccctccagcgcccctgtcctccacttttttttttttttttttttttttgagatggagtttcgctcttgttgcccaggctggagtgcaatggtgtgatcgcagctcaccaaaacctctgcctcctgggttcaagcaattttcctgcctcagcctcctgagtagctgggattgcagacatgtgccaccacgcccggctaattttctattgttagcagagacagggtttctccatgttggtcagtctggtctcgaactcccaacctcaggttatctgcccacctcgacctcccaagtgctaggattacgggtgtgagctgctgcacctggcctccctccagcccttttatgaagcactaaccacttcccaaaaaggccccacctcttaacactaccacaatgtatattaaggttcaacatgagttttggatgggacaccatctttcaaatcatagcaaagattcagtaattttcccaaggccccaaggcaagaaatggacctggtttcaaatccaggctctctgattcaaagcaaccagctgctcaatcccttgagtggtgtttgttgaatctatggagatgggtggcagcctgcatgtgctgctggagaatatagccacaggatgaagggacattcagtcagtttcttcttttacctccttgatttttcctccaccacccctgtgtcaaggctgttaatttgctaaagcaaattttggagtaacactcgttttatttctttatacccatcatagatacaagcatcaatatggaatgttagctgattaccatatggaacacaggaactttataaccagataactcttttgcctgtttttaacaactttccacagttatgtgccgtaacgagcacatttcttttgagatgtatttcattagccatttatttaccaaaacagtttatttttgtggagtggaaacattatatgtcaatttagtacagacaaaaaagtttagtatgaatgagtgacaatattcaaaatatcttgtaatcatacagaagcaattgatcaaagcaaggatatcccgtggaactatactactctcttatttggattttatcattctggaattattgtttttcagaaatgattttgacactacagcaaggattcattaagataccttaacactttgataagaatttattattagattgagccattttaaatgccactattctaccttttttaactaataaaaatggtattttcatgcggttcaagctaatagttgctttagctaaagaagaaaagtataaaattataaatctatatttttatttttaaattaaagatttgaaactcaagtttctgtataagctgatgggtaacatatgattaagtgctttacttggctgcacaatgctttgaactgataagtcaaatgaacatgtcccaggccgaactaagaaaaccatgcaagcagccaaagaccttcatctgctgccgcagcagtgccctgtcagtgagcaagtagacaaggaagacgaatcatgagcatgtctcataagagtttgacaaaataggttgtaacttggcagccaactatgaacttgctaaaggtcaaaacctggagttggcactcttgtctcacagaactcgcttatctagatgtttcaaaaccgtcttccaatgtgccctgcttatcaaatggcaaggctaaaaacaaggaacatttgtgttgctctgcttgctccaatttagccgctcttctcttggactggcagctaatatgtggaaactgggttgcagggttattctaacgcagccgagtgaacctcacacagaccagggtaagcctgggccttgcagggatgtcctgggctctagcaagtgtggcatcagagttgatatctgggaaatgagcttatggatccaattcacagggagccatcatgagcagaagggagcctgaatgtggtagagatgatgggttttcaaaaactgtggactaggcctggtgcagcggctcacagatgtgaggattgtggatgtcaataaccatctatatttcaaattacatctatttcaaataaccatctatatttcaaattacactaatttagggtgtgttttaagtactttttaaactaatacctcttgataacagagtataactccttaatagtatttttcaaatagtactcactttttaactatttgatgcatgaaagagtggttggatgaatacaagcaattgagagcattttgtgaacaaatccagttactattctcaatatgagtttcaaatattttctgtagcataaggctttactccttgtttgaaggttggcaaattcaaggactgattttacccgcttgctatatttctactagcaaacacaaatctcctactaacttttagggatgaaatgcaggagtaaattgaccaaaaaaaaatactttagtttttttaaagctctctttaacttattaaatgaacaaggtttaaataaaatcaataaagtaataaagtgaaatgtggcatttttatttcttgaaacaaagttgttttaggcaggtacaaggctattatcagataagatctgaagaaataaaatcttttattaacctacaacttgaacctgtattttctttattatctttacttataatgatgaaagcagaaagctttatcatttttaactgagggaatggcccacctcagaagtcttcttatctgttttttttctttcaacttttattttaagttccagggtacatgtgcaggatgtacaggtttgttatataggtaaacatgtgccatggtggtttgcaacacagatcaacccatcgccttggtattaagcccagagtctgttagctattcttcctgatgctctctctctgcccacccccaaccccacccccaacaggcctcagtgttggttgttcctcgccatatgtccatgtgttctcattgttcacctcctacttataagtgagaatatgtggcatttggttttctgttcctgcattactttgctgaggataatggcttccagcttcattcatgtccctgcaaaggacatgatcttgttccttttcatggctgcatagtattccgtggtgtatgtgtaccacatttgaagaaataaaatcttaagaacattgtttgaaagagcattttctgtaagaaaattacaaggaaggcatttcctgcaagaaaattaacaagggacagggctactggcttcccagtcccccaaattgtaagaactgcagttataggaattttataacggtggctgattttgtgagtgtatgtttgtgtgtatgtggaaaaagtagaggatttgagaaaaaatactttaagctcttttatcagtggacatactctgggattggagaagaggaatcacgttggcttgattatgcttctaggatgatatcctacattaaccaataaaaactctttgagtgtgtgcctactgtggaattgaactgtgttaggtgctaaaggttgacgtaaaaattaaaacgaacaaacagcaaagccttgtcttcaaagactacatggcctaactgaggacaccacatgggtaggcagagcaaaagagttgtcaactattttgtcattaaatgacaagagcgaaatgagtagtgttggggcaaaagtcagagggggcagaactagtcttcatgaaagagatgggaatttgagggtagtgattatgacaaccaggaaagcagggaagacactgcagagaagtggtttagaaaaaggagcagaggtggaaaagcccaagatcttctgggttcagtgggctggtcataagagtgaatgagagggtccctgcaaggagagagtgacataagacagtcttgtgtcggtcgtggagggctgtgagtttcaggctaaggagtgttaatcttgttcctgtaggcaatggggaaatattgaaaacttttggcgaagggatcaccagaatgaaagtagtggtttagaaaaattattctagtggtggtgcagaggagggagagaattgggagaatctaatgtcagggatacccagaaaaaaaatttccaggaataatcaagagggtcaattagatgggcatggtggaaaaacagacagaagtatcaaaaatgattttcagactttgaatttgggtcaccagtggtagaatatagaaacacacaaattctgttaatttcaaagaaaagtgatgatattaatgaagctccctgaattgggtgatcagcatgtcctaagggtctctgagaagcaggagggcctgaaactgggccccaaagcctctgaaaaggatgatctagctccaggccatccactacagtagtcgttgaacacctggccacacataactattgacttaaaatgtacctagtcaaattgagatatgctgtaagtataaactacatatcagatttgagagttagaatgaaaaaaagaacatgaaagttctcataaaatttaaatattggttacatggcaaaatgatattttggatgtattgggctaaataaaatgtgctactaaaattatttttaccttaaaattttgtttcttatatagcttctagaaaatatactcacattctatttctataggacatagctgatctagaccttcaaagtaaagcccactaatatagcataatacagcagagtgaaacacacacactctcacacacttcatagttaaatgcatgtttactccatccattcagtctgaagtcttttaaaatgtgtcttgcattttgtgagtatatttctgaattttttgagcagggtatattgtagagatccatttgtttattttatccaaaacttaggttattccatcttactgaaatgaacatttggctctttctttcaaccagcagatgatgctacagctgacagtcgcaaaacttacactctaactgattacttaaaaaatacttatagactgaagttatactccttaagatggatttcaggtaagaattttttggggtagggcagattttatgcttacattcattctagttaagtcgagatgtgggcttttatggcactgagaagaggtaatccttgtttttaaaaattctatagagagttttttttttctttttctacttgaagtgcaaagggagaaagactgaaaggaacccaagtatttctttgacatgtataataaaaaattaaatgtgaattgaaaccttgacaataatgatgaaaaaatgaatgaatgttagtataatatcattcatgttttctcaacttagaaatgcctatttggtatttgtgagcttaaactgtattctgtaattttcagcttatgaagatgtttaataacaacttgaaattttgatctgggtgttttctctctttagatcatgaatatctctacaaacaagaaaataatatcttggtattcaatgctgaatatggaaacagctcagttttcttggagaacagtacatttgtatgtttaatcacgtaattaattcatgcatagaattctggggatttttttcattacctttggaatcacgagtactgtcatttctcaacctgttggactctttctgcagcatatggcaaagtggatctttctctccttcttgaaatgctccctgccttggctactttttagtctcctttgacgattcctcttcctctgcccatatttttaaatgtaagtgctccttggggctccatcttcatttgcctccctcttcactttgcatgctctcctttggtgaatttcatgcaaccccacagcattactgccctcctctctggcttgactctcgtatacacacacttaacgctaaccttctcccagatttaaactttaatttctagtagcctgctggttcctacatgaggatttcaaactcaaaatcccaagctaaactggttatctttcccccactgtcctagcacactgaaagcatcttattcttttttgtgagttcccagtattggtaaaagttacttaattctcctccaagtcacttatgctagaaacctcagaatcatcattgactcctgtcatcccccatagttggcgacaattctccctctgcatgtcaggtatctctcagtttccatttccactggacagtcctcgcttaaaccctcatttaatcttgtggtaatgagtgctctaacttgtgtccctatctgcattctgtacaccagaccactgcactccccatatctaggctgatatcagccctccgctcttccctctcatttcagccactgtgtcaccagagtatctttgtaaaagatagatatgattctatcacttccacatgcaaaaaaatagatctagttccacatcttatatttaggtcccagctatttttctaatttgttgtcctctcaccttccactctgtctgacaccagcgccccccacaaactatattcaggttacacatgacccttaaagagtctctaaacatccacgtcctttcccatgcctggcattttgcttacgctattcccactgttgagaaagttttcttttcctcatcctcactctcgcaggcatctttcctcttaggattaatccttccctttctggctttctaacattgatcgccacctaccttgcatcacggtcatttgtgtgggtgaatatgccacctctgctagattaggacttcccaaagcacaagccacatgtctagaacagtaccccctatgaagtaagtgcacagtgatggcaatgaaatggaattgttcaatttttctttgttcttcttgtttgacaggatgagtttggacattctatcaatgattattcaatatctcctgatgggcagtttattctcttagaatacaactacgtgaaggtaaaataaatgctttcttactgtaacatttaaataatccaagagtatgctatgttataaccgatttcaagtgtatggatacttaagattaatatctaagtaatgtaataggcactaaaactcattaattcagaatcagagtcattctcattcttaaagacaagttcagtgttttaaaagaaattcatttttagtgctttcaaatactagaaagcacagttaatattatattgttctaatatatactaataacataagtcaataaaaatttgtacttacacacatatttaaaagtaagtttacatgtctgatttgtacacctaatgacagaaccctttatttcctttgtcacagctttatgtatagtaagagcctccatagatatgtgtttttaaaagagttaaagtcgggcatggtggcatgcacctatagtcccagctacttaggagggaaggctgaagcaggaggatcacttgagcccaggagttggaagctacagttacctatactgtgccactgcattatagtctagaggacagagtgagaccccgtcaaaaaaaaaaaaaagaaagaaagaaagaaaaagaaaaggaagagttaaactttccatcctccagaaaagattccgcaagatggcccagaccatctcccaaccttcgggccccaccatatacaaactattctaaggaggagagcctcaccacagatcgtaaagattccatcaagagcactcagctttccccagttacccagctcaactccacatcctcacacattcaggaaaggttacagcttaatcatacatcctcttcatgtttaggatggatatgggtggccataactttaactacagctttttggttactcatggatttgacaagttgttcaagtataggaagttttgagacatgtagtgaagattacaaatttgtaaagataccctgtattgcaagcaaaatacaaagctggggattcccacccctgatcttccttttctaggataaataatattgaggagacaccaacactcacacaccaacactcacacaccaacgctcacacaccaacactcacacaccaacgctcacacaccaacactcacccaccaacactcacacaccaacactcacacaccaacactgctgtactcaggccaagcaaaccattccctactgcatttaccatctcaggatggtgactgttaatcgtaatatttaccctggatttgctgggctgggctcactctcctggacatgaagactctatgttctgttaaaattaactgtaagtgaatcggaatcttgtaccaactttgacacatctgttgccaattaatggattattgtttgtttaattaagtgcttcttatttctatctatagaatacattcacttaatttacttgagaaacttttaaaacttcccagtgtccaggttcaatccccagatcagtaaacagaggtttctggggtaaagccagaatcagtatctttttttctttttttgagacaaggtctcattctgtcacccaggctagagtgcagtggtatgatcatggctcactgcagcctcaacattttgggcttgactaatcctcctacctcagcctcctgagtagctgagactacaggtgtgcaccaccatgccctgctaattttcaattttttcttagaaatagggtctcactgtgttccccaggctggtctcaaactcctgtcctcaaacgattctcccacctcagtttccccaagtgctaggattacaggcatgagccactgtgcctgatgagcctcagtatattttaaactgtcataggtgattgtaatggcaaccagggctgagaacccctgaataacagttgtccatgttaaagactaacatatgaaggtaaggtagaaacagaaaggtaataccagctcaccttactatatagccaggttcaacaaaagccatttgatgtgcacgaatgcgtgtattcccctggtggcccttagttggccagccacggttggagatttgtatttgttgtgtcactggagtttacccgtgtatttaactgcttttgcttttttcactctgtccccttccccctgccatctatgcttcagacagtatcgaaagtactacttttaaattctaaattagtttatgccacacctatgccacctacagtgccttcccatcacactcaaaataaaacaccagctctaaccctggcatcctgaggcctgtgtgattgaacacagtctgcccggctgaacacatctcctacccgcttctcctgcactcggcatgcttggccagagcttctcgtctcatctgcaccttaggatcacttgaggagcttttgaaaaaacacggatatctgtggcctaccctaaagcaactaactcagcatagctgtgggcctcctggagattccatgatgctgagttgagaacctttaattgcacagctctttctttttctcaagcatcaccctcattcccatctaaaggcaaaatcacttgctattgcttcctcatggaagcttctccatcatcatatgcttctctctattaactcaggtccagatttcttgggtcactttgtcaaacattgtcccctgccatgctcttccacccacaccccacaaatcagtctctgtcacgttaacccattttagtttcatcacaacattttgtgatattttgtcattgatttctttgcttattttttgcctgccttatttggtgccagtttccctgtgatttattcactgccacacctctgtgcctaggacagggccacatagcagatgctgaacatcattgttaaatgaatacatgttttattgcaaagtgctaaattataaagctattgaaactaaggatctatatcttctactacttttctttctttttttttttttactttcaagagagtccagtagaattttctgtacagcatatacgttttgactaagtgactcttatgaaatgtatctagaaaaaagaaaagtctaatttgattacatttccttggaggtctaccttttagtgttttttagatcctactatgtgacttctccatgactgagttagtgctatcacttccaagttgtggctacaaataaataaatgagcaagtgagtgagtgagtggataagtacccccacagtctggtatgaatgttctcctagcatctctgctcattgcctagtgctctggaaatagagataatagttgtgtcatcgattctatgttgacaatgttccagaaccctgctaagtgcttctcatgcattctcatgcatctgagattgttgccggcattatcctcatttgtctaaaaagaaaatggaagcttagaaagaaacttgcttcatgttacacagtgaaagcctgaatccaggttagaagactccaaagcctttgctcttaaatgtgatctttcctatctttgcattcggcttctctttgctatgatgctcttttactctttcccagtcaccctctgtcactaacctcagccaaagaatcatcttttccataatcctctctgcctccccaaggcctaatttatgattcctgcctctcccacccacctccattatatctcttggcacatcctattgtgattattttattgtcatttactattgcatatcctccattccactataagctgctccaggggagggactctgtgttatccagtaatgtctgatagatgatagctgccagtgtttata

SEQ ID NO: 264 - DNA, 32742 bp, Homo sapiens
  source 1..32742: mol_type = other DNA
gctccctcccctcctagctggcttcggcggggacggcggcggcggcggcgggcggggagggcgtgcgccggccgagaggtgtcggcggcgaggcaaaggaagtttcaagtggaaggtcgtccgtcggccggcgcgtcctcctgctctcctccgcagcatcatggcggagccgagcggctcgcccgtgcacgtccagcttccccagcaggcggccccggtgacagcggcggcggcggcggccccggcggccgcgacagcagcgccggccccggcagctcccgcggccccggccccggccccggccccggcggcacaggctgtcggctggcccatctgcagggacgcgtacgagctgcaggaggttatcggtcagtgcggcgggcgcggcggggccggcacaggccgggcgccgaggccgggcgggagggggcgcgggatgctgggctagcctgcatgcacgccctggaggcagagaggccggcttcggggcctactggcttcaacagttttttttttttttttttttttttttttaatttttaatgtatttgttcgttctatgagcgttggtgctgcaggaggcggcgcggcggatgtgactcgcactgcagacgagccgcatgctgcaaacttttatctcagggatcgccggggcggtggagcggaggaccaggcggcgccgccgcatcttcctccccccgcgtgccgggaccgcagcccgtggccggtggccacgcggacaggcagccgcgggtggggtgtggttgcgggggccccgccctgggtttccagggccccgggggccgcgtcctgggggactctgcgggcgcagccgctcctctgcctcccgtcgtgaccctctcgtcgtgggtaacggggccacgtagaagccgcggaggccccagtgcttttctgaggccggggaggatgctggcctctcttcctgacagccgccactccacgcccgccttgcagcccggctctccgcgccactcggcgcgcccgggtacccgcctccctccgtgccagggtgcgccgcctgccgcccagtccggctccccggggaaagcgggtgccctggcctcctgccctgcaccgggccgatgcttccctctgtttcaggccgagctgcaagagtgaaatccgaggctgccggtgatctgctctctgcctttcgttgccttctggccggctcacaaatatcaccttatcttacatttttaaatacctggcagagtcgcagggctcggcgttacttttccttgggccaagcacttgaagggccaggagatttgttttgtcccttgacttagaaccttccctattggatcatccagtttgagagtcttgtcacttagggaagcctccaggttaagtgggccctcagcgtctaaccttactgacgcagggatgggatgttgcctttccagaatcttggtatataagtacagcgatgaaaaaggagttcagaatatttatcttaagtattttttctaactttcacttcaaaaaattcttcacctccttttaaaaaaattaaaacagatataaaaatttcactaggtgtttaaatgagcctttatcacctgctattggggaataaaacagcatagacggaaatatatatataaatatatacataaaaatatgtgagaaaatgttgggcaggtccgtaacctaggatatatacaagcttcagataacctataataggcatctgtagacaaaattctttgaaaacccagatctttcataatttttgaccaaagactctaaagggatgagtcttcatgtcactgcctgaaatagcttcaggggcttctcaaagcctggaatattccatggaaacctctttaacctggcatataggccctgtaccctcaacctgcctgcctcctcccattgtctactcttcagtgattgcttcctgaatacaccgctgtcttccgcacatctggtcttccattctttgctgccttgcagaggctcttccctcctgtgagtgcccatctttgtgtactaaatctcactccgcttccaaggtgagtgtgaatattccttgaaaagccttctgcttctttcaaggcaaaatgccgtggtttcttctgcccctctttttacagacctcatagcatgtaacctcatagttgttatttgcgcaacaagatctgaaggcctgctgtgtcccaagcattgccccacttgctagcaatatagaaattaacaaaagtgatccctgccctaagttgttaggagacatagggaaaggatcctataggatgtgatgagtaagtactgggagagcccgaaggagggagtgactgccaggaaagagaaggaagcagagtatttcttagtagaggtcgtagttgagctgggttttaagtctgagtttgtaaggtgcttaattatttccactgttgccttcactaaccagctgtgaactctgacaggaagaggtgggccataaaagttgaataatggtatctgccacataattctccatagagtccataggattgggagaagttataatcaatttatatacctacttggtcaattattagggttaaaatacaaacgttgccttttgaaaacagtatttttttgtgaactaataaaatcttagtttaagttgagtgggattaatggcaggacttctttctgtttgcagtcccagcagtgttaattatggttggtcagtttagtggaaaaaaagaaatttacctgaggaatttgagaacaaaaacacctgcttattctaccctgacttttgcgcatttgcattgtgggaagggcttttctacatttaaagtttatctcatattttcccaactaaaagagaaagagttggcctgtgtggaggccctgttattgaaaaatcaaattgctggaataggtttttcgcaagggcttaatgtttataaggaattacaaacctgtttccatttagggtttaatgctagttgagagattaagactgaacttgtggttaagcacttttgcttaaacattacacgcagaagttagcagttcaaacactgaaccagtttcaacatgaatgccagttgacagcctttgcttctacccgccatacggcaggtgtcatatgatatgactccagcagtgtgaaccgtgaccagcagcaggaggctcagatgtgcctgaacagaaaaccaaaggaggcaccgtgttttaactttccagcatggcacgggcacggaggactttttcttcatttccttctgggcagagtttggtcccccaggattaagagagaataagtttactaaaatccaaacaaagcaggttcagttgtttgacttcagttttagaaaaataaacacaggattttgcaaacctaaaaataaagttttctctttattgtattgttgttcttgtgttttaaaacgtcagtggagaaattgtaatgctcttaggagtattctggttcataagtttattcatgacctggaaatgatgtaaaatcgatgggagggagctttatatttacagaggggttaaaaatgttggaaattattaaattccttcttccagacattgatatccttgtcttagtagatttcaaatatttctgtctttttggaggctttccgacctgtttatactcttcagccttgttaatctttgttccttacctctctaaagaaggaatttgggggtgagttgagcccccaaaagtaggtacccctacctttagaagtataaggggcacttaaagctatgccagttgaaaacttagtttatttgttgggggtgttaataatattacctagatttgctaaacagggaatgaaagtgaatcatataagtgtttacttggccatccgtaatggaatggagcagcctcaatgaacttctcattcaaagaattgtagtcattgaagtactaatttctgtatttgaattaggtgattccagcaatgttgttatctttgctgaatttcttctgagaaaccctagactcctgcctcagcaggagtttgtttgattttcttagggtttttgcaggatgcacctttctttatgtagttttatactagatttctcagcattgcttcacttttgtcccgggtggtcatttagaatgacctaaaagtaacaaattgccatcttagtcaacacgaagaatttgagttctagaatcctggacatggtttgacagagggttcctttgaatgctttatttctctcctgtgaggcattgtttatccattcaggtgcgttttactcaggtccaggtaatagcacatatggccaggtctttaaggagcaacagcctcttgtaaaatgagattgtaaatagccctgggcattcccactttgctctgtgctctcagagtttctgtggatttctatggtttgggggttagaattggtttttatagatatcctagaggcagtttgaggacagtggtaccttcgctggcgctagggtaagggagccggagcactgagtgtgttctgatctcccagacctttataccaggctgccttgctgctgcagtgggttctttgatcttgattagtttgtttgttgttgtttttaaaatactaaatgatgtctgaaatgctttgtctcaagacagggctttgattttcatttcatttcactttcttttttaataaatagaaaaatgtatatagaaatgttcttttgtattttgtatttttttttttttgataaagggtctcactctgtcacccaggctagagtgcagtggtgcaatcatacctcactgcagcctcgaactcttgggctcaagtgatcttcccacatcagcctcctgagtagctgggtctataggtgcaaaccatcatgcctgcctaattttttttttctttttttatttttaagaaatgggggtctcactatgttgcccaagctgctcttgaactcctccgctcagcgatgctccggccttggcttcccaatgtgttgggattacaggcgtgagccactgtgcctggcctctttatatatatatatatatatatatatatatatatatatttttttttttttttgtaagagtcttgctctgttgcctgggctagattgcagtggcgccatctcagttcactgcagcctctgcctcctaggtccaagcagttctcctgcctcagcctcccgagtagctagtattacaggcctggctaatttttgtattttttgatagaaacagggtttcaccatgttggccaggctggtcacaaactcctggtctgaagtaacccgcctgcctcagcctcccaagttgctgggattacagcgtgagtcactgtgcccggcctcttttgtattatttttattgtggtaaaatatacacaacaaaaattgtaccattttaaccgttcttaaagtgtgcaattcagtagcattaattatatttacaagataaatactcttttaaatgtgctgtcatggggctggggggagagatctcaagatctctcttgaaactgtggtaaagtgactgcaatcctttatttatgcatttgatttttaactagtgatattatgaattcttccctgacttttatggtttattgtatagtacattttgtgatggtgtttgaaaataagttgcagcagtgccggctctggagtctgacagcctggcctgtttcatgtcctgcaatggcggtcactgacgctgcgaccttgagcaaatgacttagatgtgtctgcactcagtttcctcattggtaacatagggatgataaaaatagggttgtgaggaatgagagaatgtaaagcactgagaatcgtgcctggcacacagcatgctttcaattagtcttagccataacttctatagacttcatttgctaatcagatgcaagttatcaggagagaacacagtcctatctttggcaggattctggagtggcttgaagatttctgtgctatgtttctagcagggaggaagtgggaaagagaggttgttccctattcccactcttgtgctgggctgctggaaggggcttacaaggggagaggcccctggggatctggcttccccttgcacctccactgctgtgggaggaaactgaagagacctgtggagctcctggcaatttggacagctcaggggtttaggtgccaaatggccctctgacaagtgatgagagcatcctgcgggaaggttgctgaagaggagcagcccattatgagagggctccgagaacaacctgctaggactgcacttttcctccacctctgagtttgcccggaggctgccatgctggcaggaaatgctgctgactaaaagaaacgctccctgtgtgtcccagccagtgcgaggacagaggccttcattttcagataaagtcatcaccattgcttccctgtctccttctttccctctttgcttttccctcagtttataaatattctcaagcctgtctcttatgtttaaatgacaaaagagaacaaaacaaaacactctccctacttctttctcctctggctactcggttatctcgtttcttcctttcactgctaaattgttggaaggaacctcccattccctctcagcccactgcagtctggcttctgccctttccctaagaaacccaagttactctctgaaatcactgtgactcttctgtggccagagccagtggacactgcagtccttttctctgctctctgcagggttaggtgccatctttcattctccttttggaaaggcatttgcttgagcttccatgccatgccttccttctggacttcctgtactcccttgcctgccccagatccacatctctgtctgtctgaagcttcaattaccacatcaaatgctgagggtcttcctgactgtataccagtgtttggactacctttttaatgtcttcgtttgaatgtttcacaggaacttcatacagttaaactcattgtctctccaccctggcctcagtcctaatcttgtttcttctatattcatcatctttagagccctcaagggcaaaacctgctggccatcctatactttcctgtctttgtccatctctcacatctgtttggtcaccaagtcctaaatactccacctccttgagatcttctttgatttgactctgactcttcatgtcagccaccactggtttagttcaggcccttatcgattcttatttggattattgtaataatttcctaaccaggttccttttttccattcttgtttctggctgtagtgtgcattgctaccagaaagatactgctataccaaaattcttgatcacgttgctcccaggctgaaatgcctttagtagctctcccgtcaccctcaagacttaatttgaagcacagtgtttaaggtcttttgggaattgtctcttgcctcccttttcagccacatcttgtaatttccagtctcaggacagactctccagccagtgggaaccttttgcagttgctgaaatgcctcttctaggcaagatttccctctgcttggaacaccattccaagacccttcccttccatttttcatctatgtagcaaagagctctgtcttttcttttaaatattgcccttattgaagtataatatgcatgtggaaaagtgtacatataaaaaatgtatatcttggtgcatgttcatgaattgaacacaccatgtaaccagcaccctgactgggcctctcttctcataccctgaacaagtgatttcttgtcacacaaacaatctctgcctctagagcccccctccccccttgcccttcaggctctgttgggtctttcgctccctggcagttgtcacactatctgcaaattgtattttccttgccagcctggctctagactgttaagtcttccttgaggacagggtctctcatctccctaccctgcatgtcataatagatatttaataaatgttttctggatgaagttctgagttttggggataaatactccttcctcaccttgtggaggaggaacattgcctgacgtctaaaaatttgcctcactggatcctgaggatttgatcttgcccgtggttaatgatggggtttatttagttgcgtttgggccaatcagcttaaagggctctgtagaaattagctcattaatcctcacagatcaagagtaagcactttgagtgcgtccacctgcctgtgttgtggaggtaggcaggcagaggcctggctctcctgaggtcttaggactgagaggtggcctttctggctggattaaaggacccagagctccctgccacagttctggcatccgtagacattgtagggtggagtggggaagtcccacactgcccttcaaaagctctagagctttcttttcttttgtatatcagtgatctctctctcttgctgttcatgtatttatatataacactcaccttgaagttctgtggagcctcttcctgtgtaggaatcagggctgctggagacgatcagggatgcaggtgaaacacaggagcagaattgcagaacaagtggctttcaaaggttgttaggatggcaggagttctatttttataacttataagggactgacatgataggatggctgtggtacctgctaagaccatagaaccgggtcattctaatagatgttataattcctttacagtgtactttttgggaaagtttttttttcctatttaaataaaattctccatgtaatcatgtgaagtcatacgttttcctctaggatagttgtgtttagattataccaaaacagctcttagttgaagtgattcaagtgtttcttttttccctatctgccatcaattggccaagtttttgatactagacaagaattcaatatattaattaaaaagtcatttcagacttggcttaactgaaaagcagaagagaaaaatcctttagagaatggattggcatactttatttctagagtcgatttagataaatactttggaatccgatgtgagtaaatgatatgtttcacatttcttctcacttgccaaacagttatttgagaataaactctggcttagctttaagaaacttcttggacattgaggattgagattaattgaccttttaaactgattgtgtattttgatatatgggaaaacattttaagatagaaatggtagagacctctacattcatattatccctgactttattttcaaacttcttccaggtaagtggcatttagtataactctcagaagcctagtattgggggtgctcatgtgattcttcccttaggtaaaaaatatacattttattgacatttatgggtttaggtttctaacttttagttaccactggagctatttgtcagaaaaaactagatggaaagtagaggtggatgactttctgccctgtgaatgatagatcttcattcagggagtattttggagccagtgacctgtgacagttgtgagacttctcataatcattctgtggatggttggggtcttagaagaagtaatgattttgttttgaactggttgcatcagtttgaaccagagtttgtactaagggtattccaactgctttatttcctactctgtttagtctggggattgaaaaaggattacattttgggtaggttggtgcctattgacctatcctgtgtagcttagattttaatttgaatcatctggttctctttctttctctcaggcaatgtcactatctctgtttgtttaattatggggtgactcaagaaagcaaaggaagaggagcagcagacggggtttcctggggaaggaatggcaggtcatggctggtttttataagtgagttcctaagtgagaagtggtacaagaatatagagagaattaggaaatttaattttagaagagaccaaaggaaaaaaaatccatcccagctgctttgtcttgtaactgaaaactctctaatggccaaagttgaagaaacttgcctatggtcccaaagtccttagaatcccaggctccaacccttcatgctaaaaactctcaataaattaggtattgatgggacgtatctcaaaataataagagctatctatgacagacccacagccaatatcatactgaatgggcaaaaactggaagcattccctttgaaaactggcacaagacagggatgcactctctcaccactcctattcaacatagtgttggaagttctggccagggcaatcaggcaggagaaggaaataaagggtattcagttaggaaaagaggaagtcaaattgtccctgtttgcagatgacatgactgtgtatctagaaaaccccattgtctcagcccaaaatctccttaagctgataggcaacttcagcaaagtctcaggatacaaaatcaatgtgcaaaaatcacaagcattcttatacaccaataacagacaaacagagagccaaatcatgagtgaactccatccacaattgcttcaaagagaataaaatacctaggaatccagcttacaagggatgtgaaggacctcttcaaggagaactacaaaccactgctcaatgaataaaagaggatacaaagaaatggaagaacattccatgctcatggataggaagaatcaatatcgtgaaaatggccatactgcccaaagtaatttatagattcaatgccatccccatcaagctaccaatgactttcttcacagaattggaaaaaactactttaaagttcatatggaaccaaaaagcccgcattgccaagtcaatcctaagacaaaagaacaaagctggaggcatcacactacctgacttcaaactatcctacaaggctacagtaaccaaaacagcatggtactggtaccaaaacagagatatagaccaatggaacagaacagagccctcagaaataatgccgcatatctacaaccatctgatctttgacaaacctgacaaaaacaagcaatggggaaatgattccctatttaataaatggtactgggaaaactggctagccatatgtagaaagctgaaactggatcccttccttacgccttatacgattaattcaagatggattaaagacttacatgttagacctaaaaccataaaaaccctagaagaaaacctaggcaataccattcaggacataggcatgggcaaggacttcatgtctaaaacaccaaaagcaatggcaacaaaagccaaaattgacaaatgggatgtaattaaactaaacagcttctgcacagcaaaagaaaccaccatcagagtgaacaggcaacctacagaatgggagaaaatttttgcaatctactcatctgacaaagggctaatatccagaatctacaatgaactccaacaaatttacaagaaaaaaacaaccccatcaaaaagtgggcgaaggatatgaacagacacttctcaaaagaagacatttatgcagccaaaagacacatgaaaaaatgctcatcatcgctggctatcagagaaatgcaaatgaaaaccacaatgagataccatctcacaccagttagaatggtgatcattaaaaagtcaggaaacaacaggtgctggagaggatgtggagaaataggaacacttttacactgttggtgggactgtaaactagttcaaccattgtggaagtcagtgtggcgattcctcagggatctagaactagaaataccatttgacccagccattccattactgggtatatacccaaaggattataaatcattctgctataaagacacatgcacacgtatgtttattgtggcactattcacagtagcaaagacttggaaccaacccagatgtccaacaatgatagactggattaagaaaatgtggcacatatacaccatggaatactatgcagtcataaaaaaggatgagttcatgtcctttgtagggacatggatgaagctggaaaccatcattctcagcaaactattgcagggacaaaaaatcaaacaccgcatgttctcactcataggtgggaattgaacaatgagaacacatggacacaggaaggggaacatcacactctggggcctgttgtggggtggggggaggggggagggatagcattaggagaaatacctaatacctaatgttaaatgacgagttactgggcgcagcacaccaacatggcacatgtatacatatgtaacctgcacattgtacacatgtaccctaaaacttaaagtataataataattaaaaaaaaaaaaatcccaggctcgtgattctgccctaattcagtattttcttccacttatatcacattgtttccttgttggtggaaaggcagatgttagaaatattattgactcgggccggccgtggtggctcagggacgcctgtagtcccagcacttcaggaggctgagacaggcagatcccaaggtcaggagttcgagaccagccttgccaatatggtgaaaccccgtctctactaaaaatacagaatgattagctgggcatggtggcacatgcctgtaatcccagctactcgggaggctgaagcagaagaattgcctgaacccgagaagcggtggttgcagtgagccaagatcacgccgctgcactccagcctgggtaacagagtgagactctgtttcaaaaaaaaaaaaaaaattattgactcaataaattttaaggtactactaaaattttttttttttttgttagagatggaatcttactatgttgcccaggctagtctgaaactcctggtctcaagtgattctcctgccttggcctcccaaggtactgggactacaggcatgagccactgcatctggcctatgactcaatagagtaaaaatatgtctgaataaataaatagagtaaaaatatgtaggaatcagtaaaaatcttatgtctttaggggcattaaaatgatttttatttacttatatttatttcttcatcagggcatgtttatgtaacatgtaaccaggttatatgtaaatatacaatgtcttcatttcagccatcaccttttgcctggtctattacagtagattatgtttttaatctttggttataatctgtcagtgaggtggaggtgggtgtgtgttgtaaagtaaggtggaggaacaggaagttgagggttgaagaaaagtacgtgaaatagacatacaccatgactgatcattagttggagagaggtggtcccttatgcggggctgatattttataacaatcagagcagcagcagtgttcccagaagaaaggggctagcaccacactgtccagcttggtagccactaaccatatgtggctatttacatttaaattaattaagtaaagttaaagaaatagggtacagtccttcggttacactggccacatttcaagtgctcaataatgaactgtggctacgactgccttacaggctagtgcagatatagactgtttccctcatcacagaaagttacatggggtggtgctggatggtaatttctcggaaatgttcaaagactggctaaatactgttatgatggctgtaagtagtgtgaggccaccttttaataacatgcaaaggtattgccactgacttagtacaaaaaggagacaggcatcacctgatttttaaaaaatgttttgttttcactctgtacctatttgcaagctagtcaattcatctcttcagaagaagagtattcttgtgtgtggtgaaacagatacccctgtcgacttaggaaaatagttttgaaatataagtttttatcttactgacttacctcattttggaaatgttcttgtgatgactaaacacagattctgtccaaatgaaacccaatattttcagaaatatcataatgtgtcatatcttaaaaaagatcattttagagtcttttggttggatatcgtagtcagaatcacttcagtttgtcttatgttatgaagaagggactgattataaggtttaaaaaatgaaattacaaagaagttctgaaattaaccctaattaggaaaaatagtaccaaaattaatttcagtcacttaaacggtgaatttgaatcatagtccctcttttcctttgagttagaaacattttgggatttgagtgagtcaaggattaatagtttatcctaagttacagatcacaaagcaagtaaaacatcatttaagccagttccttaatagaaattctaactcagcaagcactatttgggtaggatacctgctcttttgggagaaggaattaatgactgaggggtgggaaaaaaatctgtgtagggagattaagtgggtttaattttgggcaactcaggaacagtgtgtactttctcacatttagtgtcccttgagtgaccggagctgtaacagagaatgttttactatgtaatccctttaaaatttttccttgtatatgccctttcaagtttctgaagtctgaaacccagtgcctgaccttaaacacaagttgttgtggaaacatttttaatgtggcacctttcctgaggagtcgggtggctgaaataggactagggaaaagtgtttctgtgtagtttcaaaatgtgatcattaggatgaacgtaagaatagtaatatttttggcataagtcaagatcggggctagagtgtttagtaaagtaaatacccatcagttgtttaaaaagtgacgatctctgatctctagggccaagagatgatgagcctctcagttcatctatagccgtttttgtgattgtcttcataaatgctgcaagactttctgaaggctataatttcatgtcctgttctttttttttttgagacagcatctcactctgtcgcccaggctggagtgcaatggcgcgatctcggctcgctgcaacctccgcctcctgggttcaagtgattctcctgcctcagcctcctgagtagctgggattacaggcacctgccactacgtccagctaattttttgtatttttagtagagacgggatttcaccatgttggccaggctggtctgaaactcctgacctcgtgatttgcctgcctcggcttcccaaagtgctgggattacaggagtgagccactgcgcctggccttcatgtcctgttccttaaagcccattggaaatagataatataggcagctttgtaacatatttttgcttaaacagtctttatggaaaaggaggataattgaagttccagtgactaggacaggtaaaagttacagttggatgctcgttttgttcgtctatcatattaaaaaatgaaattatttttagccatatgtagttgtttaaaattaaatatttccttgtcttttggagctacctggaagaaagggagtgacaaaaataggaaagatgatctttatgaggtatgactgaccttcaattaatcatatcagaatttttatgtacagaaagtgttctttccttcagggggatgtgtgggagggtgtccatttttactttatagctacattttatattaaatgaaaacttagatcttttgccgcaagcaggcttatgttgccatcggaagactatgtgaaaaacgtgacagcaagtgtgtgatttgtgactcctgtgtgcgtccctgcactctggtgatgtgatgagtgtaactgtggatcttaccaggggcactgtgtggtctctggaggtcctggagtctctgatgcctattattgtaaggagtgcaccatccaggagaatagagatggctgccaaagattgtcaatttgaggagctctaagacagatctcttctgtgaatgcaaaaaatatggctacaagaagaggtgattggtgggtggccccttcctccccccacatcaagctgctgcagctgccagaaaagatgcctactattaccagcagagagggagcggagcccagagcatcaccaggagtgcctgctagtatactggcactttgccacccctcctctcccttcacccagacacgtggtagggatggaaaaggattcttcacagagcactctggcacactgtatcagagaaaaattgatagattagttagtggtttttcttgaattcgagaagcaaagatctgttctccatattgatatgttctccctcaaccaagatcttctaaaaagaaataatattttagtcttctgcttgaggagttgactgtgaagctacacccagtgaaaaacatgttcttgcagcagctctggtggcagctgtccttgaggaaccttcggtgtgtggtgggaagctatcagaataagaaatgtagccatttaacacttaaccatttaacatcttttaacacttgtgctggtgtcatgttattttcctcctgagaaattggaaatcctttctgttgttattatgttaacaaaggtggtggttattttctggtaaaaaacaacagcagcaaaaaacttagccatttctgtcagtcctcctatgaagaaatgagactaattttctaaagtgacattaatttgcttttaaaatacttccaaaaatgttttaagcagtggtatttgtattggaataagtatgtaaccttacaaaatgactctttagcatgacagtgctgttagttgtttaccatcagttttgtttactattatttgtagtaaattctggatcactatttcatagaagtgataagactaggacttggttggagattacagtgagctgttggcatagaggtagggattgcaaaagtaaaagctgatggtagctgagaggagtctggtagggtggtgggtgggattctgtagtcaggtctgtgaagccagggagaaaatggacgggctcattccgaagcaaagactactacacagcagcaagagacctcaaacctgagcaggtctgagaaagggggagaataagaacttgggggcatttccaagtttacaatttgcaggacttgacaaggggtcaaggcaagggacttgatagggagagtgtaatttttccaaggatgattcagcagcagcctcttgttgaggtaggtgcctcttttgaagttttgccagcgagggtgcctctgacagactgaaaggctcggttctctcatcatggattctgacattccctgtatcagctatctatagctgtgtaacaaagcatcccaaaacttagtggcttaaggtaaggaccattgtacttgcttataatacaagttagcaatttgggtttggctgggctgggcatttcttcagtttggggtcagacccatggtcagcttggctggggctcttttaagatggtctcgctcgcgtgttgggtggttggtggtggctgttggctggccctcactttccactgatttctcatcctggaagaaacttgcctgtactttgtttcttggctgcagcagtgttctaagatagtgggagtggaagctgcaaagactcttgaggcctagtcttggaaagtcacacaatgccactctgccacattccttgggttaaagcatatcacaaggccagcccaaattcaaagggaaaggagatagatttttctactttttgggaggagtggtaaaatcccatggcagagggatatatatacaaggatggaaggaattcttattgccattttgcaaattccttgccacagcagctcaatttagcacaaggaagatgaatatacaatatttgtcattcatctaacttttgtttttcacacgtattaggggaaactattacccaactacccttgtgtacactctcgttgttatagtgccattgattataggtttcatagactaatttgctgtatgaactaagcatcagagtgatttttgctgtagaagtggcttcaggagtatatcgcttgctaaacaatctaaagatgttgattccaatgtgatatttgaaggggagggagggtgtgtgtgtgtaatgctgatccttttttagccttgaggtgttttattccagactgactttcttaaaactcaacaccacattaaaaacatagattgtttgcatgcatatgtatttgtttctcctgccacctacaagtcatgagctagatttgtcacagcccgaaaaataacacgttatctgtgcatcactcaatttaaaggtagatttttgcttaattaagaaagtttctttactttgaagtcaatccagcaatattttattccccgtttcacagtttttcaaaaagaattgctagcctattaggatagaaatattagaagctttgtaatagttactgacagaattacagagtttgcctctcttcattttttttagttcttgttttagttttttttgttttgtttagaaataatagaaggaagggagatgtactgttataccttttaatttttttttttttttgagtcagagtcttgctctgtcacccaggctggaatgcaatggtgcaatgtcagcttactgcaacctccgcctcctgggttcaagcagttctcctgcctcagcctctggagtagctgggattataaggcacctgccactacacctggctaatttttgtatttttagtagagatgggtttcaccatattggccaggctgatatcttggccaggctggtctcaaactcctgaccttgtgatccacccgccttgacctcccaaagtgttgatattacaggtgtgagccaccacgcctggcctattttaccttttattaagttgtaaagtctggtaaaagcccttatcataaaatattatatgcttttagatgtgggaagagggctaaatgttatctttataaagttagagatttaaaggctaagtgacctgtttattacattggaagacaggtctggacgtgggattagaattgtggagtgtccttcctgtggctggcctgagttcctttctcatgtaaggaaaaagcactgagaaaaagatgttatctggatctctgaggttattaaaaattccaagcttatttaattaatttatttatttgagatggagtttcactcttgtccaggctggagtgcaatggcgcaatctcggctcactgcaacctctgcctcctggttcaagtgattctcctgcctcagcctcccaagcagctgagattacaggcatgtaccaccacactaggctaattttgtatttttaatagagatggggtttcaccatgttggtcaggctggtctcaaacccctgacctcaggtgatctacctgcctcagcctcccaaagtgctgggattacaggtgtgagccgctgatcctggccctattttatacttctcaaatattatacaaacaataatataaggtcattgtagaaaatttatacaacactgatgagtgaaaaggaggaaaagtaacctcatcacccaaggctagacactgtttgaattttgatgtaggagtatatatttacatggcatagaactttaaaaaaaaaagtgtaaattgatatttttagaaatgtctaccttttttgtattcccagtactttcacatttaatttgttacggcaagtaaaataaactagtcttagattaatacttgcttggcaaaagtgattttatttcttgagattttggcatacactgacaagcatgccttatgattactgcaaagtgtgttaagtgtattttttctcatacttaaatgttttcagaatcacggaatacatctaatacaatctactcttaatgtctgtgttacgacttagatttcttaggagtatctattatactttgccttttgtcttctagatactattggatcaccttattctgatatttggcacttcgttgattggtagaaaaatcgttttggccaggcgcggtggctcacgcctgtaatcccagcactttgggaggctgaggagggcggatcattaggtcaggagatcaagaccatcctggctaacacggtgaaaccccatctctactaaaaatacaaaaaattagccgagagtggtggtgggtgcctgtagtctcagctactcgggaggctgaggcaggagaatggcgtgaacctgggaggtggagcttgcagtgagctgagattgtgccactgcactgtgagactccgtctcaaaaaaataaataaataaaaaagaaaaattgttttacaaaaagttctggcacagagagaagttaagagtcagtaactttcttactgtttgtggatgtgtttgaacagagtagtgacttttggatttcatagtgacttcgtatgaaacctagagctggcagcatgaggattttctagatgaattaaatatgtggtatctttttgtagaactagctgtgtgatttcatgcggatgtgggagaaatgaataggaatttaatttgatgatatgaatgttgaattttgtggtccgctaaattttaaggattttatagtatttagaacaaaaggacaaaatagcttttggcatgactagtctttattttaaatgttttttaagttacaaatgtataatatttatgaatcaagtagatgaaaataactcccaactttcattgcccagagatggcctgtatggccagtttggtgtgtatccttgcagatgtttttctatgtatacatctacataaagatttttccaaaatgtaataattttacatgtaatgtggaaactatacgtattgttctgcaatctgtaaattttacttcttcaaagtaatatatatatattacttgggtattttacttctgtatattttctgtaaatatttttagtaaagtatacacattataaatattcacagctgtcattccaggctatttctcagagatccacctcctttaaaaatgtgtattctggatccattgctattctatgagtgcagctgaatttacttaactaattcctttattgatgaacttattgattgtttccaagtttttattatttctgtgggatagatatccagaatttcagatggccagggccagtggtattgcatttatacttttgatagatactgtgacaatttcttccagttgtactaattaaatgctagcttatttgctcccattactgaccttaaaggtaagagggagttatagtgagaaggcatcttgccttattcccgatttgacccagacctaaaatatctaaggtcaggagaaaatggtgggtggggtgaggtggggtgggatggttgggtaattgtggattggaaaagaaaaaattattgcctcagtttagggaatgaaagttgcatcacttatggtctaaaaaatgaagtgtgatgaagtttatttgtatgagcaaatttatggaaagatttttttgagttggtgagcagtctggattatagaatataacaaaattggttaatctgccctttaggttgtaaggaacagggactcactaaaattacccaaataatggggcattctttataaaggtagatgtgggaatagggggacaggaatctcatccataatcctgggttttctagcatcctggaaaagttgagggtctcggtcttgggaattgcagtgaaatgtctgcatatggactgggaagtggataagacctcagcagcaggaaactttggatcctcactattctggatcctctaaccttagtgtaaccggccaatcagcatgtgtttgctttgctcatgcccacctgcttctctggctgtttttacctggctttcttacctactatctgtgcatgtcttctctgtcatgttgtttctacttagtcagaattttggctcactcatagctccttatggcccatccagcttctctcttctttccctgttagccgcaactatggctgctaattgctggattctgtctgtatttcccaatcttaatcccaaagattgagaatctagtttttagtgagtcccttcatagaacacctgactgccctaaactcagacaccctccttggagaagggtgtagcatcggaagttcctgcctgggaaggaatcacaagtgtggcaggcaccactagtgagtgttttatgtaatactgctcttaggtaagtaactggtcacgagacagagacgacatgtcaccctaatcagcaaaatgtaatcctgatctaatgtactttctttgttaaaatatatacttacaatgtgtttaaagagcagtttattgttttgagtcaataaataactttcttccctaggaagaacctcccttttcccttatggattgtaaattgggaaatcttatgcccagtttcagttataaattgtcttaaattctgaaataatgatacccgaatcctgagatatggtctggtcttgccttttctgctggatttaaagtactatgaagtagttcatcctgtttatgtaatggtgataaaattctgaaaaatatacctggaacctgatactctttgaggaactaactttcctatgtcaatagttttatcagcagtatcttctccatggatattgagaagagaatctgatcctcccaaattttatgatgtatttgatagttttatcagcagtatcttctccatggatattgagaagagaatctgatcctcccaaattttatgatgtatttggtggtccagtgtttcagagatgcaagtttgttaatatcccctggaagatttctcaaggttgctttgttttcctcttcagggtcactattaagtatccctttttgccctgttctcttcctcctgaaccccattctgcttcactttcaaaacgatggctagagggttggatatgtcagtgatcatgaactgctgagtcctaaactttggtgtctgtgtccctcagaacctcaaagggcagtttccctgtgactttttaaaatgagaaccatgttcatgaagtgctgtcttagtttcagatcacttgaaatgtaatctgatttgagagacagtgtttaagctcctgtttaccaaaaggctgttttgattatcattttgcaggaattgttgctgggtaaaagacaaatgaacaacgtactcagaagagatgaccaaatggtctgatttcatgttggaaagtttcttctggtggtcttgaatctgcgttttaatctccttaaaaatgcctttttagcacataagcaaaattaaacattattgttttattaaaaactatgcagtgctccttattagttaggagaaaaatctcttaaatcctttttgttaaggacatgtgtaatttaaggctttcattttgacagcctggtttcagctgacaggtatgttaatctctatttgattgctttggtgaggagttgaaaatcacctaatgcctggcttagtgtgcatttgtaaatgcgctttcttttggttttcatttcatgcaataatgaaatgaattttcctactgttattttgttatagattgatggtttatctgattaccagatttaaataaacagttgaaccatattccctttgactgtgtccccttgtttatccttttttatttgaatgctgatgggtctttataagcattattatcagcattattatcagtacatatgtatgtatagagcctcttcatcagttatcttgtagcataacagtgctctaagaaagcgatttttttttgttgtttgtttttttagtttaagaatttcctattcttttctattttggtttaattttcattactcttttctttctccccttataagtgccaaagtttatgtgaatatgattatatatagaacatatgactatatataatctttttttctttatgtttacagaggcaaaagatatatttgtgtgtttatgtgtgtaaagtaatacatgacaaaagaaaaattatgtgtaatagaagtaatttgactctggggagaattttactttacgttttgaggtagagcaacctttagaaaaaatattcaaagtcaaaattctgggagggattttttcctccataccaggaggacttttaaaagcaattcaagtcgaccagataattctgatacaaacatttatggagcacctgccgtgtgccaaggactggaccaattactcagcatacttgatgcctgatccgttcctcattcctgcgagggttggtgtgattatctcagttttacaaatcaggaggcagagacttggatgatcacagtcagttgaaggtcacgcagctggatctgaacctagtcttggctgtttgcaaagctgtcacccttgctatggtcctctttgcctccttcacttttgctgtctgacctagctttatgattctcaaacttcaggataagaagtgaattttcttttctttttttttttttttttttgagacggagtctcactctgtcacccagactggagtgcagtggcgcaatctcggctcaccacaacttctgcctcctggttcaagcaattctcctgcctcgccctcccgattagctgggattacagtcacgtgccaccacacccggctaattttttagtatttttagtaaagacggggtttcaccatgttggccaggctggtcttgaactcctgacctcaagtgatctgcctacctcagcctcccaaagtgctgagattataggcatgagccactgcgcctggccaagaagtgaatttctagaagaaaggtccctatttttaaagtagcatcacttggcaattggaggaaactccaggcagaccctggttcagagcccagtggcatcatttgctagctttatgactgagagccagttacttggctcagtgtgttttgtggtgtttcagcaccaaatctggaccatcatattggccttgcagagttgttttaaggattaaagatcatgaatgtgcaatacatagtaaatgacaatgatgattatgataatagcagttagcactgaggagttgttattacttgtcagctcctgggctaaatgcatttcatatttagctcatttagtccatacaacaacccaatggacaggtattattgtctctgttttacatggaaagaactcaatgtgtgaagtctcttgttatttatattttccacatcagtgtacccctccattggtatggctaattgagaattcactgactagagaattcaccgtcatgcaataaacattagttaagcacctcctatagggtaattaagatagataaaagttctcttttcaaaccttatattttagtgattactttttacctatttatcctctaactggttttatttgtggtgttaaaaagggattaatcttatggtagcttaagcacttaaacatttcacatacagggaaatcatgaatggaaatgcttactttccaaaccactttttatgtgtcttcaaaataattaatgctactacattggtaaaaaggctcagaagatatgaggagatgaggaatcttctaaaaataccctcttactactcctctcgttctttcttccatcacgcaaagtacctaaaaatgcaattgataaaataagttgcataaagcagcaatcctcatggcctgtcatctctccagagcaatgatggggacattgggaggtttagaaaagttattagcattaatgctaaagtgctgacagctgaaaagagcacagaggaattctggcagtggactcacagttcattatagcagggagagagattcctacaccaagtgaaaacactgtagggtttcgctcatgtgctccccaccattgaaaccagactggaatattcagccaaaacagcagactgttagatatttaaaagaaggaaaaaagatgcaaatacactactctataaacatgcctgtcatctcctggctggtagttcaaggtgccatgtgggttaggaaagttcttccttccatgttagagaaagtggaaccatacttattaaatcgtgaaacagggtgggaagagtggagagtctattctttagaaagacctgagcaactgtgagctggctgaaggtcagaatttaaatctccctgctttttcttgatcagacgatgggttaattatcctccatctctttattcggtctttgttgcgccccggtgagtgccagcgttgctacatcttggtgatccaaagaagaagtgccctttacggtctgaccttgaggaacttggaaagtctgcaggagagaaacaaacagggaaatgattataccctttgaggtaattctctggtggaggtgtggtaactaatcgttccatctccaaagtcctcctgtctttcatcagtagcatgttatatagttgtactgttgatcctaaaggaagggatttcaattccaacttggaaattccagccatctattctgtcttgcggactagttgtcttgttccaagatagactagtagtgagagacaggactaatgttttcatacaactttgccattttgttcataaaaagtttttgaagtttagtgctgcctatacaaacatggttaaatgctaacactaactgaatatacatgtaagtgtgtgtgtatttgttttttgacacgcatgtattaacataatgttctagcttgtatgtaaactctggactctgagacaatcaatgtttaaactttcaacaaggaagagaaataacgaaaagaaacaatggtttttttgttgtacccagcaactaaatttaccattgttctaagaactcgacaaatgaccacaggatgtgaacttaatcgagttgtgcctttgaacaaaggtatcctagtgatagtggaattttttacttcctatcatcctgctcatgtgttcacttgcctgcctcttctgaaatcaccagcagttcagtatgacttaaccaagtaaatgaattactgcaatgcaaaagaaaccaacccaggaaacaagaggaatcaccattatttctgactctgtctcctagatcagcattcgaagccaaagatttccaccttttactggaaaaatactaaatgaagtgactcacttttaaaaaaatgacccctgcaatgcagcctagatttaattgaaggtggtatttaactgaaagtgagggcagtgtgtataatcttaatctcctcagtcggacacatgttcaattgtattatctttgagaaaaagtttttattgcatccagaagaaactaagcaagcatttaatggagaactgttaggaaccaaaatttccctagaaatattgcctttgattttatggaatatttttcttgatgcaattgaaatgacttgcctttgattttgacatctcttttggcgttgactatacatgtcatctctttgggagaggagagctgtatccatgttagtcatctctttcacctatcagtgctctattaatcgctgctctgccaagtactttttacatgcacatctcatttaagattgatatcaagccaatgaagaaaatgaagccaaagatttaaaatatttgctagggtcaaattgagtttctcactctccagagtctgtaaatcccctcttaaccattatgctgtgctgcttagagtggttttctctttgccccaggagaactctcactagataaaccaacagcatattcagtacatgtgtgttgcttctcagcagagaagttctcagctttgttgggcatttgttgctgttgcgaattgagttgtttagtttcctttcattattggcacatgcttgtgatcccagcacttcggaggctgaggcaggaggattgcttgaggtcagcagtttaagaccagcctaggcaacatagtgagacctttatctctatttataaatgtatatattattcacattaaaatttgttaaagaacaactttgattatcatcattattcaaatactcaagcaaaggaaggctctccatctctttccttggacagtacctcatagcataccattatgtttcaaggtgcattctatagtaagatgagcagataatgcttggatgataaagtttaaagtaaacttgtaaatcaaaatttgcaaaaaaaaaaaaaaaagcaagaaaagtaggttaaaggaacttgacgtctcctttttaatatcaaggtaacttgtcagggcctggaaggcatctatcaagttgtgaacactgtctcgtctttttaaatggtgattctaataaatggcttttttagtttctaaacctggaccattagacaacactgagattggtaggagagcaattgtgagaccagagttttgttgcattgagaggagtgcttgcttgccccagaccacttggagaaaaagtcaggaatgggttagatatgttttctttttctttagctaagggcatctgtctgactggcattgggtttggacagtagagggatagaggagacctacacacaactctctatgatttagtaggaggcaaggaagtaaaagaagtcacagaaaagcctccttctccctgaggaagtggacagagatagagacctcttccgtccagggtaggaagtccccatagtgcctgacttatctgtattctgctaggcttttgagcaataaattgagagttaagtgtatgtggaaagtatctgaacacaccgaaaatatctgaagattttttttttttttgaaacaagagtctcactctgtcacccaggctggagtgcagtggctcaatcttggctcactgcaacctccacctcctgagttcaagcgattctcctgcctcagcctcccgagtagctgggattacaggcatgagccaccgcgcctgaccctctgcctactttttagagtgctatcatctcactttttcttccttaatatacaaattatgtgaatctttcaaggttccacctaaatgcccaccccaaattcttgattcatatgattcttagggaaaatgacctgtagctgtgtaatgtagcagcttgggcataattatagcttatttcgtctggtagctttttaagttcctgaagaataaaaagcatgcctgtcctgagttttatgtagtaagatttaacacggttcgtaccactagttgggagctggttgttatttgttgaatggatgcatgaacttctgtcaatcttttgattctcctaatagctttctctgtgtttaattgaggctttccccacgtctttttcagagtctagagcttttggaatctgcttttatttcttaacacttgatttttttgggggtggaggaggagtgtattctgtgttcttctgtttgttctctatggctggaattacttttggaaagatgtgacactgtttcgattttgtctctgagcctttttactcagacaaaatcacaggagtttctctcaggacagtcatgttctttaggtgacttggcccttgctctagcaagcctaccttggttgagcgtttggctaggagaagtgggagagcagttgacgcaaataccgctgtcctatgacctgaccctggtatgcatggtgctgtgccctacggtcactatttttgatgataggactttgtccagtcagcttagcggaaaagatcatacatgttgaacactgcgaaagtgaactttcccaagatattcttttggggaattttctgagcttttgtggttctttacaagttacttgtctaatttgtacattcacctctgctgtcccatgggccttggcaagtgacagctgcagtgccgatgtttcagagtagagaagctttgttagagtgtggggttatctgggaactctcttccaatttatgtggtctagttctgtttaaattctttctccattacaattccctttagcaaaagttatgccagtaatttccatttattgcctccttaatgatgacatggtgttaaaagatgtttatatgatcctacatatcttagtactttcaaaataaagagacttttagtgatttactgctaggaggctatttctgtctaaatcatgataacatggacgtgatcttagaattagtagttatgcttttttcttcctcccctccataggagactatgtttctagggctggctttgactattaaatatgtctacagtcagtcctccatgtccatggcttctgcatttgtggattcagttaaatgtagattgaaaatacttggaaaaaaatggatgattgcatctgtactgaacatgtacagactttttttcttgccattatttcctaaatgttatagtataacatctgtttacatagcatttactttgtcttaggtattactctagacatgattaaagtatacaggaagatatgcataggttatatgcaaatactacatcattttatacagggttcttgagcatccatgaattttggtaccaatcccccacgaatactgaggggcaactgtatatcttttttcttttgtgggaagtggggccaaggatcggataatctgtgatcctcacataaaaatattctgaaatgtcagtttatatgattctttgatttttccagatctatatttctgtggtataggaaggtaataaaggttacgataaagaaacagagtattccccgtcctgcatccggatactggcctttttctgattgatagaaattggggttttctaattcatgctgaatctgaatctcctcctccaataatgaaggtccataggaaattctaccaggtggatctgtaatggaacatgttccctgtgtgacttaaggaattcagactcattactttctaggcacccttggtggaatgttcttcaataacatgggagagtgggatgcttttgaagacacaggtagagctgcagagaaacacgtaatcactgattttcgtgttgtgagtttattcacatcataggataatggcttgtggaaatacaaccctggcaggtctgagcagtcttcttttcccaacagagcatgtctgcttctgctgagaacctaggactagagctcaccatattccaaccagcgcccctctgggctcctgggctggcttttaaaaaagccttgttcctagcgggttggttgggtaaagcttcctggtatgggaaaggggcaggtatgcaggtagtcaccaagctggggagtgcctggcacagagccggtgaccaagacctctcaggagatgaaagtccgctgctgttcatgagatcatccatgcctaagaggtgtggcggtggcattagccttggctttagaaagttgaaagcacacgaataatgtcttcttttgaaggtggcttataacaacgtttctttgcctaaaaactcgtatttctgtcaggtttgctcaagctgaggatggcgatttgccacttcattagatgactcacgtcactgaaaaaagacatttagccccttctcctggactgtccaaacctaggaatttcctgcaggaatgccaaggagatcttcaaacagccaaacacaacttttgccttggtgtgcaggcgtgcttctgtttctgtcaaaataaattaggctgctaagtcgtaaattaggaaaatattttgctacttgtgtttcttatttagcaagtagaataaatagctggcctcaaaacaaaacaaaaacccaaaccaacctcaagtcgattgacagaagatgattctgcctttgccaagagtgaggacgtaccttctctgggagacaggaagccttcatctgtctccctctgatttgactcagtccttaccttccatgtacctctggtcaggtcaccttgcccatttctcccattgcccttcatattgggttggggtttgcaggcctaaggaggaagcacgggaggcctatccatatctgaactctgtttcctgtctctcttccaccaatgtgaggtttctcctcacattgcttttacccaatacatgaaagatttcctttgtcaagcttattggaatgccctgtgggagggatgctatgcaaaaacataaatgtattgcataactgcccagtccttagagatgctagagcatccttggcaccttcacagaccccactctctggtcagtccctagagagcagggtgaggtgcacttgagaggtggctttgtcctctaccccagtaccatggtccatggtgatgacctttatcccagctctgataaaaggctattttaggttttctaaaatacagttcctcacctagcccagaaaggaatatttccattttttccccctttcctcttgtctgattatttccagctgctgttcctttacacgtcagatttgtttctcctgtgtcaccttgaggcaactgacattcgtgactaattattagaaagggcagccttttagtttattttgatgaaaaagtctcagagaactctgttagatacactgtatttgagcaggtgacatgttgatgtttgggatttgggaaacagatccagcaaaagtagagtttttagcatggtagctggaggagtcagaaggtccaaggagagcttcatgaacttatttattgctaacgccctgtgtattctctgaactaattccaggcttttaaacttaataccaaacagccaggccaggtggtcacggggcttacggaagggtcatcttggagcaaagaaccacacaatgaactcttatccagctaacgttttttttctcccctgtaaaatcaaattaaatcaacctcagtttggaggatgtggaaatggggggagagtatgattggagtcctggccatttggtaatgccagtggtttgtgggagcagtctggctatgaaggatgcataaaaaacaactctacaatttaaacttatttcagaaaagggctttttgtttggcacacactgttgcaagccatttttgatccttcattgtgaaaccttcattcgttggcatattatataaggtcagcgcaaatacggtgttgaaaacacatggatcatggtacatccctagagctgtaaaagagactgataaaagatggtatgtactaacatgaagagagctccaagagatatactactgggtaaaaacagcaaatgacaaaatgaagaatagagttgctaccaaaaaggggcagcaaaccaatacactcttttggatttccagtgtagag

SEQ ID NO: 265 - DNA, 18040 bp, Homo sapiens
  source 1..18040: mol_type = other DNA
cggcccggcgacgggggagttcccgcgagtggcctcgcgcccagaccgtgcggggggctgttcgggtggaggcgggggagccgccgggacaccaaaataggagctgcttgtggggtggagcggcactagctggcggcttccgagcgcctcttccaaagatggtcagaggggccggaggcgtccccgctcccgctcgctactagcccgcgggccagcgccgcgtcccgagccccggcgggaggtaggtgcggtgtggacccgcagcccgaggccggcctgctgggagcgagcggggccgggcgcggggagcggggccgggcgcgggcagcggggccgggcgcgggcagcgaggccgcgcgggagaggagcgcagacaatggccgcgcgggcgccgggccgggccgaacgcgttgcgctggggctgcctgcggcgtccttcccacacctgcgcggagcgccgggcagagggacgcgggcaccgggcccgcgggcggcacgcggcgccctcgagtccagccccgctcctggccccggggcggggcggtctccgggcgggaacgtgggccggggcccaggcgcggggcgcgcggaaacccctgcggcgggcgcgggggagggggcgagggctgcaagggctgcgccgagctgccttcctttctctccttccttaagcgaaagggctcgggatttcccttttccgagacctcttcttgtccatttatatttccatcatccctttcttggcatttcgatgtgatttgaaagggagacgagcttggggaaaaggttgaattggggccgagccgagacagctgaggtccggcctcgagtggggtgaccctcggacacttgccttgcctagtgtgggatctcatctccgaacgccaggccagggtagattgcggtgaatggaatagcaaatcagtactctcaaaaggactactgaaaaatccaggagcctcatttcaagctccgagctaccctgaatttaaattgaccaccatataaatgatcaaacagtccatccacattttgcatttattatttagatgctgaacttagtccagttttggagtatatccgatgatagtcaagttatttagcgttgattatttgagagaatgtgcaacattgaaaacacatttgttatttcatatttattgcagccatggctctaaaaggacaagaagattatatttatcttttcaaggattcaacacatccagtggattttctggatgcattcagaacattttacttggatggattatttactgatattactcttcagtgtccttcaggcataattttccattgtcaccgagccgttttagctgcttgcagcaattattttaaggcaatgttcacagctgacatgaaagaaaaatttaaaaataaaataaaactctctggcatccaccatgatattctggaaggccttgtaaattatgcatacacttcccaaattgaaataactaaaagaaatgttcaaagcctgcttgaggcagcggatctgctacagttcctttcagtaaagaaggcttgtgagcggtttttggtaaggcacttggatattgataattgtattggaatgcactcctttgcagaatttcatgtgtgtccagaactagagaaggaatctcgaagaattctatgttcaaagtttaaggaagtgtggcaacaagaagaatttctggaaatcagccttgaaaagtttctctttatcttgtccagaaagaatctcagtgtttggaaagaagaagctatcatagagccagttattaagtggactgctcatgatgtagaaaatcgaattgaatgcctctataatctactgagctatatcaacattgatatagatccagtgtacttaaaaacagccttaggccttcaaagaagctgcctgctcaccgaaaataagatccgctccctaatatacaatgccttgaatcccatgcataaagagatttcccagaggtccacagccacaatgtatataattggaggctattactggcatcctttatcagaggttcacatatgggatcctttgacaaatgtttggattcagggagcagaaataccagattataccagggagagctatggtgttacatgtttaggacccaacatttatgtaactgggggctacaggacggataacatagaagctcttgacacagtgtggatctataacagtgaaagtgatgaatggacagaaggtttgccaatgctcaatgccaggtattaccactgtgcagtcaccttgggtggctgtgtctatgctttaggtggttacagaaaaggggctccagcagaagaggctgagttctatgatcctttaaaagagaaatggattcctattgcaaacatgattaaaggtaagtggagattatgtttattttgtattttttagatgtctggagctaggccagcagtctcacttctcttgaatttatcactttgggatgctatctaggaactatagttaattatacaaataatgctacacagaatgttccagataaaaacagtatagcatagttcccaacttgtctgagagttatgagaatttatattcaagtcaagggctagatgaagagacaaatctggacagtttttcattttttcatgttcttaaaattgaaccctttaaaattctgctattcaactttttcctctcaaaatacgctgatcagctctcaagaggtccttcattaaaaccttggaaggtttggtccctacaggatgtaacaaagtacattcttccaggaactagagacaacgtctgcttttgcaattcagtcctctctgagaggggcagacaccatactctccctcatgtggcccacagaacccggcacacccctgggtctcggtatctgtctgataaacactattttctgctgtgtttggcgatttgtttgccttgctctccttctctcccactggaaaaaaagttaaacgggaatcttatttcattgtatttattcattggtgctgaggagttgtacaaaaacaactggtaggtcgttaccaaatttgtatcattttgtcccaaatgtttcttcccaggcttttctgtttcttttttaatgctagtgagagtgtgggaatttgacctggtctggaaatctgacctggtatgatccttggatgacaggcaggaagctgagaggcagaacagtcttgggatcaggcacgctgcctctgaagctaaactgcctgcatccagatccctgctttcctcttacttgctgatgagctctggcaaattgtttaatcaccctgtgcccccgttttgtcatctgtataatggggatgacaatattacctagtctcggatcattgagaggattaaattaatctatgcttgtgaagtgcctagaacagtgtctgacacagagtaagcatgctataaatgttacgcatgattgtcctgaatgtcggtattgaaggacatgtcagctcttatagagcagaaattgatttcatgtgaagttgtgaccactgtcacaccagggtgggagaaggtagcagaaagcccggtgctgttgctcccctggtttttgtctttgcctgagtctcaccactacttgccgattccaggagggctctgaatgtcctgacccctcttctgcaaaagaaataagaaaagtccatatatttaaggagctattgtaaactagcatacatttctgattctgttttttaaggatgatataacagtttcaatggttttgtggttcagagtatatttctttttctttttctttttttttttttgagatggagtctcactctgtctcccaggctggaatgcagtggcgtgatcttggctcactgcaacctctgcctcccgggttcaagcagttctcctgcctcagcctcctgagtagctgggattacaggcatgtgccaccacacctaggtaatttttgtatttttagtagagacggggtttcaccatgttggccaggctggtcttgaactcctgacctcaagtgatccccccaccttggcctcccaaagtgctgggattacaagggtgggttcagagtatatttctttgagaatgaaagcttattactttactgaaattttaaaaatttatatttagaacagtgcttgttgaaaaaagatatgctgcgatggtgtatctactgtgaaacaaaagccatatgcatgcttgcgttaaccttgagtggagtaggagaccctcatacctcaaagtcctccctcacctgctaactgggtctgaaattccagttttatactttgaactcaaagctttgattcttgtttatatctagtcatcccagggagaggtaacactgccagttatgtgcagttttgactactgcttgttttggtgggtggactcatacagaactttttttaaacaatttttaaaattttatttttaatttttaaaactagaaatggcggggggtctcactatgttgcccaggctggtcttgaacccctggcctcaaatgattctcctaccttggcctcccaaagtgcggggattataggtgtgaaccaccacacccagccatactgaacttttagattcccattttttggtagaaaggataacatttttttcaattcgttttattttgtagccttgaagtgaaatagcagctttctctggtaataaacttaatttgggtacagtcaaatttaaaatttattacctttttttggtcctggacccaaattaagttcactaatgtacagagaataaataaatacttggctgtttaggaactcctgaatctttatttttttccatcataactgctctacttataaatccacttttattttggaatagaaaggaacaagaagattgaactgtatcatgcaaaatggtgctaggtaaaagttagtggaaagacaaaaccaacgttttcaactaaaatgatcctcatcatctttcttcctttcttcatcttccctccaaacctatttcctccccctcctccccctccccttcctcaccctcccctctcttcccccttcccctccctctcctccctatctccctttcatgtttcgcctatcttcctctttcttcctcctccttccctctcctccccctcctccctctcctcccccttcccctccccctccccctcctccccttcccctcccccatctcctctccctccttctgccttcttcttcctcctcctccttcccctccctctccttcccctcctcgacttcccccacccctccttgttttggcatcagtgattccagtttttccagctcaggacctcaaaatcggtttggtttgcctctgcgtcagtcagtcatcaagacctgtgtgttttacctgtctctttcctctatgctcttccctccatacccaaagccccttcaaaatcaggccctcgagaccgcccaccctggccagtaactagatctttctggtacctgttcttcctttgttagttgctctattcctctgtttaaaaacctttaaaatctggctgaattaaatccagattctttgttgggcatcagtaagtatcctttgctacatggcttcaacttaccatgccagccttaaagtcccatgcaacaaccctcaatgtgccacctgccctggtcaaactgggctacttaacattgtccagtaagcctttgcactggcttttccctctgtctagaatggcctcctctcatctatacttgccaacttcctaccatcacccaggtcaaattccaccaccacctgctgtgatttccctcgtcaaatgcagtgttttcttgccctgaccatgcccagcagttcatctgtcccttttttcatggtgtttcttccattttatatctagtgttctaattacagccatgtgccacttaacaatggggatatgttctgagaaatgtgtgattaggcaattttgtcatgtgaacgttatacttaaacaacaggctataccatactaattctacagcctaatacacacctaggctgtgtggtatagcctgttactcctaggcttcagacctgtacagcatgttactatactgaatattctaagcagtataacacaatggtaagtctttgtgtatctaaacatagaaacagtacagtaaaaatacagcataaaagataaaaatggtagacctatttggggcacttaccatgaatggagcttgcaggactggaagttgttctggttgagtcggtgagtaagtggggagggattgtgaaggcctaggacattactgtacactactgtagactttttactttttttgagacagggtcttgctctgacacgtacgctggactgcggtgatgtaaacatagctcactgcagccttgacctcctgagatcaagcaatcctcccacctcagcctcccgagtagctgggactacaggcacatgctatcacacgtggctacttttttattttttgtagagatgtggtctcactttgtagtccaagctggtctcaaactcctcctgggctcaagtgatcccctgcctcagcctcctaaacttctggaattacaggcattactgtagactttatatagcttataaaaatactttctttttatccttattctataagctttttttttttttgagacggagtctcgctctgtcacccaggctggagtgcagtggcactgtcttggctcactgcaagctcagtctcctgggttcacgccattctcctgcctcagcctcccgagtagctaggactacaggcgcccaccaccacgtcctgctaattttttgtatttttagtagagacggggtttcaccgtgttagccaggatggtctcaatctcctgacctcgtgatccacccaccttgacctcccaaagtgctgggattacaggcgtgagccactgcgcccggcctctataagcttttttatattatatatatatatatatatatatataacttatttattgatttttttactcgttaaacttttttgttaaaaaagtaagacacagacatacacattagctgaggcctatacagggtcaggatcatcaatgtcagagtcatcaatatcactgtcttccacctccacatcttgtcccacttgcaggctttcaagggcaataacaggcatagagctatcctctcctatgataataatgccttcttctggaatacctcttgaaggacctgccagaggcgtagatttatttacaacagcatcaccagaaacacatgagaatgctttatgccatgtctttaaaacagctaccacagtatcactaggtgataggacattttccactccattataattttatggagatcattgtgcgtggtgcatggctgtgtttgtgtgcacgtctcaccctctcttaagagcacaaagagccttccttttttattcttttgtcccttatagcacttagcacagtaccttgcattttaccatcagtaataacaaaaacaacaataaatttagcccagggttcactgcaaaaaagaacaaaagatcaatctaaagatgtgattttaattaatacgtaggtgtgggaaatgctactgcctgtgtcttacatgatgttatctacgtcattggtggccactgtggctacagaggaagctgcacctatgacaaagttcagagctacaattccgatatcaacgaatggagcctcatcacctccagtccacatccaggtaacaaaaatactgtctcaaatagtgtatgttgtgatgtagtttagtagcataaaggatggctaaaaatggactggaaatagaaaatgctgattttattgtagactacacatgggtagaattaaaagtctcaaaatattcatatatgtccatctaacaataatcacaatgagattctgattgggtcacatctacaaatattttccctgatgtctttatacaatgcacattgtaagtctgtgtggtcaaaaatattagcgtctttaaaatttttttcctttatatgccatctttcatttatgacattaattatataaaatacaatgttcataagtagttgaaaagcaccattctatcaaatagtcagaaagggtacccagtgattgaagttcagctagaaattgtttcctgttttagaagcatgttctttctaggtttcacttactattaagcactcactcctacaatgtgcagagccatatgttggccttaccttaacactcatacagggaacatgctgtctgcccataaggaatggcctaccttcttggatgtcttctgttctttgacttgtgtctttgtgaagagctcagagggaagcacaagttttagtctgtttcagttatgccataggtttaagttgttttcattaggaaagattcatatcatcgtaccaccatgttaccttgaatcattttccatagagcatcaggcttccatgtgggtcagtggagggggtagtggaaattcacaagctggaaccatctgagaggactagtaatacttaccatagatcaggcactggctaagcacttcatatgtgtattacctcagattctcactacaagtctgtgagcaggtattgtttgtcaccattttacatatttggaaatggaggcttagaaacaataagtaacttttccaaggtcacagtttcacagtttgaaagtggtagaccagggttcaaaatctgacagtctgattccataacttgtgctgtagccactaaacaatctgtctctccttcagggagcagactctcctgctttcaaccaaggcagctacttccagcccatacatcatctatcccatatgatggttaatctgaagcacacctaaatctggtgctgcatctccatatgcccaggctttgcatgagaaggaactttagccccaggcttccctggctgcaaagacaccatggaatgggtaaacttctccctcctagtagcccaaatggaccatcccagactccccaccactttctgctgtgatcagtgaagttataatggaaaggaatagtaacaactcacagtgagaaatagctagcatttattcagtcagtgtgtggcaggcacaaactattccagtaattttacatgtataatctgtttaaacctcaaaataattccatgagctaggtactgtttttatcacattttataggacactgagggtcaaagagattatataaattgcccaaggttagccagctagtgcttattagaactgaggttcaaacctagacagactggcttgaacttcactattatctcacctgaacctcatgttacccttagaagttagatgttactctgcctattttgtggataagcttatctttacaaagaaaatccgatacatgaaaagtcagaattcacaaattagagggcagttatttatattataaatttaatgtatatgtcattaagagtttccctcaaaaataagttttccataacagatttcatatagcttattaactacatgaaaaagagtctgagagacagtgtcactttggacttaatccaaagtattaataagtcatggcaaattgaaaatccaaaataaatgttaaattataatataaatcaatggtaacataatatgcatccacatgtagttttgatttacattgaactttttcctgatgaaacataaaaaacagattttaaatcagtaccttgcatgatgtgttctgtttagctttcacagtccttaaaatatttttgaactggcttgttaccaatatttaaaatttaagagaatttcaagtaaaaatcattatttctgtcctttaaaagaaaagggaagacctagcagccttggatgtattccttctaggcagcagtcacgggagccagggggtagctgttcccctaaatgaggcttgtgtgctccgtttcaccacagtccttccaattctcctcacgtcactgacctagggggcctgtgccgttgtttttcttgctcccagctggctttgctcagctagtctgttaaatccttaagctcttgaaggctgtgcatctgcatccactgaattatagcaaggtttgtttcttaaggattttagcagtacctcctgaggaattaaaatgtcatccttgagttgacttcatagagatacattgcttacactgagaagaaatgactactattattttttaaagataatataagtattatattttatcttaacccctttaatggggtagtttgtgtaattggaaaacatgggactatagttgcattgaattcaaggtgacatttattgagaccctacattggaaaaggtaggattctgataattatgtaagatgattaagtgttagtctttactgccgtaggagctcagaatccaggagcaaatatacatacataatggaaatacaggacagtctctgctaagttctgtaaaaacaagtgctattgaaattgagaataaaaagagtgtaagtctaattaagggaaatctgactatcttagaatgcttccaacggtaggtggttatgagctgggccttaaagaatggccccaaataaggaaggtagtttttgaggaagggtttttctggcaagaagtcagcccagtggaggaaggtggaaaggaaagtttcaggtgtattccattacctgggagcagacatgaatgaatggaatgtaagagggtagaatgggagatcggatgggagagttcagttggagagcatgtcatggagagctttgaatggcagtctgggtaattttttttttttttgagatggagtcttgctgtgttgcccaggctggagtgcagtggtgtgatctcggctaaccgcaacatccgcatcccaggttcaaggtattctcctgcctcaacgtcccaagtagctgagattacaggcgctgctactttgcccggctaatttttcatatttttagtagagatggggtttcaccgtgttagccaggctggtctcaaactcctgaccttgtgattcaccttcctcagcctcccaaagtgctgggattacaggcttgagccaccacaaccagctcagtctgggtaatttttaaaatgcagaatcataaaggttttcgagcaagagaatgatgtgtgatcagctctaggtttttgttttttgtttttttttttttaaagacagtctcgctctgttgcttaggctggagtgcagtggcacaatcttgggttcagcgattcttgtgtctcagcctcccaggtagctgggattacaggcatgcaccaccacgcctggctaatttttgtatttttttttagtagagacggggtttcactatgttggccaggctggtcttgaactcctggcctaaagtcatccacccgcctcagcctcccaaagcactgggccactgcacctggcccagctctggttttaagaagagaactcttggctgggcgcggtggctcacgcctgtaatccctgcactttgggaggccaaggtgggcggatcatgaggtcaggagatcgagaccatcctggctaacatggtgaaaccccatctctactaaaaatacaaaaaaattagctgggcatggtggcgggcacctgtagtcctagctactcgggaggctgagccaggagaatggtgtgaacccgggaggcagagcttgcagtgagctgaagatcgtgcccctgcactccagcctgggtgacagagtgagactccgtctcaaaaaaaaaaaaaaaaaaaaaaaaaaggaagagaactccttttaggtagattgggagaaagacagcaaggggatctactaacactattgtgtttaaccaagggagaaatgctgaaagcctgaagaagtggtaggagtagaaaagaggggccgatgtgaggaatgtcatagattcaacagctgattgcttccttggctgacagcatacaggagatgaaggagagaaaggagttgacagtcgtctcagggtctctggccggttgtctgagagaatgaggtatactgaaggagaagctgacaggaagggagaagaggggagatgatgagctcgattttatagtttagagcaaaggaatcattggataacccaaaagagctgtccagcaggcaaagggaaatgtgggtttgcagctgagaaggagggaggtagctgaatgtagagatctggggattgtttgcttggatggtggctctgggtatggggatgaataagatgccttggtagggtgggaccagcaatacagctatgggcagaatcctaggaaacgggcagagttgagggataagctgaggaacaagagggtgtgaagagccgagaggaagcagtatgtgataaaggaggacctgtggagagttgtgtgaagtggggagagaactttcctggccctgccatttatttacctgccttgccatcggcaagtagactaagctcttgggccttaccttccagtgaaatcagaaagttagactacataaactttacaggctcttcaatgagaaaagatcttaggaaaaaaaattgaaatcaattcaaatggatattgtggttttctctgaatccctctagctgtttgttcatatcactcatctaacactgaatacagactgctgtgtgttgatgttttatacttctgtgtaaacttttgagccgtgacagatggtgtcactcccattcttgattattcatttgttcactcattcatgtctaacatatctgctgtgtgcatcctacatgctgctatatactcagtgctaggagcacagtgagcaaggcacagtcccagagcctcagtggcttagaggggttaactaacaagaaaaaacgcaattacagctcaggaagaaaaagttcctatccacaacaatagaacatgtgttgtatttgagtaaaagagaaaaaatgattaggaatcactttacttaaatatttttactgctataggaagacagatggctttcttaacatatgaatcaaaaattggggtgttttgataaacttcaagtaatttaagaaaagcctagtgagtgatgttgaatcacttttaccaactgataaaatatttgaactatcattttcacaataaccattagttgaatgattcatataattgatataagcagtgtttcacaagtacttgaaacaagtaaatcctataaaaattcaacatataaataactggaaagtaaaaaatgagtttttaacaagtaggataattattttcttggatgtcagtaacgagaaaaatatgtggaaatgaagcaaaaatgcaatcttctaagactttccttagctgtcaaaacctagggagggccaggcacggtggctcacgcctgtaatctcagtgcattatttgagtccaggagttcaagactagcacctgggcaacatggcaaaaccccatctctattaaaaatacaaaaattagccaggcatggtggtgcgcacccgtaatctcagctacagtgcacacctgtaatcttggctacttgggtggctgaagcataagaatcacttgaacccgggaagcagaggttgcagtgagccgagattgcgccactgcactccagcctgggagacagagcgagactctgtctctaaaaaaaaaaaaaaaaaaactgagggagaactttactggtaagaagttgtcttccactcctaaagaggaaatcactttttttttttttttttttaagagacagggtctcaccgtgttgcccagactagccttgaagtcctgggctcaagcaatcctccagcctcagcctccccagtagctaggattacaggtgtgcaccaccacattcatctggaaatcgcatttctgattgtattattctttctaaagaggggcttgcttataagctttccttctacgttataatgtgaggacacattgggacacaagcgtacaaagtacaattcattcattattcaacacatatttatcgaattctcacaaggtgccagacagttgccattctccaattaggaataggttagtgagcaggacacagttcctgtgctgccaggagggagagagagacgataagaaacacacctggctcacacctgtaagccctgcactttgagaggctgaggcagaggaggatctcttgaggccaggagttgtagaccagcctgggcaacaaagggagaccccatctctacaaaaatacaaaaattagccagttgtgatgatgtgtacctatagtcccagcttcttgagaggctgagatgggaggattacttgagcccaggaatttgaggctatattgagctatgattgtgccattgcactccaacctgggtgacagagcaagaccctgtctctaggaaagaaaagaaaagaaacattccagataatgagaagtgctatggagagaattaaaataggatgatgtggtagagacgcctgcctggccacttcaggctgggtggtcagggaatgccctttgaagaggtgagagtaagacaagaccggaatgacaggaaggacgcagctgtgcagagacctggggagaggagagacttcaaggcagaaggaacagctcagcgatagtgcgctaaatctttccttgctttaatttgaatgcactgacaaatcctcctcttcctttggggctccagcgaaaggtttttaagtgtaattttatgactgatattcccagagagtgaactgacaggctaggagtgacgataaaagcgggtgtgtggaagaaaacagggcagagaccaggatgaggcaaatgagatgcttcaggcacaaaatgtaaggccatgcagtgcaaatgactcacagagttctgcctccctgcattttgcaccctaagcacttcgctagcctcactcttgtcacagccctgggaagaagggagaagtagagttgtgagatatgctggtgctttgaagatccagcaggtttgggtgtagagggggagataaaatggaaaacattaaaacagcctaggaggaggaccgcccccccccccccccatatacatacttccagccccaggacccggatcccacacagcagccctccgcctgggggcacccttcacagcttctcaggatgatagactgtcatgccccacgagtctgggtacgtttctttagcttcttgagttcataactggactggcagtgtgagaagcacacaaggccaccctgtgtggcacctgtgacagcaggcatgccagattgcctgccattggttaaggagacagctgccaagacctgaagggacaccactgcttatcgagggtatctttctataaggattctactgctaccatcttttacagataggtgtcaagtaaaagttgtctgtgttgggaaattcccagaaaggtgatctgttgggtgagttcctccctggcctcctacagagccagctaaggacaagctgaaggataatggcagcatggcaggaacaggcgatctgaattaggtgacagggaatgattttcagcctcagcgttgcagtattgtgtgcctgaatcaaaataccaccactccctattttttgtgtgctaaattttaaaggattattacattaccacactgtggaatctcttttgtttgttatcctttaaaaaaatgctgttttctttttttctttttaaaagaatatggattgtgctcagttccgtttgaaaataagctctatctagtcggcggacaaactacaatcacagaatgctatgaccctgaacaaaatgaatggagagagatagctcccatgatggaaaggaggatggagtgcggtgccgtcatcatgaatggatgtatttatgtcactggaggatactcctactcaaagggaacgtatcttcagagcattgagaaatatgatccagatcttaataagtgggaaatagtgggtaatcttcccagtgccatgcggtctcatgggtgtgtttgtgtgtataatgtctaattgaatctgcagaaatgaccaagcaatcacttttttggagtatagttttataaaaaaagaatgcagggtttgaagttccttacctgataattgtgtctggcacatgataggggatcagtaaattgtaattcctaaccctactgtactcccaaacatggtgattcatggtcaagaaaaatcttatatatatatatatatacacacacacatatatgtgttcatatatatgtatacatatatatgtgtatatatacgtatgtatacatatatgtgtatatatacgtatgtatgtatacatatgtgtatatatagtatgtatgtatacatgtatgtgtatatatacgtatgtatgtatacatatatgtgtatacatatatatgtgtgtatatatatacacatatatacgtatatatgtgtatatatatacacagttgaatcagtgggattaatacctataatctctggttttcaaaggtaatatagaatatttgacacttggtaaaaggtgaactacctttgtagtgaatcttttcctcttggtagcatcaacactggggataaatcagaaccattctgtggaatgaaatgtttctcaagagcctataatatagtagatagtgcatattaagatgtctggctgggcatggtggctcatgcctgtaatcccagcactttgggaggctgaggcgggaggatcacttgagcctagaagttggagactaacctggcgagaccctgtctcaaaaaaaaaaaaaaatcaatttagctagcaggaatttgacatttaaagagggaatcttctctacctctacaaaatcaacccttaacacttttttcaccttcagaattatttagaatgtggatttactttgtctagttttttcctttatagtgtaatttattgttactctctatttactgactaccagagatatacaaaatactgtgcaaaagattgttactgttcaaagagcttacaaactaaatttaaaagaatagcaagtctgaaaaatagaagatagtcaaatatttgtttatgctaagaactgtttttaattttcagctttgatgtaaattgctagcttagttgtctttagttcaagcatgttaggaaatcctctttattcttaaatatagatacatgtctgcatatatgattgaattttagagccagaaagcatgtagagcagttgtgattagtagaaaatacactgacaagaagatatttgcatttatttcccaaagctgccagtaactagattttgtgacttaagtcatttaacctctccttgattagagcttcctgagccatgcacactggcactgcaaatcacagacaggcctagatacagatcccctcaccccttgctacatccaaaggtggcctgggtggctggagcctctgggccagaaccacctttgtccattttcctcagtgtgcctacagcatcgctttccatgtgtgccataacttgggaatagttgggatgtgttgcttaactcctttacaccattagttatctgtgagaccatctattccacactcttcattttttaaaaagagacaataattatttttaactcactgaagtttaaaactacctagcatttctgattaaaaaaaatttagaaggaaaattttaatgcatttatttcagatggcgttttaaatagatacaaccctttggaaacacaatatggtactacatagcaagggctgtaaaaatgaccatatcctttgccccataaattctacttctatacttttaaccttaaaaataattcagaaaaaagataaatgcatgaagacatttatgtctgcattctttataataacaaaaattggggaaaaaaactccatgtcaagaaagtgggataagaaaaatagtgaagtattatactgccattaaaataattatttggaagactgtagaaacgtggacatgtttgatatggtaagtaaaatgagcacaatacaaaatagtatgcatactatgattgtgactttgtaaaatctttatgcatgtggaaggtaatctgcaaaacaaattcattgtgttagtgtagcgggatatggaatgactttatttatttaaatcttttctttaatattactttgtattttcaataaaaataaatcactgtacatagtaa

SEQ ID NO: 266 - DNA, 13249 bp, Homo sapiens
  source 1..13249: mol_type = other DNA
ctccacctcgtccgtggccctgcccacccaggccgcaagagctgccgggacggtccccatcttcttggagcgctttaggctggccggcggcgctgggaggtggagtcgttgctgttgctgtttgtgagcctgtggcgcggcttctgtgggccggaaccttaaaggtgagtaactctcggtggctaatgagaagctacaaaagggtccgctttgctggtgcgcgactgcgcgtttccgttctttactgcttctcgcggcgtccgtccgcccctcgccttcctcacgttcaggccgagcgccgcgtgggccgcagccggaggcggcggagccgagggggcgcgggcggcggcgaggctgcccccgcgaggaatgcgggatcctggggttccccgcacgtggctggtgcccaggcagttccgcggttgcttagagacgggactgtggctgccctcatccccattgcgtcttttttttttttttttttttttacctccaccgccttctagtctcaccgaaggcttgtggccatctctgtaaagtttctggggaggtgggcacggggtaaacgccggagggttctgtggagcctatgggactgactggaggccaaagaactttgggccgcagatgtacaccagcgtcactcttttggtctgttagggccttcatcgctcacatcaggtttcagtgtgaaacgggaaaacgtgggtaatatttcatttacagtcgtacattctggaaaagtatctgatgaaacgcagttccaaaattaggccaaataggttttgcagggtctaaatagttattttatttcatcgtttgctttgtagggggccctagatcacggtagtaacttaggagtgtagattgtgatagacaagacaatgcataaaattgagtaatttctctagggggatgtggatcacacagtaccccgttgcaagtgcttcctatgtgtatccatggtatcgaatgcaattgcagtgtgtcaggggatgcttccaggaagtgtacctacatcagttcataactagagtcaactaatggcaatattctcgatgatttgttcacataacttttgtacagttgggatgactgggtggcttagtagagtcctggaggcaagtactttgtaagtagaagacttggtttgtaatttctagcaaactaatagcacagcttccttttttcattgcagtgctaatgtcaggaatacgaaacaggaaactggctatccaatgtattagtaaattagtaggcatactccccagtttaatgttgtgttagtatgaccacattctcccatttttgttttcgtatgttccttagcatagagtatctaaggaactgtaacatttttcaccttaaagttatgatgtctaacttggtaacaaggtttgggtaagtcagttgtgactacattttaaaagaaatgaggccgggcgcggtggctcacacctgtaatcccagcactttgggaggccgaggcgggtggatcgccagaggtcaggagttcaagaccagtctgaccaacatggtgaaaccccgtctctactaaaaatacaaaaattagtcagccgcagccgtggtggtgggcgcctgtaatcccagctactcaggaggcgaaggcggaatcgctggaacctgggaggcagaggttgcagtgagccgagatcgcaccattgcactccagcctgggcaacaaaagcgagactccgtctcaaaaaaaaaaaaaaaaaaagaggtgaacccataccaaacaaatgcacagagagccatggtaatatacagatagatagttatctgtttaaaactggaaatggttggtaagtgattggagtttttttccctaaagcttgcttgaccagctaagtgaagataaacagtttcttgttatagaagatggggtagtgatttactgaaagacaagttttttatagtttttagattttttcatcacttattccaaagtgttgctttgttgagatatttgagaactgagtaaagaaactgaacccgtgaaaatagaaattcttgattttttaagaaaacgggatattaatactttgtaaacattatctttctattcttgagttttatataaaaaataactttatgctaatttgggaaattttacagatagccgcaatggctgaaaatggtgataatgaaaagatggctgccctggaggccaaaatctgtcatcaaattgaggtatgattcctgtgctataaactgcaaaaacaagttccttgaaagaaaatacagaaagaacatttaattctagtacatggacatattcaacatttggtttgcctttgattcttagatgaacatataatagcatacagttttatattggtggagccaggttgtgaaacttaagatgtacaaacatttcaaaaggtaacactataaactagagttacttaatctttttaaaattttagtttcatagtctcatataaaattttagcttcatagtctcatataaaatgagaataatagtagttccctcctcataaggtagtttggaggattagtgaatataatgttaagtacttagaagaattcctgacacataagtaacataaaagtccttggtaaagtaccttccctgttaaataacactatatttttgatgatcttagtttttttctgcccagtcagttctcagctattgtaactttaatatagtttttttttttttttttttttttgagatggagtctcactctgttggccacgctggagtgcagtggcactatcctggctcactacaacagtattggctcactgcagcctctgcctcctgggttcaaatgattctcctgcctcagcctcccaaatagctgggactacaggagcacgccaccacacctggctaatttttgtatttttagtagcgacagggtttcaccatgttggccaggctggtctcgaactccagacctcaggtgatctgcccacctcagcctcccaaagtgctgggattacaggtgtgagccactgtgcccagccagtaactttaatatagtatctgttttcaaaaccctcttagcattttttcaaatttaggtattatgtttatgttaacgtaatacctcaagtgatccgtagtacctttgcagtactgatgcaggaggatggcttgagtccaggagttagagaccagcctgggcaacatgatgaggccccatctctacaaaaaaattttaaaaattagctgagtgtgttagcagtttacctgtagtcctagctacttgggaagctgaggtgggaggattgatggagcccagaaggtagaggctgcagtggctgtgatcataccactgcactccagcctggatgacagagcgagacactgtttcagggggcgaggggaagaaacttgagagtcttcgtgagcatactctggctggggaggctgcctgatttgcaaatcgttctttgttcaattaaactcaaaaagaaaaaaaccttaaaatctttacaatatcgataatggttgcatgggaaattatctctaaacttaggttcttgctaagaacccctcagatcatattgtttggtgtggggtttttctgcaattctcagaactgctttttttttttttttaagctgcacgtctctgcatttaaaatgtctcatgttcctttttttggtattaatttctttatgactatgaggagaaaaattagaaattattcattctgtgtttaatacttagaacaatactaagatgtatatagaaaaggttgtatctctcccacaacctgctaactctcaaatcctactcttctgaggttatcaaggttaaaagcttttgacactttgcttcatgctcatactaatttttttagtggaccttatattttacaacagttctaggtttacagcaaaattgagcagaaggtacagagattttccatatatcccctgcctccacacaagcatagtgccttcaccttttaaaacatcccccaccagagtggtacatttctaacaattttatttccttccctttcccccgctaaatataggatgcatttttgtggagaaaagttttgtaatcaataatcttttcattctcctctttaatatgaaggatgtttctaatttttttagctgtaatcattctttgacaaatattcttatatataaatcttagtaaacatgtttattgatttcttcaaggaaaattcttagaaggagccatactggctcaaggattatgcacatttaaaaaacactgataattgtcagtttacatctacctgaatggctagttctctgtgttcaagtcaatactaggtagtcttggttttctttctaatcttagccagtttgttaggtgaaaaatgctgtctcgttgctttaaattgtatttctttgattaacaatgaaatgaggttggattttttttttagtttacagtacattatttatttatttattttttgtgatggagtctcactcttgtctcccaggctggagtgcagagtgcagtggcgtgatcttggctcaccacaacctccaccttccaggttcctcagcttcccaagtagctaggattataggtgcacaccaccatgcccggctaatttttgtatttttagtggagacggggtttcaccatgttggtcaggctggtttcgaactcctgacctcgggtgatccacctgcttcggccacccaaagtgctgggattacaggcatgagctattgcgcttggcctattttttataatttttaaaaaaatcattagctgggcatggtggcatgtgcttgtcgtcctagttacttggaaggctgaggaggaagatcaattgagcccgggagtttcaggctgcagtgagctgtggttgcaccactgcattccagtctgggcaacaaagcaagacccgatccctgaaaaatagtgtcttttttttttttaagacagagagacagtattgctctcctctcaggctggagtacagtggcggtgatctcagctcactgcaacctccacctcccgggttcaagctagtcttgtgcctcagccatccgagtagttgggattacaggcgtgcaccaccatgtgtggctaatttttgtatttttagtagagtcagggtttcaccactttggccagtctgttgtcgaacttctggcctcaagaaattgacccgcctcagcctcccaaagtgctgggattatgggcttgggccaccgtgcgaggccaataaaatatcctttaactgttttctattagggtgttctctttttacccttcttctttgtttgtaagaattcttgacaaaatttgtttgtcttttactttttatgttacttctggcattccaaatagtcatacttgggtttttccttggcttgtatattgagagttcctctatgcttaaatttgagaaacatttactttaacttttttttttttttttttttttgaggcagcgtcttactttgttgcccaggctggagtacagtggcacaattatgcctcactgcagcttcaacctgccaggcttaagcaatcctcccacttcagcttcctgagctgggactagaggcacgtacctctatttcttatttattttatttatttatttattttttggagagctggggtcttgccatgttgcccaggctggtcttgaactcctagactcaagcaatgcacccacctcagcctcctaaagtgctgggattaggcatgaaccaccactcctggccccccacccccttttttgagatggagtctcactcttttgtcaggctggaatgcagtggcacaatcttggctcactgcagcctctgcctcccggtttcaaatgattcttctgccccagccccctgagtagctgggactacaggtgtgtgccactatgtgcagctaatttttgtatttttagtagagacggggtttgaccatgtcggccagggtggtctcaatctcttgacctcccaaagtgcagggattacaggcgtgcggcaccgtgcctggccccgtcccttattttttaattttaaaaaattagaagggcaggtgtggtggctcatgcctgcaatcccagcactttgggaggccgaggtgggcagatcgcttgagatcaggagttcaaggccaacatggtaaaaccctgtctctactaaaaataacaaaaattcgctgggcgtggtggtacatgcctgtaatcccagctactcaggaggctgaggcaggagaatcacttgaacctgggaagcggaggttgcggcaagctgagttcatgccactgcactccagcctgagcgacagagtaagactctgtctcaaaaaaaaataagaattgagtgattaaccaatttcttccagttctttttatttaaccatctgttctttccacactgatttgcaagagccttttcatataatctttaaatatattcttctttaaggttttctagtctattgacacatctgttacactattttagtaattgacattttagttttatctttttgctaatttgtaaacattattgtatatttggggaaagtgttttgccttttgtaacttatgtatttttaaataacagaacttggtactgtagagtaatgtcaggattggagtccatattatacagtgttctgaaatacattgtaattatctcacagtattattttggcgacttcaatttgccacgggacaagtttctaaaggaacagataaaactggatgaaggctgggtacctttggagataatgataaaattcaacaggtaacaagcttttaaaaataatctttaggttttctgtttacaatgagtgctactgctgagtcttatgtttttatatgtactcttcaggttgaaccgtctaacaacagactttaatgtaattgtggaagcattgagcaaatccaaggcagaactcatggaaatcagtgaagataaaactaaaatcagaaggtctccaagcaaacccctacctgaagtgactgatgagtataaaaatgatgtaaaaaacagatctgtttatattgtaagtgggcctgtaatgcatttaaatatcttacatttatttagaaagtaaagtacggaagaataagggctcaggaatcacagcctcactaattactgtatgtcctttcgtaatattcttaacctaagtttcttttgttttgttttgttttgagacagtctcatcctgttgctcacgttggagtgcagtggtgtgatcatggcccactgcagtcttgacctcctgggctcaagtgatcctcccacctcagcctcctgagtagctgggactacaggtgcatgctaccatgcctggcaaaaaattttttgtagagacgggtcttcctgtgttgcccaggctggtgtcaatctcctgggctcaagtgatccaatcaccttgacctcccaaagtgctgggattacaggtgtgagccaccatgcctagtcctaagttttatcttcataaacgtggatattttctaccttgtagaactgttgtgagaattaaatgaaaaaaaatatatataccattggatgaaatctttgacatattctaagcacctattgcctattagctgttcttatttatcagcagctaaacttgattgcagttttctttagtgtatttttaaatagttttttattacggaaaatttcagatacatatataaatagattcaataatgtaccatcaccagctttagtagttaataacagaacatgcaaatcatcttgttttatttctgcttcaactgaattattttgaagcaaataccagatgaatcacttttattgtactggagagtagtggctcctaaacaaggctgttaagtgattaacaaagagaaatagagatagataggtatatcctgggttcatttcaagaaaaaatgaatcaaattctctccaattgtttatctgagaagtcattatttgttatttgtacatttcttcccactcttcacagaaaggcttcccaactgatgcaactcttgatgacataaaagaatggttagaagataaaggtcaagtactaaatattcagatgagaagaacattgcataaagcatttaaggtatgataatacagactttttctagttttaaaatatatgggacataacttaaaaaaatattttccttcctttttacagggatcaatttttgttgtgtttgatagcattgaatctgctaagaaatttgtagagacccctggccagaagtacaaagaaacagacctgctaatacttttcaagtaagtctttttgctgatgtttctcctggccttttacttatatggacacacactagggtaaggagcatggaagtagtatcccctgaaaggccaatattcttagtatctttagatgacctttgagaaatgcttgatatttgttcagtgagaactatagtcttttgagactataagaaaagtgttcattagtaccttttcactgttaacaatttttttttctttttcttttttttttgagacaagtttcactcttgtcacccaggctggagtgcagtggtgtgatcttggctccctgcaacctctgcttcctgggttcaagcgattctcctgcctcagcctcctgagtagctgggactacaggcgcgtgccacctcgtccacctaatttttgtatttttagtagagatggagtttcaccatgttggccaggctggtcttgaactcctgacttcagatcatccgcctgccttggcctcccaaagtgttgggactacaggcgtgagccactgcgcccagccactgttagccattattaaaggaggttatgttttaatactgattttgcatctaaaacttttgatcaggctgggtattaaaatttggtcttttgtgtgtttggaaaatatatcaatgcagttttcatcttatttttcatagcctatatgtctttttttttttttttttttttttacagtacaaaggatttgagatttgggtcacattctttgtgaatgtgtgtctgtctaagtgtctaaaaatggggatgaaccagagcattttcatgataaaattaggtgtagggccatagttccctactttagaagactgtgcattagtcttctaaatggtatatactaaacttgattgacttagagatgcactgtgatgggtcatagtatcagtgttaaatcctcaaaaattatttaacatgattttcatatgttattgttggatcttggggattttagaattttctccttttgtggaattaacactatagaaaactgcaatattatttgcatgacttctgatacacttttttccctatacatgaatgataaatggaaatcaacatgaaattgctaatggatagggggtttctttttggggtcatgaaaatgttctgaaattagtagtgatggttgtacaactgaatatactaaaaaacattcaaggtacactttaaaagagtgaattttgtggcacatggattttttcctcagtaaagctgttatataaaaaaacatgagagagtaaattccttggcatattttgaatttttagttgatgattatgttgatagtaagcgtgtgcaacattcattgctgtgccatgtcttaagttattcaaaataatctgcagtcttaactttgttctcgtgaacttagcctctgtactgtgtgttctttagggacgattactttgccaaaaaaaatgaagaaagaaaacaaaataaagtggaagctaaattaagagctaaacagtaagtatgttgaactaatcacgacataatttgaattccttaaagctctgacagaaatatagctggtgagctctgaaatagtggcagtagacctttctctttgctagtgaaacactgagatcttaagctgccttgacaatctcagggccaaattgcattgcagtctagcattggacgatcaaaaaaacctaaggacttctggctttggttaagtaagtttagtgatcatgattggttaactttattaggacttaattttcttatatagtaaatagaagtatgttataattatatttttatttgtagggagcaagaagcaaaacaaaagttagaagaagatgctgaaatggtaagtatatattactgctatctagtacatctgtaattcgaagttaaatgaatagcttttaagtctgaggactttttcaagaaaatacgtaagcaaagctatctatagttgttattgcattaagtaatacatcaggtattatattgagggaaaagagaaaactaaggataggaaatatgttctaaaatatggaaaaggccgggtgcagtggcccacgcctgtaatcccagcactttggaaggccgaggcgggcagatcagttgaggcacggagttcgagaccagcctggccaatatggtgaaaccccatcttgactaaaaatacaaaaattagccaggcgtggtggtgcatgcctgtaatcccagctatgtgggaggctgaggcaggagaatcacttgaacccaggaggcggaggttgcagtgaaccaagatcatgccactgcagtccagcctgggtgacagagtgagaccctgtttaaaaataaaaaatataataaaacacaggaaaatatattttgaaatattcagaaaaagttcatttatgcctagaacttatttttatgagaaaatgtcctataacttctaaagattctaatcataggttaatactaacatgacttttatttttgacttaataagatactgatgtgtatttccatttagaaagttacaggtaaaaatttttatttggggaaaataatgactataaaatttttttttttctttttttgagaccgagtctcactgttgcccaggctggagtgcagtggcgcgatctcggctcactgcaagctccacctcccagattcatgccattcttctgcctcagcctcccgagtagctgggactacaggcgcctgccaccacgtccggctaattttttgtatttttttttagcagagacggggtttcaccatgttagccaggatgctctcgatctcttgacctggtgatccgcctgcctcggcctcccaaagtgctgggattacaggtgtcagccactgcgcccggcctaaaaattttttaaagtatgataaatactgcctagaattattttccaagatagtttaatagccagatttatgtagtttataactaattaaataccagttgtataagagatcaaataatattgaaagccattttggaataaaggatgacaaaggaaaacaccaacactatgaaactactttatttatttattattattattattttttgagatggagtttcgctcttgctgccccggcggaagaaactactttaaaatagcattttggtttctagtctttttcttgtatagctataaggtggtgtgagtcatttctggtctgttgttgcttttaagaaactttttgatcactttgtatatttttatagaaatctctagaagaaaagattggatgcttgctgaaattttcgggtgatttagatgatcagacctgtagagaagatttacacatacttttctcaaatcatggtgaaataaaatggatagacttcgtcagaggagcaaaagaggtttggatacatccctatcctttttagcaatcagtttgaaaatctgtagaaacttagacaaaattagtagaaagtaattttaaaaattgtgtttattaaattagtttctacttgatcatttgttattgccactagatgtgatgtctgatattttctgaattatactaaattagtttctacttgatcatttactttgttgttattgtcactatatgtgatgtctgatagtttctgaattatactatgaataactgttcatactgatgattgcagttttacttctgtagcattccttttctactgttcagtaaaattcattcaaactggtaaagacatggaaggtttgcagggtagaaaaaattactttggacaaagaaattaattgtgggactaaaaaccaagggtatggcttttgttttctgtctctggtataggggataattctatttaaagaaaaagccaaggaagcattgggtaaagccaaagatgcaaataatggtaacctacaattaaggaacaaagaagtgacttgggaagtactagaaggagaggtggaaaaagaagcactgaagaaaataatagaagaccaacaagaatccctaaacaaatggaagtcaaaaggtcatttattctgatttttctttaacagtttggttgttgaacccatttacttgagcaaaaactttaatcagtgttcaaaaacattgacaagagacttaaaaaaagttctttacagagtgctcaattgtgtctctacaggtcgtagatttaaaggaaaaggaaagggtaataaagctgcccagcctgggtctggtaaaggaaaagtacagtttcagggcaagaaaacgaaatttgctagtgatgatgaacatgatgaacatgatgaaaatggtgcaactggtaagttttttttaagtcctttggtagtttcatgagaaaatttctacttccataaataaatgatttgccagagagaatagggatttggcttttcaactcctggataagtgccattcttggattattaacgatttacctcggttatgctgttgtataagtcagggacaggatatttggaagatgaatctagaggtcaggtctgtactaagagaaaagccttttctcattggtgcaaggaagttgttgcatctttttcaacagtatcattattagtaattgtgctcagtattaaactagagcagtacttacgttgaatttaacaaaaattaattgttacgttataggacctgtgaaaagagcaagagaagaaacagacaaagaagaacctgcatccaaacaacagaaaacagaaaatggtgctggagaccagtagtttagtaaaccaattttttattcattttaaataggttttaaacgacttttgtttgcggggcttttaaaaggaaaaccgaattaggtccacttcaatgtccacctgtgagaaaggaaaaatttttttgttgtttaacttgtctttttgttatgcaaatgagatttctttgaatgtattgttctgtttgtgttatttcagatgattcaaatatcaaaaggaagattcttccattaaattgcctttgtaatatgagaatgtattagtacaaactaactaataaaatatatactatatgaaaagagcaa

SEQ ID NO: 267 - DNA, 32742 bp, Homo sapiens
  source 1..32742: mol_type = other DNA
acgggctcattcagcggtcgcgagctgcccgcgagggggagcggccggacggagagcgcgacccgtcccgggggtggggccgggcgcagcggcgagaggaggcgaaggtggctgcggtagcagcagcgcggcagcctcggacccagcccggagcgcagggcggccgctgcaggtccccgctcccctccccgtgcgtccgcccatggccgccgccgggcagctgtgcttgctctacctgtcggcggggctcctgtcccggctcggcgcagccttcaacttggacactcgggaggacaacgtgatccggaaatatggagaccccgggagcctcttcggcttctcgctggccatgcactggcaactgcagcccgaggacaagcggctgtgagttcccagacccttcccacccccactggggcgccggcctgcgcgcgagttgaggcgagggcgcgccctgttcccgccggccccggggagtagttggcccgtgggtcgcgcccgggccggccgaggcgcacccagcgcccagcgcgctcggctccccgccctgacccgccccgcgcggcgcctccctccattcagctcgggaaggaggagaacccgagggctaggctgggccccgggagagtttacttttttttctgttttaaacaaagtgctttccgccggttcttccctccgggcgtgtttgctgggaccccggcaggtggcacgctttgctgagcttcacgtgtgtgtttggggctggggtggcgttcagggtcaccgcagcgctgctgtgggtttgcagggagcgtagttccaggatggtctaggcctttcccaaactcacggtgcaccccgtctcccccgcagactggcgcgccccgcacaagttggaaagccactttccatgtgtcctgcatgactttctcagcaaggcgggggcgctccttaggagatacttttacatgcctttgaaaaaaaaaaaaaaaaagatgggggtgggggcgggaattaaccaaacacctgttcgctggactagatcagctgagaaaacaagtctgagtgatgtgcccagcccccaaagtactcggccgcacccgagacccgctcggctcctgcgttgggcgggcacagccaaggggttaaagcaaaatgtccgatctgagcctggactttgcaaacaaggtttgtaagggacaaccccccaccgtagcggtaaacctcccaggagaaagaggagaccggcactactggcctctccttttatttcttaaacagtgtttggttcccacatgatcggctatttaagccggagagggtattttggcgcttagtcgccttaatcgctatggggttgcattcttcatctgtgctactgaaaaataggctgtagcaacaaaaggtctcccctccccacccaggccttgagttgaactaaggaccttccaggaccaacagaccggagaaagcaaagtgcagccacagtgaagagattttgtgtttaggagaggcgaatgggattttagaactggaggaaacctcttgatttcagcggttaacaactttggaattcgtgaatgttgcagcccctgaattttagtcagtttttttttttttctgataacacctgctaggtgaagcacagaaattagctgggggtggggaggctctaggagggtggtctgaggctatatgcctggccagctgcttatactctgctttctctcagaaataattgttgttaagctgtaaatctgaaatgaaaggttcctgttaactcagttaatagatgacgtttattgtctcggaatacttggtgtgtagaatttgagcttgttagtgcagaaatgattgtgggccagcagagggaattcattctcctgggcattctctctctgcaccagagccccactgaaaccggtggcttccttgaaatacttgttcaagcaaaaagtgtgaagggaaagtactgggacaagaaatatcctggcagtggagatttgcgaaacgtgactttgccaggaatctgtgtcgtgaaggttagcagcatgcttgctaaaacttgttactgctgctgggcttctctggtattagagctgaggcaactcctcccgaggtaaggataagcctgcaatggggtctgatgccttctaggaaagctcttcttagcagctgacagaggggagaggccccgtataaggagactgtatgtttcctagagtccaaaggcagtgaccacactttaaagaggctgtggtttatgtcacgtgctgcccacctccatgcttttgtaaagctttattccagcttcaggaatagcattggtcttcccaggagaaccagcacacacaggccatagcacaggtcagttgtcaacctttgacagtaaagaatgtgggtgtaaatggcagagccagtaagactgagaaaacttctggaccagcttcctaaactctatggaaaaactcagtgggggtctttcagggacctggtgggagagagacctaagctgagattccttctcggccttttattagcagctgttaatttactttgagctttaatttctttatctgtaaaatggagatattactgcttactggggttattatgaggattaagagataatatgcaaagtgcttaatgcctgtctggcatgggtacttgctgactaaatggtagctgttaatgatcatttaaaaagcagtaattgtgtacctactgtgtgtcaggtaccttacaaggtgtcttaaacattctgtgattctaagattgcctgagagtaaagccaaaggtggttgtttttgggtaatgatattttaaactcagtcatatttatgaaacccatgttcaaagcaacttaactttaataggtcttaattagacttataacaaaagtgagtttaatgaacagaggactttgaggaaggagaagtaaaatatcagatgcatgggacggtcagataaaagcacgatcatagaagacctatcataaatgtttgtagttcaaattttctatagtgcctttaactattcagtcacattttaaactccagttatgacttttgcagaataatattgtgtcagagagccccaaaacatgtcgggtgttcctaaagctttggagactataaaattgaagtagataccataaacttcatccaggttttcaggctgtatattaaagaagtttcggactccaaaagattactcaatggtcagccaagttggtccgccgagtgactgaggtcagggtctgagcaccttggactctttaatttctcttaggtagttaagattgagtcattcccagaggtggaaggtatgtgatgatgactgtgggtatatccagcctatgaatcatcactcttagctcttctgggaagagatggatctatatatgatcacagggaagaacctagaagaaggagatctataagagatagtctcatgaagtcattttggatttctgccaaccctcattttcttctttatggggtctctctctctgaccaccactgtcttccagaaatgctccaggcccgcggtctgttctgttctgacccttactaggtttgttcttgacttttctcagacttgtcatgttccatctcttaaaatcatattttctgaactagagatcatctagtccaactgcctctttttacagatgaagaaactgaagctgaaagttcagcttgagcagaatcttaacagaatgtggatttgaatctctgacccatgctcatgccatttttaaatggaaaagccagaaatgttcttcagacctagagaaatcggcaagcatctgaattttggaagtgtactatattgtgttgatttatcaaactgcttcccatatgcataggtcagggctatctatttaaatattggtgcctggactcttactattgactctattccagctggccttggaacaagttctgggtccgtccttctttgcctgcctccaccccattcccttctgaaaaagcccagtgaagtgtggctgtagctagccaagaatcagagctgtattcaggatgtgtacctaagcacttgcttccttgcatttattcactcggagtgccatgtggcccagggccatcttccagggattgctgggtcaccttgaatgctaagagtagagaaaaagccaaaacgggcagcgagacttacaggaagtcttaggactctgcaagaaagcagaaataggcaagtttaattttaacacaggctggtgtgagaccaagtaatgacagggttggggaaaaaaagggtcaaagtatttatatggtataaataatttgttggggaagtcaggataaatgcttatataaaaggattcctttattataaagaagtggttattctgtgttctcagttatatagactctcttagcataacaatatattgagatttaatttaagctttcataaccaaatagtaccagaattatggcgcatggtttcctgaagacctcggctcaacatattactgtggacagtgaggccagtgaattatttggtattttcaagagggacagtgagacaaaacagaaaatactgttgtaagcttagatgacagggtcaattgtgcctgaaacactgatttagtgctgaatcagcccattttaagaatataatcatagcttaagaaccagtttaaaatttccccatcctacactaaagcaatgtctttaactcctttggatgtctgtagcacattgtgtctgacaattctgatgttttgtgctaaactgtgatccactatctttaggacatgatctaatctctcccaactggattgtaggttatgtgagggcaggggtcttacattcatttctttgcctgctagcacctagcatatgccttgcaaatacaatagagactgatattatacactcagtttaacctgtgacatcaactcttcctgctgagggtggagagagggagaaatccctttctttaaccctttgcccttccttgctcaggccttggtgtcttctgcctctgaggaaacggaatctgtaagcttagcaaagaaacgcacaagacgttaattcttggtttttgatttttcaaaggcggggggttccagctaagggattttcatgagtgtttgtaaatttcacctggcttttgccctaaaggcagactttagaacctaaccccagaaatacaggctgacctacactgcagtgggtactcgggacttgctgaggtggttggttgttatgaggctggacagagaaggatgactgtggaatagagatctttctgaaagcaacttgacaggggtgtgggggtcaaatggaagtgtgcagtacacgtgtgaagtcacttgtgaattgatagcggcaggtttatttcttcaaggatagtaagggaatcttggatatatttaactctttcggtaggatggtgggaaggctgcttacctgctccgggggtgagcctaggagccatagcatgggatctggggatctgtgtagcacccccgctggctcctgggaggatggtaaagattacgtactgcagcagtgggaagtggacgtagtctcagcccccggtgcccatcttccctttctgggcttgggtacaactctggaatcaaataactttatatctggaaggaagcttaggggttctgaaacctggctggtcttcagggtaactacttgggcaaccttttataaaagtgtgattctcagcccagcctagatctgttacgtcagtttccataagtgtgctccaagaagctgttcttaaagtcttcttcgtttgagtcagactagcttttctcctttacacagaaggcagagtgtaatgtagtgactaagagcagagcctagagccaggtaggatcaaacccttttctgccattgactagctatgattttgtgcaggattcctaaccttcctaggccttcctgccttcagctgtgaagctagtatcctcgcacattagaatagtcctggtccagagtgagcattttgtgtttgttaaatagatgaggaaaccaaggctgtaagaggtgcagtggtggcggcatgtctagcaaacttggtcttcaatctgcatcttccctgcttcccggcctgtgctgtgtatgtgctttctccttttaggtttggttttcatcacgtttaaaggtttggttttcatcacattctccctttcttccattccactctccagttgaaaagtgcatctcagaagagccatgccttctacttagcagcccttcgtagctactaagccatagataaatcccagtgaggtctcagtgttcagagatgagtggacagatgggtgcatagacatgacggggcagtgactgtgagctggatacccatggagggtgggtggtgcagttataggttgggcttactgctaaggaataccacctgtctggtttccaggccttcttagacctctatgaccttgaaagcacccccacacctccatccctaggaggctggataacttgcacaacacccagggcaggtttgaaaacgatttatttttcttagttttttgcttggcactaatgtttgctaggaaggagcttgtggattattgatgacaaaactgcctaaggttggaaagtatgtgggcaaatatggaagtagtgtttccttcacaggtttgttaaactggcatttagatttgcaaacactgatctcttggaattaagttaaaaggctaattgttaattagccctgaactggggcaggtagatgggcctctcaccagtgcaggtccctgtcaactaataacagggtttgataaccaccatcaaatctgctatctggcttttctgcttagataaacaaggcaagacgatctcaaaccagcataccgattccgaggttggcatgtttgtagaagactgttctcaggccgcagtgtggcagcagaccctccccagttcagccccatgccagattccaacgttggatcccactgtcgcttcatctcatcctaaattggcagaaagactgtttagaaaactaagtctctaaaaccaattaaatggtaaagaagactgttctgaattagggggaatgggatgaagtaccactaaacgcaagtcacaaagggcaaaaactcatgacatggagccgtgggtatctgcttgcatgtttatttgccaagcggctagtatattttgcatgtcatacaatctgaaacttacttttttgaaaagccatttcagatatagtataagaaaagcctttgagagaaacatgctttctaagcctgggagtacagaaataaaaataaactttgcaataatttgaaaggggcacactggttagttgaagagtaaggaagcacccagtaatgcctctttacccaagagctctgtttgctttgctcggtgatatcaatgtcactgtggtttcttcattttgaaaaggaagttcatttgtactgaggtggttttaagtgtgtgtgtgtgtgtgtgtgtgtgtgtgtgtatgatgcaaatgataataaacatttcagacccagagggcagaatgtcactgaacctaagccctcctgagccaaataactcctttgtccttgcagaatcaggagcccttctcttcaggatatgctgccattatgataaagcattgtgatgtaaagttaacgagaggatccttatccaagtgaatcacagccaaggggtggaatggttggcctctggtagggatgccccattcagcagcactgagagtttggagttgttctgttctctttccttcttgctgagggtagtaagaaatcctccctaggccccattcccctgatatatcttgcgggtgatggcctcttactggcagtgtgattatgtatgtccctttagaacaaaggtatcgaaacaataaaagttgtgaaatggaaatgtttacaattctacaaggctccagagagattagagataggtaggaaaaaggccattgttttccaatcaaaggtgctgagaacctgttgattggacctaaggaatccagctttgccacgacacaaaacccaagagttttgtttcttttttttttttttttttttttttgttgagacagagtctcactctgtttgcccaagctggagtgtagcgatgcgatttcagctcactgcagccttgacctccttgggcttaggcaatcctcccacctctgcctccccagtagctgggactgcaagtgtgcagcaccacacccagcaatttttttgtgtttttagtagagtcagaatgctaccatgttggccaggctggtctcgaactcctggattcaggcaatcagcctggcttggcctcccaaagtgttgagattacaagcgtgagccaccatgcccagccccaagagttttcaaaaaaggaagagttcaaagaggctcagaaatgatcaagtggacatacagagacataattttaggaaagggatattattaatatttgccagtgagtcctcgttactgctggtgagactaggcccaggtaccgacttaaggcgatactttgaaaaagttgagaggtggcttaaagacctgggtgatgaatgaagaagacctccatgactttacaagtgcaaagagagatgggtctgggcactgctgggccttttagaggctcaaggacagtggccttggggaaggctgaaggagacacctattgaattagatggtgccaaggctgagggaggactttcgggaatcccagactagagaagtgttttaatgccaagaacatgggaaacccatttcagatactgtatcagataagccagcttagaaaagcaccttctaaggcttgccctatatttagaaagggctgctacagaggttaactgagaaggggttgtaggaatgtggagaggcgttgtgaggatcctcattcaggatgatctgggaggtaagctctgagagacaatgatacctctccccaagcttagcagccatgccagaagccagctgagaaggtttttcaatatcatagaatatgtaagctctgtaagctcatttatttctctctgtgtgtgtacatgttttaacccaaaagaaatagggatttttgtctgtattcgaacatgcagggaatgtggtctggacctgccagagaaaccgtggccagctttttggggttttcctatagaaattgttcattcaacagatattcactgagtatttactatgtatttggcactgttctagtgctggggctacagcagcaaacaaaatagacaaaatccctgcctatgttctgatcggggagacaaaccataaacaaaaaggtgtattatgttagatagtaataattaatgcagaagtgttaatgcaagagaggggagaatggttgatgtgatctgcaaaaatataaagtagagagggaacagggagtgcagatggggagggaagtggtcagcagtagggctgcctgggaagactttgctgagaaggtgaagctgcattcctggcagagagaatggcaaacacaaaggccctgaggcagaagcatgttcaggcaaagcagtgagtctccttggaggcagattgtatagggccttatggatcatcgaatgactggcttttactcatgaatgagatggggagcatttgtaggttctgagaagagtaggacatgtcctcacttggattttaaatggatttctctggcctgcagccttgagagtagactgtatgaggacaaagatagaagtaatgatactgactaggaggctcctgtaataaacagataagagatggtgatttggaccaatgtggcagcaatgaatatagtaaaaagtgcttggattcaggatatgtcttgaaagtagagtcaacaggatttcctggggactaggtatcagttgggacagacagagtagagaagaatgtgtccaaagtttttgacctgagcagctggaaggatggagttgtattatggtttggggagagatgtgagagtaatagattttgggggcagggcaggagtatggttttagatatgtcaggtttggagtgtctagacagccaagtgagttatttaggcagttgagtaagcagctgagtcaattaaaaaaattgaatttaaaagcctgaagttcagttggaaaggtttgattggtgatgcaagtagaggagcctctaggttgtgtttagaatgatgaactgatgagggcaccaaggacggggatggaggcctgagccctatggtgttcttacacatggaggttagggagagccctggagactgacacccatggcaggaggagagggagggagtgtgtggtcctggaaaccacatgatggggtttcaaagaggaagtgaaagatcagttatatcaaatgacacttactgagatttgatcgctagattggcaatgtagaagccactggtgaccttgtgagagcactgatggggaggagtgggagcaatgcctaattggagtgggtttgtgagagaacaggagagaaggaattggagaccataggaactcttgaggggttttgctgtagaggggagcagagccatggcaacaactgtaaggggaaatagtgggtttttgtttcgttttgtttaagatgggagaagattatagtgagctggtttgatgaagatgattcagtcaaaaaggaaaagttaatgcaagagaggggagaactgttggtgtgacctcaccaactgagtaggtgagaggacgtaccgtgggggaggtggcctgatgactggagcaagggtagctcatcacagttatgaggaagaaaggtcggatgaggggcacagatgcaggtaggtggctaattatcctggtggaagggcatggggtttttccattgcttctaatttctcagtgaataataataagtcattagccctaagttactcagtagttgtgtaaaagtttgcctcattaggagtaagaacttcactgaggcagatggatgtggatttgaatcccagctcctttacattctgttgattttgacattggacaaattacttatcttcattggtcaaatgaaggtactaatagcacctacctcagagggttgtgaacattaaaggtgaggataaagcacttagcagagtgcccggcatatccaatcaacatcagcctttactgttagggtcccttaaagtaaaatatgaacataattccctcacactggggagtttttgtagctctcttatcttttcagtctggtggacagcagaggttaccctttgggggccaggtcaaaggttaagtttccctatggaagactacaactggagggcagtccacaggccgccatgaagtatacattgttttgatgaagacaggaaggggaaatatgggacttggaagaaggaagagaagatggcagcatgtcaaaactctttggcaatctgcagacctttgtgctatatttgagctacagagaaccacgactttttattttgagttcttacaagactcattttaggtgtggagagagctcttcccatgtgggtctgcagctctagaattgggtagtgccttggatggcacagtcctggtgtatcctgcaggctgagtggacaggagggcgttgactgggtgtgtgtgatacagggtggaagccagctccgagaacgcagcaggagagccaaggctgtgcttcctgttcctgctggcctggttgatttgtctttgtaatcctagtcaatgcatccagcgtctcagtgcatatattgaataaaaaatgacgaatggccttgttgaattgtcaggagtgtagaaaatgaggctcaatcagcactttgggttctaaaatactgtcgtttttcaatctcttctttcaagattattggtatagaccttgagggaaatctgagttcaaaaggaaatagaatatctttggaattttgcaaaagtgtgagtcatcaggacttgagcatacattcccctggtgtgctgcaaatcagatatgaaacatcttcctgaggtggcatggtggtggtataaaagcttcattatagtacagaatgaagtgtgtacttatataaaacacaagtcttcgaagacattgcaagcttttggtggttgctttgcactgtgcctctgtacatgttcacctgcctctgtcattcagtgcttttgtgaaaatggctgggaagcattgaccagctcaaccttttctctctagaaggaagactgagacccagaaaagtcaagtgacagctagtcagtggtaatgtgggccctgaaacctagctgcccagtgcccagtccacctgatggtatgccatacacatcttccgtttggtgaaatagcccattcttggagttaaacttgtgccacataaatcttgcccttaatagaacagtatcttgggtttttaaatgtcccctacatagtgggctgggagagatagaaaatacagccactgtcaccccttcccctgcttactagggcactccaaatgaccatagcacattttttcagtggagtctcagaattcttcaggtcaacattggtcagccttcactgttgtgtgggtgtttgcaaataagacagcacctgtttgccctcctggccttgctaaatcccgtgcatatggaaggcaccctataaatgtatgcctgatggatatgagtcctgttggtttgtgagcttcttaagaacaaggctgacatcttgttcagttttggttcaaatctaatacatagaaatggatattcagtaggtatttgttgaactctttgattccccaaatacactaaaggcttttagagaacaggaaccagggtaaacatttctttagaatgatcttttacatgctggtactttgaaaaaaaattgtggtaaaatatacataacataaaatttattttaaccattttaaagtgtatgattcagtattgttaagtatattcacatcatttcttgcccggaaatgatgttgtttcatattatgaggccataaagtattgataagctaaacaaactttaactcaatatatgattgtgctgtatcatttagtactatattctaatgtgtattagtggcaatgaaatttaaagtttaacatatttatggtacaagttgaaatttagtctcttagcttattatgtgtttttccaatccggttaaggactgctatgagttgaattcagcagttgtatacctggcaccaacagcctttgagaaaccaagtaatttaagtttttaattgagtaacagaaaattgcaactaataaaatgcctggctatattagcttatttgtcatttatatgttgttagtactccttaactcttggtagctttaagatgaaaccaagagtggtttcagttgcattctgtgttctgattgaagctgaggcttgatttgtggcttgaagtttgaaaggaagtgcctgtttgttcagggaacaccaattggactaacagctgtcctctgtattaaggccatctttagcttgtcttgcaaatactttccttgttcactaatcccttctccccaccctgcttcctttagacccatgttaatctattacctgggagcagctctagattcttgagttggtaatgactaatttctccgttgctctcatcctgttgagtttaataggctctcttttttcttactgatgttttcatgatgagatttctaataagttatttgggagctatcagaatagaaactaataaatattatctatctattagctgtcagaataaaagcttactgagggtcctgaactgtgaggccactgaaggcaggggtttgggtctgatttatctgtgtttgcctagagctttaacagagcctgacacttgtaactcttaaaaatatgctttaaaataaatctaaactcaggcatggtggctcatgccagtgatcccagcactttggaaggctgaggtgggaggaaggcctgagcctaggaactcaaggtgagagtgagctatgattgtgtcactgcactccagcctgggtaacagagtggagacgctgtctctttaaaaaaaaaaaaaaaaaaaaaaaaaaaaaaaaaaaatcaaacctcagtgcataagacacaggtgttttcatctgtgaacgagagtagacacattctagtaatacccaatgtttttgtgaatttctttacaattgaaactattttccacttgtagaagttgggaaggaacttggggaatggcctggaaaggtagaccaccatcctcatttcatagaacaagaaatggagacctaggatttgtcatagtcctgcagccagctacagacagagctgtgcctacaattcccttcttgtcctgagttgtttctgcttcatttcccactagaaccccatcccgccctcacccctaagcagaggtccagctagctaatgtgtctgtttttataaaatgccaccagaagcttaagtacgtcggttcgtgtcccatcaaacttgtccagatctctttctcatcatagagaggtaccatcctgagttgctcagatgataaacatttctccattagaaactaggctcggatttgcctgtggccacaaatccagaagcagctgtgtgttccccatgtttctcaccaacccctgcgtcatgtttctgaataaggagtcctggttaccgccacacccctcattcattgctttagattagatgaaaggcgaggtgcctgactcaggccactgactcactctgcttgggtgaacccagctcctcccggtaggaagtgattgccccaggcaggttgaggagtgcccacagcatccaggactaaagcatttggaccctgcagctatttataaacagcactttacagtgctttcagtctgaatattgggactcccctagaaaggacagattcagtcctttctgaaaggaggatagacgaagggtgaggagttcttgttggatgtattttcatagctgaaaggttcccctgaatgctgtcagtgccatggatgttcatagggaaggttagagttcctgtctctgatgtcattcattttatgctgcagctcacttgactgtgggactccctaggaaagcttatctaccttttcagctgttgcacctcttttcttccatgtagtttgccctctgccttacattcactcttcattgtaatgccccagttgccagcacagtgcctggcgcacagtaggtacgtgtttgtgagcttgctttactgatgtgttgtcatgcctctggaacgggctgtaaaaatcaatctttgactctttgccagcaactgcccacataaagagagcatgtgtgagcttgttttatgcaattacaaggtttgcttcatgacttgtgggcgctgattttttttttttaacctcactatctccatcattttctctgcaagattttcagtgaccctcgtgtccatggactgacctccatttttaaaatttcatttttaatttatttttgaataggtagtacagtcacatggtacaaatattaaaactacaaagatggaatgaaagtcagcctcccacccttgatctctgggcatcctattcttcctggaggcaaccattgttttaccagcttactgtgaatctttcagagctacctatacatttacaagcaaatatgtacatagattttttttacccatttgccatgtagattcttttgcaccttgctctttttctcttggtatgttttaatgcctgttcaatcttgtaaataaagagcttccttattatttttaatctctgcataatactcagtttcgaggatgaactatgatttatttaaccagtctgggtattcagataatttctaatccttcgccgttaaaagcagtgctgcagtgaagaactttatgcttccctcatttcaccttaaatgaattaatttaaggtgaattaattaattcctagtgcagagtggcctggccggcgttgttgttttaatggtcacggctgattctggaggagtggctgccctcattcctttctatcctaaccatctgataggaccacaggctacgctatcagtgggtttagtagagtcttttcaacaatcgagtttccagccttatgcccaagctgttggatccctgaaggcttcaatgtttgtgtcctagctgtactttatgcttgttaaaatgtatgtgttaaaattagaatggcttgttggaatgtgtaagattgcgtatagtgtttcatgttttatcactgtgttgagtttacaaagttacttgatgttatttcttttttcttttttgaggcagggtctcacgctttcgcccaggctggagtacgagtggtgcactcacgggttactgcagcctcaacctcctgggctcaggtgatcctcccgcctcggcctcccgagtacctgggactactggcatgcactaccacgcctggctaatctttgtattttttgtaaatatgaggtttcaccatgttgttcaggctggtctcaaattcctgggctcaagtgatcctcccaccttggcccccaaagttctgggattacaggagtgagccaccatgcctggcccatcgtttcatttgatccttgcaacaccctatgagaatatttagatagaacgatttcacagataatccatagtgatactcagctaacgggtggtactgccaagacttgaacccaccattcttgtaacttccttgatatctctaattatggttttggtctgccagtttgttatggagcagaaaagaagatgtaagctttctggaggtagtagctgctacaggcatacactatattatctcagcaatagcaagtccaagtaggactgattcagtatacacaaagaagtattagttgctaaaatattgaaataactttcattctggttggtgcacgttgagtatcccaaatatgaacaaccaaaatctgaaatgctccaaagctggaaactttttgagtgtttttgagtgcctgccaacatgacatgcaagagaaacattcattggagcatttcggattttggatttttagatttgggatgctcagtaagtattaatgcaaatattccaaaatccccgccccccgccccccgccaaaaaaaaccaaaaacccaaaacacttgtagtcccaagcatttcagaaaaatgatactcaacctgtaaatagctttgccccaaacccccctgagtttctttctctacttccctggccagttttcacataggaacccccctaatcgccacgtatttcccccccacaacccagcaataaaggggaaatgccctcataagcgaggagcccctggattgtagctcccgtgctatggccaccatctgtgctcgctaattggttcccaagccatactggtccctaaatattcttaaatctgtaagtgcaggaatggagtattaaacaatgtaagcgtttaggcatataacttgatttctgtaggttttgtttgttttgttttgttttgagagagagtcttgctgtcacccaggctggagtgcagtggcgggctcttggcttactgcaacctctgcctctcaggttcaagtgattctgctgtctcagcctcccaagtagctgggactacaggcgcccaccaccatgcctggctaatttttttgtatttttagtagagacagggttttgctatgttggccaggctggtttgaacttctgacctcaagcgactgcccgcctcagcctcccaaactgctgagattacaggcatgagccactgtgcccggctggtatttatactttgtaaattgcctttgttgttcttagtatcctatttctaaatctgttgtctttttcttttctttttttttttttaacaaaaaaaaaaaaaggccgggcgcggtggctcacgcctgtaatcccagcactttgggagaccgaggcgggcagatcacgaggtcaggagatcgagaccatcctggctaacacggtgaaaccccgtctctacaaaaaatacaaaaaattagccgggcatggtggtgggcgcctgtagtcccagctactcgggaagctgaggcaggagaatggcctgaacccgggaggcggagcttgcagtgagctgagattgcgccactgctctccagtctgggcgacagagtgagactccgtcttttttaaaaaaaaaaaaaagaaaaaaaaaagcctgaaagacctcttttggttttgctttttgctttgtctttgtcttcccggcctctaaaaatctgggtagctggtctgaggtgttgggacccaggacttgctctcttattgctccaccactggagcctcaacctcaaactcaaggtggtggcacctacattccaggcagctgaagaaaggagcaaagaacagagccaaaggcacatgcatgccatcttctaaggaaaattattggaagcagcagtgtgatgctttgtcacacgtcctattcagcagaactgagttgtgtggcacatccagctaaagagggaggttcagttgagtagtagttattcagggtggccttatgcccagctaaaaagtcttttactatgggaaagaggagaactgatgttgggtgacagccagcactctctggcagagctactaagcctgttgtttcatttatctcatttagaaaataaactgtgaccatattaatttccttttcaaagcattgaaaaatttgtatttcctaaactattggagtagtaaaatgggtatggtgacccaccaggtgtgagctcattaagtctatcttttctcttcttgttttttatttaaaatattttattgaaaaatgatggaatttaaagtcgctttttcctttgcagatgaactatttgataacaggttttaagacatgaatcttattttttgagttaacactgataatatttatgcttggtacacttgaaatagaaaaacctgcttggtcacaacatgctagaatttaaaattattaaaagtgatgaattaatgataaaactttattcccataacagaaatttactaagcatctactatgtgccgagcactgtgcaaaggtcagggatggaaatggtgagctcacaatccaagtgtgtacagtttcctagacttggtttcttgaaaggaaaactcactagagattggactccaaatcacaaatgtcatttggcaactgataagtcgggtatctggtaattcagaagcacaggaaatgattaaatgccacatttgacaagatctggcagctgccttgtgaaactgaaagaacaggattgcctggagacaattatcagaacttggactttcatttttccttgctgcagtagacagtgttttattgtggctctttaagagatgtcttagtggtatgaattgcttggtcagctgaaaacttttcacctaatttaattttatttttaatttttttgagacagagtctcactctgttgcccaggctggagtgcagtggcgcaatcttggcttagtgcaacctccaccacccaggtccaagcgattcttgtgccttggcctctgaagtagctgggattacaggtgtgcaccaccgtgcccggctaatttttgtatttttagtagagatggggtttcgccatgtgggccaggttggtctcaaactcctgacctcaagtgatctccctgcctgagcctcccaaagtgctgggattataggtgtgaggcaccacgcctagccaaattttatttttatttttatttatttattttttattttgtgagatggagtctcactctgtcgtccagactggagtgcagtggtgtgatctccgcctcccaggttcaagctattctcatgcctcagcctcccaagtagctgggattgcaggcgtccaccactatgcccagctaatttttgtatttttagtagagacgaggttttaccatgttgactaggctggcctcgaactcctgatctcaagtgattcgcccatctcagcctaccaaagtgctacgattacaggtgtgagtcaccacacccagccccaattttattttaaaatgagctagttatatatttatttctgtacttacaaatttctgttgaagtggaattcttgatcattttaaatgcaggccagttgcttttgtgatttttatgttgttgctaatgttattcttttttccttgaggttattgaaattcttatgttgggaggtaagaagcaagtgttggtggaccaaggtcacaccaaaaatagatcctagggatagaaccagaattccagaattcttttcctgtctcctcctccattttcctgatctgaccgctcttattagcatattccctttaaatagttgaaattgagggttgtgatttcacattttttcccccggtacgtggtaaagactttgagctgaaggagttgaaagttgtggatgttaaaaacacgttctgctttggatgttcctttactgcatgagctcccttgctcttaatgagacacacccatagtaaagtccagacactcagtctggacttaactgagtcaggttaagaactagaaccctcaggcgcaaatgtcacatgagcatcatattcactagaaaatgggtttagttctagcatgctctttcaaggaggcaggaaagaaggcatcttgtgaaattttgggaaggccaggataaaattgctggtcttgtgctccagttaaaggtaacaggtattctttgcctttaattttgcctttagcacagatctcaaagtacttaatagacgttaattataactgaccatgctcttgtaatagattttttttaatgagtaaactggggtgtagtgatgtcatcaaatcaagcagaaaggagactcttggagtagtggtttagagcaagatctgggagcccaggagtgctaggcacaactcctggtttgtcacttaccagctgtgtgaccttggacaagttacttgtcttctcaatttgtgtccacatttgtaaaatgggtaatggcaatagtgtctcttatattattgtctcttatagtgtctcatgttattaggcagagtacctaatatgagagcataggagatgatagctgttggggcattattaataatagcttgtttgcctcctttgaaagtaggctatgtttgtgatttcttagaaggttattagaaatctagtcttttgaatgtggagttgtagtttatagtcaaaagagagcctcagccttttaaccaactttctgtgtaaacatgaaaattccgggctggatttgttccactgtgaattttagctcacacttgcccaactggattatccagtaagtataatttaaaaatagggtttggtttttcttctccaaacacccttaaggttacaaaaaaaagcaggatctgcttcctgccctcaaggagtttatagcctagtaaagtgaaattgggagaagtacttgcccttggagatgatgaaacttgagttaggggtcttgaaggcaaaatcgtaggtaaggcctggagctggagcttggtaattgacagtgtttatggggttgggggcaaggtggcaggaaaatgtgagcacaggcgtcaaagtccttgtgtgcctgggaagtgaaaggaggaggggcagctcctggtggatggccagggtgtggctagatggaggaggagggctcccaattgtggtgggaagaatgctgcacagtgggaagggcactgggctggaagccctacccatgtcagggaatgtctgggcctcagatttttattttctagaatgaagatacttaccccccaattgctgagatatttgaataaaagtatatgtgaaggattttgtaattatagaatgtcctacaaatatgagtagttcgtttgctacttttttggcgaagaaaaatattgggatgcatgaataatatctacctaaggtacctaaggttgtattcatcccatttattgaatgccaaggatataccagctactgctccagatgttgtattcagggaacagaagaagagtccctgtgcccatggagctaacagcattctaggggaggaaagatgggacagctgactttcacgatctcaggtactgatgaagattgtgaagattattacatcaggtgaatgtaggggtgatttagagaaagctggtagctaggctgttcaaggaagggcctctgtgagaaaggggatggttggctgggtgtggtggttcacgcctataatcccagcactttgggaggttgggagtttgagaccagcctgaccagcatggagaaaccccgtctctactaaaaatacaaaattagcccggcatggtggcacatgcctgtaatccaggctacctgggaggctgaggcgggagaattgcttgaacccgggaggcagaggttgtagtgagccgaaatcatgccactgcactccagcctgggcaatgagagtgaaacttcctctccaaaaaaaaaaaaaaaaaaaaagagagagaagaggatggtggagttagccctgaggaatgtgaaggatgcaaccagcgaagatctgagtcaagagtgttcggaaccaaaggaagcgactgcggttactctgagatggaaatgaggctgctatgttcaaaggacagaaacggagtcagtgtggcaggagtgcacaccttagagggtgcagctggagaggcagagaaagggccactcaccatgggccttgtagaatgtggcaggaattcaaatttcattccattgcccatcggaacccactggagggctgtaagcagaggaatgatgtgatatgacctgagatgtgcaaagaacagcagttgcaaagaacagatgtggaggacgggctcgggtggaacaagagtagaagcaaaccagttagaatgatactatagttgttcaggtatgatgtgatggtgactcaggcctttgttttaggagtttgcaggagctcagagcagacagtgaaagtggccaccttgaagcaaaacacaaatgaaagggttgatcacaaactggattaaagttggcagtgagaatactggaaaggaactactgagaagtggtcagagtaaaatgtggaggtagagcctgtagactttactgatgcattggacgtgggatataagggcaagtgaagaatcaatgatgacttctaggtttctggcctgagcacctgggtagatggtgtacatttagtaagatagagaagggggccgggcatggtgcctcaagcctgtaatcccagcactttgggaggctgaggcaggtggatcacttgaagccaggagtttgagaccagcctggccaacatggcggaaccccatttctactaaatatatatatattttgtatgtatgtgtatatatatataaaatatatatataatttatgtatttatataatatacaaatatatttatatatttatatacaaatatatatttatattatatataaattatataaatttaaataaatataaatatatttatcttgtatatataaatatattttgtgtgtgtgtatatatatacacacacaaaaattagctggacgtgggggcacattcctgtaattccagcttcttgggaggctgaggcatgagaatcacttcaacctgggaggcggagggtgccgtaagccaagattgcaccactgcactccagcctgggtgacagagtgagactctgtctcaaaagaaaaaaatttttaaataaaaatagggaaggaggccgggcacggtggtgtaatcccagcactttgggaggccaaggccggtagatcagttgaggtcaggagttcaagacaagactggccaacatggtgaaaccctgtctctactaaaaatacaaaaattagcctggtgtggtggtgggcacctgtaatcccagctactcgggaggctgaggcaggagaatcacttgatcccaggaggcagaggttgcagtgagccaagatcgcaccactgcacttcagcctgggcaacagagcgagactatcttaaaaaaaaaaaaaaaagggaatgcttatggcaagcctggctgggggagaagctgagttctattttgaatgtgttaaatatgagatgttaagtggaaatgtttactaggcaattgaatatctgagtatggagttaggagagaggctggggctgaaaagaggtgttttgagagttatcagtgaatggatggtgtttccagccacaggatgagagcgcagctagagatgaggaaaaggtctaagagctggtggaagagaggagcaaccagcaaacttgaggagaaactggcaagtatcgactgacttgtacatccatctaccttgctgtcgtgatcgacccttatgtttgtgttttgcctgaaggtggccactttcactgtctgctgcgagctcctgcaaactcctaataatccgagggacagaggggagtggtggtgtactgttctagtatctacttttatgattcaaaaacctgttctttttgaaatcacatggtacttaaagatatttatattatcttctctatcgtcttttcctcccttcatttttactttggtaattttacctattaagattgtgaaggaacttgacattttagggatttcttgtagatgttgtaatgaaatatggttttggaatttgatttagaaagaggtggaatgtagtccgttttctttctccggcttccctcaaccttccagttctttataggtggttcattgctttgactaccagaggccttaaatgcaggttgcgtagttgaccatgcgacctgtgaggctccctttgaacctttgtccctatttctgtaaaattaggagctcaaatgagatcaaggtgggcttccttgatttcttccagggaacagggactggtgggagtcagtggcagcaagtcttgtctaaaggtgtgagcagcaacaaagcaacacacgaggcaggaaaggactaggcttcattaatggaggtgatgcttcagctgagatatagaggggattgggggctgggcacgtgctttttggagaatgggcagcatttgcacagtgtgggagtgcgaacaaagagcctggtggaccagctccaggtggtgaccccatcaataggaatagggtgattctcctgcattttctcatctataagtagccatgtggggaatccaaaaaccagttaccaacattcaaaattgctagtgctgttagttctgcaagtataaaattagaaacaaagttcaagcttcgtctgccaagttgaagtttcctaagtgttctctcaaaacccatattaatggactcattttggcgtttgtaaccgggtaagttacagataagggcatctgcattaactggagttgccttttgaaactcctcagccctagctttggtttctcaaatgtggtgtgggtatttggagtaaactgctgtaaggctaagctgttagtaagcatttgattttgagagccctctttcctttgcagctcttataaatggattactcagtaggaattgctggaaattagaatcactgcctcctttaataagtctagttaaggcagggaggtgggccccgtcacagcatagggcagagcagtcacttagcaaggagctcaggaaatgtttgctgaatgaaagagtggagagtgaaaggtcgtgttctcaacctggcagctggcatttctacatcacttttactcagagatttgcagacaaaactttttgtttaaaacaatgctatgttaattataatctaactgttacacaatttttttttttttaaatcacagtacagggctgggcgcagtggctcatacctgtaatcccagcacttccggaggccgaggcaggaggatcgcttaagctcaggagttcgagaccagcctgagcaacactgtagaaccccgtctctactaaaaatacaaaatattagccaggtgtggtgacacacacctgtagtcccagctacttgggctgaggtgggaggattgcttgagcccaggaggtggttgcagtgagccatgattacgcactgccctccagcctgggcaacagagcaaaaccctgtctcagaaagaaaatcacagtatacatggaatacaaaggttttttgtgtttgtttttaagaactagagccttcgaaggagcatgtggcttactggtattgggctgaaggatgattgcatggggcccatctggataatccaagatactttcctgggcaggggcattgacagggatattccctactttcttccacctttagaggatttactttagaaatggtttaaggtttctcaaagttttaagtctgctgtgttggaattattaatactggagtttgtcttttaattgtgtaaattacctggcttgttcattacaaataaccattggatgtcctgtaagtgctaggcactgagctggatgctaggtgatgcaacagtgacaaggacaggtgtggcccctgcccccatggagctgaccttctggggagggagaaggacagtgagcaaatggtctcacacacagtcgtataatcactaactgtggccattgctgtgcaggaaaggcaaatgataattataagagatgggacctgaactagcctggaaagtgggaagttttttttttgttttgttttgttttttttttttgagatggagtctcactcttgcccaggctggagtgcggtggtgccatctcggctcactgcaacctctgcctcctgagttcaagtgattctcctgcctcagcctcccgagtagctaggactacaggtgcgtgccaccgtgcccacctgatttttgtatttttagtagagatggggtttcactatgttggccaggatggtctcaatctcctgacctcgtgatccacctgcctcggggaaggtttttaagcagagacatgaaggggtgagtaggaggatgcctgaaggagagaagaagaaactgtgcaaaggtcctgagccaggagagtggtggtggttggaggggtgtgaaagaagcccactgcagttcaaagagtagagagtgatggagagggttaacccagaatgtgccctttggaaatacctaacctgaaatacttttacctaagccattgttaggatctgagttcttggtgtctgagcacaactgaatgtgaataagaggctgtttggatttcctgctgtggatggcaggatgctattcacaaagaagcctatgtcctgaccctccagacctgctgctacattaggttaaatggcaaaggggcattaggttgcagaaggaatcaacgttgcttatcaactgatgttaaaatcagggaagtatcctggattatccaaatgggcccagtggttcttgtaatgtggaagagggagacttgaagatgctcgcccgctggctttacagatgaaagaaggaaccatgagtcagggaaagttttcctgttgggcactaggcttagtacctgagtgacgaaataatctgtacagcaaaccccggtgacacgagttgtgctgcataacaaacctgcatgtgtacccccaaaccaaaaataaaagttaaaaaaaagctggaaagggcaaggaaacagatcctcccctacaacctttaggaaggaatgcagccaagtgagacctgggttggcctgtggccctaaggaactgtgagatagtaagataagatgaaggctattataataactgtgttttaagccactaagtttgcggccatttgttaaagcagcaatagaaaacatcctgcctacccaactcaacgtctcattgcataggtgggtgttaccaccaagtcacttggcagtgacgacctctggtgcctgctttgctgctcacagagcagtggagagtggctcttactaataatgcctccaggtaaatattgctcagtaaatacttactgagggcctgccacgtgccagaccttgctctcaaagcttgggataactgctgggtgaaaatggtaagatgtgtgccctcaccaagtttcattctagatgcctctcagccctgccccatggagaagggccagcaagagtgtgaatttcacatccagacaccaaccctgactgcagctgctgctaaatagttgtgaacagcagtgacttttccctgaaaaagaagtcccttccttatcttaactacttgtaggaaaacatatatatactgaaatagtttccttccaggttattctgaagtgattctttgggactgataaaatgggacaaactgaatacaataatagttgctgaagcctagctcattactgctggatagaacctgttgtgagtacagagttctcagatgtctttttagatctccaaatcagtcaccaaaataaggaaaatagttttttttataacttaaagtacacacacaccaacatgcatataggctagaaagcctgatatgaggtgttagtctggtagattgacttcttgtttaaagggagaagagtttacagaggcagaggcacagggtttggataaacgcacaaacaagctttaacgcctcctctgcttttcttcaccaggtggggaaggcagggaagtggggggacccttaactaaagagaggagagtaaagactaagcagtcgaggcaggccaccaggtttgctgagggcagccaggaagtggtagagggtgtggacattccctgttaatcactggcccttagagagcaggcacttccccctgcagccagaggagagacagtacttctgtcagtggatacctggagggtcaagctgcgggaaaggagagggactcttacaaggccagtgagctttgaccagatgagcttaccctcaggtatcctgatcacgtggagactggccatatggcttcccagaccaaaataactcacctgtgcctgtgaaaccataccagggccagatgcagctgcactgttgagatttgaagcgtggtgctgttgaattcaagctgctgcatcagtcaggtttctttgccagctttctatccgagcctggggtgaccatatcattcatcttccaaactaggacacgtttaatgaaagggagtggagtgaatgttcaatctttagacaacaggtatgatccaggactgtcctggggaaacctggacatatggccagcctagctaaggctagaagcgttaaccattccattggatggtctgatgacccaaaatggctaagtacaacatagcctgtgtgtggaagggcctcagcacccccaggaagagagggattgtcccaggtgcccttgctagcatatgtctgtgcccatagcatagacagctctctgatgtaggggtctagaataggtgttttctttataatccaaatacaaagcaatatttatttttaccccaaaattattctccttgtatttgaacattacaaaattgttctcttatgagagctgcccttctgactactttattttggaatgacacagtcatctgttctaaacaccttggctaatctaaaaggacctcaatccattttagttgtgaatgctgatagaggttaactttggttttaaataaaaataaataatttaaagaaggaggcaggtcactgtggtggctcacacctataatcctaacactttgggaggttgagttggggagatcacttgaggtcaggagttcaagaccagcctggccaacatggtgaaaccccatttctactaaaaatacaaaaattagccaggcttggtggcgggcacctgtagtgcgagctactgaggaggctgaagcaggagaatcgattgaaccttgggaggtggaggttgaagtgagccgagatcacaacactgcacttcagcctgggtgacagagcgagattctgtctccaaaaaaaaaaaaaaaaaaaagaagcaaagaaatttagttcacattcaatactcattcctcaggatttagcatcgtaattgcaagtactggatgttacaaactttaaaacatcctggaaatgttctagaaaactgggttaggcattgctctctgatgaagtaatatcaaagaaacatacagagtttgattaaaattgcttgatgaaatacaaataaaattatttttaaatgaatgtttagtatgtgtgattttaaatgtttgtataaatttaaacgatcaaatgtcagttgactttcatctgcgttcataaagcttaaatatatatgttagccaaaaaaaagtttggaatgtttttccccgttatattcatttatttaggcatacatagtatgtgaggagtggtagtcatgataagagagacgttgtggtaacagctggggaaaggcatcccccttcaaactgggggggaagctaggctgggatgaaaatctgatgcaagaaatgattgtattttgacttgtggttccagatggcaaactaggtatatggttttgcttcctggctcctcaaggctccctaatagtttagagattatgaagaagcagaaagcagatgggatctgggcttatgaccttagcaggggaaggagccaagtctagagttcatcatgtgcccctccccgccccccaaccaagagtgatcaggtaaagcagggactaggagagaggagtgggtctggaagtgaaggaccacacaggggtccacagagaccaggtgattccatcgttccctacctctgtctggagtaggggctgctggcacttaacaccctggctgtggggaaaataccaaacccatagcactttctggggacaggcagataggggaatgttgacatgtacacgttttacagagcttaaattgattacaatgcacaaaaataatgaattcttttttttttttttgagaccatctttctctatcactcaggctggagtgcagtagtacaatctcggctcctgaaacctccatctccggggtgcaggcaattcttatgtctcagcctcccagatagctgggattacaggtgtgagccaccgcacccggccaagaatgaagtctttatagaagtagattaggccaagtcatgacactagaaataaaaaaaatgcctaaaactagggcttctagtgtgaatgctgggaccccaagaattaagctgtcctcattctggcatttgaagagtggtttgcagtctgataactagctggctacccactcagcctaaagcgaatccctggagtcagcagccccacccaggactccctttcagaattcctgctcagggtgagagcgagccagaaatggacctttttatacaacatcagaacaaaagagaacagggattatcaggcatgtgatgagagctagcagcataaaaggcaatggccgaagcaaaccaacagaaaaactacaagaaacagataatccaggaacacaaagaactgtaggaaaacttctaggcaaaatgcttagaattttgggaacatgttaaacccacagaataagattaggatctgttatgtaaaaggcacagtcagaacaaagagctcttgaagactgcaaatgtgactactgaaattaaaaatgtcagtataaataccagaaaatacagttgaaaaatctcagaaccacagagaaggagggaaaatgagagaaagggtagattaacccaggaggttcaccacctgactagttaacagaggtttcagaaagaggacagaaaacatacaaatgaaacgatccacacacaataaaaagagtttccaggaaattcatgtcctaagtctgtggagtgaaagaggtcccacataggctcaccatcatgctgttgagaatgccttgggtaaagtagagaacgtggtggagcacggtggttcacgcactttgggagactgaggtagctggggcctcaaggtaggcggatcccttgaggccaggagttcaagaccagcctggtcaacatggcaaaaccccatctctaataaaagtacaaaaagtagccaggcgtgatggcacatgcctgtaatcccagctacttgggtggctgaggcatgagaagcacttgaacccgggaggcaaaggttgcagtaggtagagatcatgccactgcactccagcctgggcaacagagagagactgtctcaaaaaaaagaagttacccttttgagagtcagactaacaccagaatttccactggcaacactggatactagaattaattacagcagtgccatcaaggttctgaagaaaatgtttttcaacctggagttttacacccaaactatcaagagtgagagcagcataaagacatttttgtatatgcagagtcacactcagtttacctgtcatatgctattaggacagtatttaagaaagtaattcaaacaagggggaacatcagatcccagatcaaatccagttaccccaggatagccatgaagggctgttccagcatgatcctgtgtagcaggcccggcagaacatcaggtctacattgctgcagaaaggtccaggggctctgagaagggagtgtgagccaagatgagatcctgatttaacgcgggtatggcttgggagcttagagaagattgaggcttggataaaggtgaacaatagaagaaaaaagaaaggcaatgagaaaagccaaggaaagcaagagtcatggtccaaatgtgaagtacacaaagcaattgatagaatgtaagaatagcaagtctgtttgaccttaatgctaggaacagtttcttttgaggctgagggcttctgatactgctcccagacagaaaaaggaaaatcagaatacagtttggttcagcactgagtaatacttatttggctatgtaaaagaatagatgactgaattgtggttaaaagtcaaaatgtaagtggtaataggtcctgtaagtgtaaaggtgtagctggtagatagcaagacatggagaaactaagaggaaagtttggaaggaagaa

SEQ ID NO: 268 - DNA, 32742 bp, Homo sapiens
  source 1..32742: mol_type = other DNA
ggtctgcgcgcaggtgccgctcggcgcccggcccgcccgttccgccgctgtcgccgccgtcgtgcgtgccgctcggcggaggggacgggcctgcgttctctcctccttcctccccgcctccagctgccggcaggacctttctctcgctgccgctgggaccccgtgtcatcgcccaggccgagcacggtgaggccctcagggagcccgggggcgcgatctccgccaggtcttcggcgcctgggctcattgccctgaggctggcgcggggcccgggcccagtggccaagatggggccagggcagcgggtggcttggggatgtgtggatgaatgaggcgctgtcggactaggccgcgcgtcgggagatcggcctacgcctcacgcgggaaagccctggggaaagccttctcccgacgccaggacgcccggtggcccagtccggagaggaggatggggggtggggcccactttgggtgggctgccggccacctctctgtaggccagaggacccgacaggcgctgttcctgtatctgttctttggaggcctgggagttggccaggaacaggtgtcaggacgctgagaagggaaattcctggccctcggggtcagggatcagaggctggaatactactgcaagggcagggccccagcgtggtcctaggaggtacaactctcagccagaagactgggacagttttagttcccagcttctgagacgtgagcttagcggtctttgtgatttcactttgcagtccaagggtgggagtaattctgcacgcatgatttggagacagaactagtaagggacagagaaagtttcgacttgtaaataaaaaggttccgtcgattaatttaccattagaaatagtaaccataatgtagattttggaggttgcttatgaggactgatgagccgtaccttcagtgccaaaggtgggagggacttggtggaaggaccccagtacctggtgggtgttcatctatgtgaaaaatgggggttgtgggcgaatgggaaagataagattccagattatagaggaatggtttggtgtgaagggtgacttggctgctggtggttccacaatggaattttctttgactgtcttctgtgtacttgcttccaaatgctttctttcatataaccatatatcaggttaagatataaagtgttttgtgagcagtctggatggaagattggtagctaaactctaagtttatctttgattcctggtgccacaaatattttatttatttatttatttatttaagacagagcctagctttgtcgctcaggcagagcccagtggcgtgatcttggcgcaccgcaaccttcgcctcccgagttcaagcagttctcgagcctcagcctcccgagtagctggaattacaggctgcgcgcctgatggccggctaatttttttgtatttgtttttctttttagtagagacggggtttctccgtgttggccaggctggtctcgactcctggtctcaagcagtctgcccacctcggcctccccctcccaaagtgctgggattacaggcctgagccaccgtgcccggcccaacaaatattgattttagatcagtctttctgggacttctcagcaatgactcttttgacaacggatatgtttacagaactttttaaacatttttgctgaaaaaaaagtggatttagctctgtgttagttttggatcgctatatacagtatgttttgttcttaatcttaattcaataatatattgtatgtgatgaaatgtgttttgggtccatgtggatagtaaaaagttttgttcatatgtttgctttggtatttcagatgccccctaaaaagggaggtgatggaattaaaccacccccaatcattggaagatttggaacctcactgaaaattggtattgttggattgccaaatgttgggtaggtgaacgttggggcttttgtgattttcattttgtaaatattttgggtcctattgtagaaatgggaaccgtgaggtaattaaactttaagttgaagaaaagaggccaggaagctggactattaatattgcaaaattaggctttagtttagatgtattttattgatttcagtgctggttggctatgtgtggtacctacataggctgtctaccagaggccatgcagtaggctactttaggaaattgatttgaaagctccaccataataagcttgatggagaaggaggtgacagttttgaatttcgtagtggaaatcgtaaaaggtttgctgttataaagagtctaaatctgaaagttctgagagcagaaatttgagttttgtaatattttcttttctttttcttttttttttttgagatggagtctcactctgtcgcccaggctggaatgcagtggcatgatcttgactcactgcaacctctgcctcccgggttcaagtgattctcctgtctcagcttcctgagtagctgggattacaggcgcgcaccaccacgcccagctaatttttgtatttttagtagagacggggtttcaccatgttggccaggctggtcttgaacccctgacctcatatgatccacctgcctcagcctcttatagtgctgggattacaggcatgagccactgagcccagctgtaatgttttcaaagttacagtgaattgaatatatgcaaataagagagtgataggaaatatatgtggggtttatcataactctatacacacgcaacttaagtgttcaaagtcttctttttttttgagatggagtcttgctcttttgcccaggctggagtgcagtgacgtgatctcagctcactgcagcctctgcctcccaggttccagcaattatcctgcctctgcctcccgggtagctgggattacaggcatgtgccaccacgcccggctaatttttctatttttagtagagacggggttttaccatgttggccaggctggtgttgaactcctgacctcaggtgatctgcctgccttggcttcccaaagtgctgggattacaggtgtgagccactgcactgggtccaagtgttcctttttcattatttatcctttcactaaccttaaaatataaaacatctcaaaagtgattagggtgtactaataggtagcagattcagtgtggatttgtgaaagtgatcaagggtggccttttagattggtggcaagtaggacaatcatgttcttaggtattccgaggagctcctgtcatagagattcctcaatgaacagagcatggcgtgaccaagtgaggcatgtcttaaattcatgtaatgtaaaacatgagcaagtgtggctgtcctgatttcagtctttcctggagcttgaagaggttttcattttgaaggggtttcctgctgtgatatagtctgcttgcagagtaagactaagtagagagttgaaatgtaagcaaaacaaataattaatcaaaatactgtagggtgctatcaataaacgtgaaagcaagctatgatcattatttatgttgtgagctttattgcactagtaaggaagttaagttttgagatattgacatacttctcattctagaattgttgcagttactacaacttgattttaaatgggactatattaaaatgggccatattaagtgttttctgtacatataggcaaccctctgtatctgtggtttcacatccttggattcaaccaatctcaaatcaaaaatatttttttaaaaaattggctgggcatggtgattcatgcctgtaatctcagcactttgggaggccgaggtgggtggatcacttgaggtcaggagcttgaaaccagcctggccaacatggcgaaaccccatctctactttaaaaaaacacaacaaaaattagccggacatggtggcaggagcctgtaattccagatactcgggaggctggggcaggagaaacagcttgagcccggggggtggaggttgcagtgagccaaggtcccgccactgcaccccagcctgggtgacagagcgagactccgtctcaaaaaaaaaaaatttttttttaattaaataaaaaatgagaatataacagtaaaaaaaatagtaaacaactatttacctatcatttacattgcattaggtattatactacaccattgtatataagggactcaatctgctggaatcttagaaccaatcccctgcagctatggagggacgaccatagctttttagtcatagagcataatgaaattaatgtacgtggaagtaacctaaaaatattttattattcagaataagtgtgtgtgctgtttacacttttaaataaaatgctttcccctcccagtgtcattgaggtatacttcacaaatagtaaaattcactcattttaaaggtacagtttaatgagtttcggcaattgtatttggttgtaaacactactttttgtagaatgatcttacttcacacaactgtatcaggtaggattctttgtaagcaacacaattctggctgttttcagcaggaaaaagaggtttattggaataagtgaattacaatctgaacagccaggcctcaagagggataagagccaagtggtgctggcagaaatgggtccatgtggagctcagccatgtgaatccctggatttctgggtgtttctcatttcctgtctctcctgtaattccaattcctgagtaaggaaatccgaccggacttgtgtgcttctgtatagatctacaagatatagattgtgggagggagacggttctctaaaggatggcctgctgatcaaaagtaaggacattcagtacaaaaccatctagagaatctcttggtttttagctgggtgaataggaaggcttactttttagtctgcataaggctgatgacccagaaacttagaggtaatatttatagctaatcagatattgaacatttactatatgccaatcgctattttgagtactttatatatattatctaatttaataagtggtttgacattcccctccattgcaatttaaattctgtgaaggtaggaaggtaccgattgtctcgttcttgcttattggtatatttctagtgcctagactggtgttagaaacatagtagatatttagtaattatttgttaacgggacacgatggtgttaggaacatagtagatatttagtaattatttgttaatgggatacatatttcccctttgacggctggatgtagatttagtgataaggagacatgtttttgttttttgaacaagattttattctcttgcccaggctggagtgcggtggcatgatcatggctcactgcagcctaaatctcccgggctcaagcagtccctactcctcagcctcctgaatagctggaactgcaggcacacaaaacaccgtgcctggttaatttttgtattgtttgtagatggagtttcaccatgctgccctgaggctggtttcacagcctgaccagcgtggtgaaaccccatctctactaaaaatacaaaaattagccaggtgtggtggcacgcccctgtaatcccagctactcaggaggctgaggcaggagaattgcttcaacctgggaggcggaggtatcagtgagctgagatcgcgccactgcactctagcctgggtgacagagcgagactccatctgaaaaaaaaaacaacaaaaacacaaaaaagcctgtctccttgccccgtgtggtggctcacgcctgctggaattacaggtgtgagccaccgtgctgggcaattaaatgacctcttttaatgaagtagaaagaatatggagatttggtttctagttctgtactgctttttcttacctgagtgaccctttataaatgagctcctgttggagcagtgtattattgtggttgtgaggcttagagaatattgggggcgaaagtacgttttgatacagtgttccaaacttctttatttctgtgagggatagctcttcttgttgctatccactgcatcagatgggattaggttcaattaagagcatcagaaaaccccagataaccagttttttttcttcatgtaaaaatgtacattttgcagtcatagcttggtatagtggacctgctttatgaagtcctcaggaacccatgctcctttcacttcacagcttggcaatccctaggatgtggcctcatcctcatggtctagagctagggttcccgaacctcatgctggggactggtaccgatctgtggcgtgtgaagaaccaggctgcatggcaggaggcgagcagcaggcgagtgagcattcccaccttagctccacctccggtcaggtcagcagcagcattcgattctcagaggagcgcaggccctgttgtgaactgcgcatgcaagagatctaggttgcacgctccttatgagaatcgaactaatgcctgatgatctaaaatggggcagtttcatcctgaaaccatcccccacacccttggtccgtggaaaaattggcttccatcagccaattcacggtccagtccctggtgccaaaaaggttggcggctgctggtctaaggtgttgtgaattccaggcagctggttatccgaagggtcagggggccaaacttgactagcagcctttttcctgtaaactgccataccatacttctgccaacatccctttgtccagaatttagtcacaagaatttagttgcaaggaaggcaaggaaatgtagtctttattttgacagccacatgtttggttaaaaattctgttactcttggctgggtgcagaggctcacgcctgtaatcccagcactttgggaggctgaggcaagcggatcacttgaggtcaggagtttgagaacaggctggccaacatggtgaaaccccatgtctactaaaaatacaaaaattacctgggtgtggtggcgcacgcctctaatcccagctactcgggaggccgaggcaggagaatggcttgaacctgggaggcagaggttgcagtgaaccaagattgtgccactgcactccaacctgggccacagagtgcgactctgtcttaaaaagaaaaaacaaaaaacgattactctgaaagaaggggaaaatggatattatgggcaactagtatactgtgttcaaacactcacaaactgccccaggagagtaattgtcttgtttagctgatccttctgggaatgcattttggtgtccctgcaaattgccttctcccaaatttctgcagaccaatcacagcgtctgtgaaagccatttaccattgctgagggaaaaggttgtagaaaatgctaaaaaaaagaaaaaatcacaagagaattatcaccattgtatagttatctgttgatgtgtagcaaaccattccaaaagttcatggtttaaaatagtaacaatttttgttcgtcgggaatgtagtgagttagaaaggtcttctgccagtctcattgggatccctcatgtgactgcattcagctggtggctagttgagactgaaagatccaagatggccattttaacagatctggggccttagctggattgactggaagtctggggcacttctcttatacttggcctcattctctttctaagtggtctctagaccaagcttccttatatcttggcgtctggctctcgagagaatggaggtgtggcagtggcatagcaaacttacacagaaatcttttggtcaaggcaagtcatgacaccagcccagagacatggggagaggggaaatagactctacctcttgatgggaggagtgacaaaaaatgtgtggccatcttcaatccactgcagtccactattttcctgatacaaaatatgtgatgtctatgtgttcctagaagtctgcctagttgattcttagctcacttgtgttttagaagctccattcttgattgctcaaaggaactcacaggaggaaaattattctctaggctgcaaatactgatgatctgagtattttcattctaaagagctgataaaattaagctaagagtcagattcccatgtctaccgagaagacaggtatctatggatatcagagatatctcttgatggcttgtgattttgagcatctttccatatgttattggatatcttatgtaaaaagtctttttttttcttaatgattagttttttattctggatatgagttctttgttggatatgtattacaatgatctcttgccagtttgcttgacttttcacttaagattaaattaaaaaaaaatttgagctggtctcagtggtgcccacatgtagtctcagctactcaggaggttgaggtaggaggataccttgagcccaggagttctgggctgtgttgtgctatgctgattgggtgtctgcaacgccacccacagtggtgatccagtgtcagcactaagttcagcatcaatatggtgacctatcaggagtggaggatcactaggttgtctaaggagggtgaactggtccaggtcaaaaacagagcagatcaaaactcctgtcctgatgggtagtgagatctctgaatagccactacactctagcctggacaatatagtaagacccatatggaaaaaaaatttcttttgaaataatttcatgcttaaaaaaactcacagttgcaaaaatagttttaaaaattcctatttaacctctgcttggatcccctaagtgttaaaatctttataactataatacaatgatcaaaatcaggaaataaacattgatttactaattgtccctctaatgtcctttttttggtccaagattcaatccataattgtatgttgcatttaattgttttttgttttttttttgagatagagtctcgctctgtcatccaggctggagtaccttggcctgatcatagctcactgcagcctcaaattcctgggctcaagtgatgcttccacctcagccacctgaatagctgggactgcaggcacattttattatgtcaggctaatttttaacttttttttttttttttttttttgtagagatgggttctcactatgttgcccaggctggtctcaaactcctggcctcaagtgatcctcccacctcgtccttccaagtgctgggattatatgcatgagccactgtgcccagctgcatttaagtgttttgtttccttagtttcctttaacctggaacacattctcagtctctttttgtgtttgatatccttgacacttttgaagagtactggccagttattatgtacagctctcatttggggtttgtctgatgtttcctcataattaatttcaagttatgtacttttgagcacataagtgacatatgcttttcaatacagtgtattagaaagcacatgatgttgatttgtccatttttggtgatattaactttgattgctcgttggtatctgacagatttcttcactgaaagggttatttttcccattgcaattaataagcatcttgtagggggtcctttgaaattttgtacatatattgtttctcatacttttgccccctaattttggcatgtgttattgattcttactgaaacagttattattgtggtgtttgccaaatggtgattaaaaaatatcccttatttcttctacatttagaagaaacaatttgtagaaggaacaatggaacttctattgtgtaaaatcctattgtacaaaagagtttcccatttattcatgtatttgattataatttatttatatcagtatagattcttaatttattcttttggttataatccattactgttgttattttgtcactctaattgcccatatttggtgattaggagcctttatgttcacttatattccttttgacatgtcctctttattttttgagtgctttctactttctgacaccacagtatctttcagttatatacaacatattttatatttcagtacaatatgttatttgtactctgtctgcttcagccttaggatacataaatttttatttagatatatgattttatttctcttaggtatatatttagaagtagaatttctgggtcacatgtgactgtatatttaactattgaggactgccaaactgttttccaaagtggctgcaccattttatgtgcgcacaggtggtgtatgtgggttccaatatttcacatccttgtcaacatttgttgttatctttttgattatagccaagttgtgaagtttttgattggtgttttttctctttttttttttttttttttggacatagagtctcactctgttgcccaggctggagttctgtggcacagtcttggctcactgcagcctccacctcctgggttcaagtgattctcctgcctcagcctcctaagtaacagggattataggcatgcgccaccaccaggtaatttttgtatttttaatagagccaggatttcaccatgttgacccaggctggtctcaaactcctgacctcaggtgatccgcctgcctccgcctcccaaagtgctgggattacaggtatgagccaccgtggctggccaattggtgttttcttgatggctaagaatattgacatcttttcatgtgcttatcacttcttcattttgaaagatattttcactgggtagaattctaggttaacagttattcttctagtgctttgaagataatcttctactttattccctttctgggatgcctattacagacaagtgctgcataatgatgttggtcaatgactgactgcatatatgacggaggtcccatgagattataatggaggtgaaaattttctatcacctggtgatactgtagttgtggtaatttcatagtgcaaggcattactcacgtttgtggtgatgctagtgtaaacaagcctgtgctgccagtcatataaaagtatagcatatacaattatgtacagtacgtaatacttgataataaatgacagttactggcttatgtatttactatagttaatttttgtttgtttgttttttgagacagagtcttgctccattgcccaggctggagtgtagttgcctgatcatagcttactgcagcctagagctcctgggctcaagcaatcctcctgcctcagccacctgagtatagctgtgactacaggcacacgccaccccacctgagtaattaaaaagatatatttttgtagagatggggacttcctgtgttgcctaggctggtcttgaactcctggcttcaagcgatctctttgcctcagtctctttgtgctgggattacaggcattagcctccatgcccagcctatactgtaatttttatggttactttagagtgtactctttctacttataaaaaaaaaaagtaactgtaaaacagccgttggcagttccttcaggaggtattccagaaggaagcattgttatcataggagatgacagctccatgtgtgttattgcccctgaaaaccttcctgtgggacaaaatgtgtaggtggaagacagtgatattcatgatcagactccatgtaggcctgggttaatgtatgtgtttatgtctcggtgtttaacaaaaaagtttttaaaaaaagcacacattttaaagatataaaaaagcatatggaataaggatataaagaaaaaatatttttgtacagctatacagtgtatttgtattttaagctaagtgttattacaaaagagtcagtaagttaaaattaaagttgataaagtaaaaagtattggtaagctaaggctaatttattgaagaaagaaaaatattaaaaaataattttagtgtatcctgaatgtacaatgttcataaagtctacagtagtgtgcagtaatgtcctaggccctcacattcactcaccatcactcattgactcacccagagcaccttccaggcctgcaagctccactcatggtaagcgtcctatttcacttttatatgtatttttactgttccttttctatgtttagatatatagtacctgccattgtgttacatttgtctacagtgttcagtacagtaacatgctgtacaggtttagcctagaagcaataggctatcccatatagcctaggtgtgtagtaggctgtaccatctaggtttgtgtaaatatactctgtaatgttcgcacgatgatgaaattgcctaaggacccatttctcagaatgtatctccatcattaagcgatgtatggctgtaaatgcatgttcttccctagatagtatcctgctgaagctctggttatttctttctccagtctttttctctctttgtgcttcatttggatacttttattgctgtcttcaaggtcttttgcttgcagtgtccaatcttctgttaatcatgtccagtgtatttttcatttcaatttcattttatttcaaatattgtatctttttaacaataattttatttggatattatgtgtttcattttcttcctcactgtctttatattagcttttatatccttaagaaaaattttaaaagatttgtaacatttattttaaggtccttttatgctacttcatctctcattactatatttgtatttactgacttttatcctgattttggtatatatatttctgcttttttgcatgtcttataatttttattggattctatacactgtggattttatgttaaatgctaaatattgttgttttcctttaaagagtgttggacctcggtatggcatttagttatttatgtatcagattaattgttttgagtcttcttatgatggattaatatgattttgtgctctggtgctacttaagccctagtactaagacttgacccttttgaggactctatccaaattcccttgtattacaggatctctccactgtggctcataggaatgtgaactgttccaatctccatgtgagccctgagaactgttcatcctactctgtttgggtggttctttccctggacttgtagtgattgaatttactcatgcgcaaatcattacttagctgcgttcttgaggggaccctctgcagctcttcagagcgttttctctgtgcagctcccacctttctagtatactctcccataaattctagctgccttggcctcctaactctcatcttagtctcttcaacttggtgtgactactgggttctgttggtttcccctcttggaatggtgactttgaaagcatcagtaggcagtaagctggagcaattgtagagcttagtttatttgttattcttctctcagggaacacagtcctgtgatgcatattgtcctttgtgtgaaaactattatttcatagatttttgtctggttttctagctctttgtagcaggagggcagttcttgtagcagaggggaagcaaaactccccaaaaccattttaaatgaatttaaatcttactgtctgcttgtcaatattccagaatgcctgttctttcatagaaatctatgatttgggacttatttactttctctttttaatatgttctgaatgatctttttgaataacagatctgttttcctaatcactctttcctagtattcagcagtaactgtgtgccttagaggtacttcatagattaatgggttttacgttttatttatttatttttttcccaagacaaagtctcgctctgttgcccgggctggagtgcagtggtgcgatctccactcactgcaacctctgcctcctgggttcaagcaattctcctaccgcagcctcccacgtagctgcgattacaggcatgtgccaccatgcctggctaatttttgtatttttagtagagatgggctttcatcatactgaccaggttggtcttaaactcctgacctcaagtgatctgcccgcctctgccttccaaaatgctgggattacaggcttgggctaccatgccccgcctagttttaaaattttaaatgagtttctttttcagaattctaatctagtctgtattgctgtatcaccacataatttcaaataatttttttttttctccttaaggtacagttgagggctgggcatggtgactcatacccataatcccagcactttacgaggctgaagctggcagattgcttgagtttaggagatgaagaccagcctgtgcaacagggtgaaaccctgtctctacaaaaaatacagatattagccaggggtggtggtacgcacgtgtagtcccagctgcttgagaggctgaagcgggaggatctcttgatcctgggaggtcaaggctgcagtgagccatgttcatgccactgctctccagcctgggcaataaagtgagaccctatctccaaaaaataagaaagttaaaaaagaaattacagttgacccttgaacagctcggggattaggagcactgacccctggcccagtcaaagatttgtgtgtaatttttgattcccccaaaacttaactactaataaccaactattgactggaagccttaccaataacataaacagttgattaagctatattttgtatgttgtattattctatactatattcttacaataaactaagctagagaaaataatgttattaagaaaatcataaggaagagaaaacgtagctactattcactaagtgaaagtggatcatcataaaggtctttgttgtcttcatgttgagtgggttgaggaggagaaggaggtggagggtttggtcttgctgtctcaggtggcagaggcagaagatagagaggaagtggaaggagaggaaggaggggcaggcacattcagtgtaaattttattgaaaataatctgtgtataagtggacacatgcactttgaacatgcatttcaaaccagtgttgttcaagggttaactgtatttgctttactaaaccacagactttatttggatttcaccagttttcccactaatgtcctttgtcttttccagtgttgaataccatgttgtgttttagtcttcatgtctcctatctcctccaatctttgacagtttctgaatgttttatttttcctgaccttcaaagatttatttttgaagagtactggttaggtattttgtataatatttatccatttgagtttgatactttttaaagaaattatggtaataaacacataatatatggccacgcacagtggctcacgcctataatcctagcactttgggaggctgaggcaggaggatcacttgagttcaggagttcaaggccaacctggccaacatggcaaaaccccatctctactaaaagtacaaaaaattagctggccgtggtgtcatgcacctgtagtcccagctactctggaggctgaggcatgagaatcgcttgaacccaggaggcggaggttgcagtaagccgagatcgtgacactgcactctagccgggtgacagagtgagattctgtctcaaaataaaaaatgtaatatattatacaatttaccatcttaatcgttttttaatgtgcagttcaattgtgttaactgtattcattgttgtataacagatctctagaactttttcatcttgcgtaactgaaactgtatacccattgaacaacttcccatttctctttccccccagcccctggaaaccaccattctactgtttccatgattttgactactctagatatctcatataagtatattcatatttgagtatatgaatataagtggaatcataaagtgtttatacttttgcgactagcttattttactcagcatagtgtccttaaagtttattcatgttgtagcatgtgacaggatttccttctttttaagggctgagtaatgttctatcatatgtagataacattttctttatccattcatctgttgatggacatttggttctacctcttggctattatgaataatgcatcaatgaacatgggtttgtaaatatctctttgagatcctgctttcaactcttttggatatatacccagaagtgagattgctggatcgtatggtaattctatttttacttttttgaggaacctcaaactgttttccgtagcgtctataccactttacattcctaccagcagtgcacggagttctaatttctctgtactcttgccaacacttatcatcttgtttttttgatagtggccatcctaataattgtaaggttatatctcattgtggttttgatttgcatttctctagtgattagtggttgagcatcttttcatatttttttagccatttgtgtctctttggagaaataatctgttgagaacagacatttctctaggtgtgatcattgctgctgaagtgttgctgtttttaggccttcttctccgatggaagtagaaaatatgtaattatactcacccatgtatacatggattggcatttatttctgtcatcttacgtatttgtgtatctatcagatagatgcttttaacagtttagttatatctaattgaaaacattttgaaagaactttctacttcttttcccatgttttggatggatattatatataaatagttaattcagaatgctgtgggaatttgcactggtatccctacttcccattacatgctgcaattttgtgtaaagttttacataaaacatctattcagtcagattgacttaacagagtaaaatagtaatttccaaaataaagtatgtaggtcctaagtctagggggcatacatttagtctagtcactgtgttttttttcttttaatgctatctatcattgctgaaataagttatgtaaacccattcttgcatgagagaaattcctacaactttgaatctttctcctgcttttaagctttaatattaacctcaagggatctaggggtgcgtgtgtgtgtgtttaaaaagttctcattttacaaaaagcatatgggctttaacacttcaggcataggccaaaactttcaaattctttgctttcgcgaggcttttcttaatagatttgaatagatcaaaatgtctttagttgccactgaagcctatagtaatgatccttagaaatttttctttttccttcttccttatttctttttactttttttatacctgcaaagctgttagaagctacagatgacttgggtttcacgacatttaatattcatctaaaatgagacagtctgtgaatatggatatttgtcttctaagtttagtttgaatgtatgtaagaattttttctgcctaaggaattttcttttgctatgttttaccatataatatgttttaagggatacattttaaaaaatcacaaaacatacttatttttgtccaggtagacgatataaaatactgtacacagtaatcgccataaatttgaaaaaaactccataaacaacctatggcctttttagaattgcagctgactgtggtaatagtaatgagcagtttttaaactacagtatacgaaaatgcaatagcattttattttgtcttcataacgttaggcccaagtgtcctataaatgtttaaattaatagatttaaattttgtcttaagtacttttattacaacattattctgcaatatttccattgtaggtatacaatattttcattacattttagataaataaggattcctggactgttctggcaacttaactatcactctttattttaaattttttcatggagaggggaagaaggaatggagagtgggccagtctgtgttaccaattacttgagtaggcttttgtagttttctcttgaggaaaatatccccagtgggaaaactggtggtgtgcctgaggttctccaagtttcctccaaatgttttgctggtttctttctccttcagcatcagctttctatgtgtataaagtctggatccttgcatccttcttttgcccagaatgggcacaggtccccagggtaaaagtggctgtagaggtcaaatcacttcttccaaattttttgttttcattttcagaatcccagacccttcaaacagatgccttctgtatcctgcattttagatggcttttctagttctggttgggattgttggactgctgttagcttctacatctcatccagaaggagaagtttctcacttacttccagcccccagatgacctgttgaagaaatctggtttttagtcttataaaattttccagagtctggattttattgactttatccccatggtatcatttaatatgttcttctgtcctctatatttcctgtaaactagcagtaacatgtaaagtgttggtcagattaagatgacagatgatgtatatacttctttcaggaggtactatttttttctcctgtttttgcagcactaactgtcattggtaattattaccaagatccattaatttgttaggggatgcagaatggtgctattctaagtttttattctttcctcatttattggctggaatatgtctataaagtaattttcttttcataactattggttattctgaaagtacagtttctataggaaagacacggtaaccactttaacagtcttcaaagagttaatcacctagcattcttaaaagatggccactgtgagtttaaaattttgttttggattttactctgtatgatatttggcaccgtattatcatattttattttttatttttaaaattttatttcttttttcattttttaagacatgaatgataaagtgttatcacattttttaaaaatgttaacgtgagtgggctttctctgagcacgtattacttgatagcagtcaaatgattagaaaagtagtgactagtttattccatattaatagatattatattttcttgatttaagtcataccttgaataaaattcacattttgactttcataattcacaattctagacttaccagtaatccttacatactaatgattagaaggcagttctgagtgccaacctcccatttcctatcagataccagacatttagcatctctttcccaattcagagtttttggaaagtcattgacttaactagagacatgacttctacatttcatgctagagaaggttttgttaggtatggatgaagtgatgctggtacgatcaggtatattatggaaaaaaaatagattttgtagtatgacatgaaactctaacttataacaaagattctttgagaacatgcttttcaagtttcaaatagactgtgatggggaaataacctaattataagtcatgagctgccgctttactgttgtaaatttcattcacttctgttagtaaaaaatgtattgttcctttttccctctctttgtagattggttttatattcctcatggatcttatttgagcattgaaattagagtgagataaatttttcttggtgttaacctaagaattgattgaaattgcttttatttgttttaggaaatctactttcttcaatgtgttaaccaatagtcaggcttcagcagaaaacttcccgttctgcactattgatcctaatgagagcagagtacctgtgccagatgaaaggtttgactttctttgtcaataccacaaaccagcaaggtaagagatattttatgctatttatttggtgattttgtgtagattgggcagatgtttaaagtcatatagaagagtttttcttttaaaattaatgtagcattattgttttgggtgattataaaagtcatgcagagggctgggtgcggtggctcacacctgtaatctcagcactttgggaggcccaggagggcagatcacaaggttaggagtttgagaccagcctggccaacatggtgaaaccactgtctactaaaaatacaaaatttagctgggtgtggtggcaggtgcctgtaatcccagctacttgggaggctgaggcaggagaattgcttgaacccaggaggtggaggttgcagtgagccaagttacgccactgcacttcagcctgggcaacagagcaagactccgtctcaaaaagaaaaaagtaatgcagagtatggagaagggtgtagaagggtatacccagttgttaacattgcaattatttttttctggggagtataaaatggagtaattagtctgtattatatgatctcgttcatgtaaaactaaatgtgtttgtttatatgcataaaaaatgtatgaaatgatcatagactgatgattatctctgggtagtagaatttttaggtgatttttactttattcttatattcctctatgtttgaatttttttacaataagcatgtattatgtcttcaattaaaaaaataagtaaaactgttttattaggaaaaagtgagatagtttaagttcattgtaggaagttcagacagtagggaaatatataatgagaggggtgaaaaccacctctacttcctctaccttgatataacagttgtaaatactttggggatatatccttccataatttcctgactttgtgcacacttacttacagaaatagaatacttgttttacttgggatattattaatatctttctggattaagcaatacagacttaagtaataatttctaatataatacttatatttattgctatattatatgaatgtagcacagtttaccatttgcttattattgataatataatttgtttttaatattttactatttttaatgtcctgataaatcccaggtttctgtctggtgtcctgaactctgcagaactccagatttctatatctaactgcctccttgatattgacacttggaggtctgaataggtgccttagacttgatatgtccaaaatgacctcttgatttcaccttcttgcaccaaattcttctttaggactgccataactcaataaatagcactgtcatttcctcagttgcttaaatcagtgcccaccatttatctttgattcttctctcccctcaccccgtatccagtcttatcagcaattttgtgagttctaattacaaagtatatactgaactcattcacttttttcactttcacttactagttgtagcatccattgatttttttgatgaattaatttttactatgaggattctcacatggtgattttgtaattctatcattcctccttcatttgttactattgtactgtaaggaaaagctttctcatcttcatctgttcattcatgtatttattcagatgagtgttattttattggttttaatctgtcacaaacattgatttgatgctcaaattatatccctcagattggctcttcaggctgacttcagtgtcctttctaaaacctttttatttttaaatgattttaaatttatataaaagctgcaaaagtacacaagtgcttatatacccttgcatacccagattcttagaacttttgagaataagttgtagacatgtgccatattatacttcggttctttagtttgtatttactaaatacaaagatatcctcccacacaaccatagtaaaacatcaaaatcagggtagtttactatgggattaacactgaccccatattaccatctaattcatagactttatttagattttttcagttgttccaataatatgctttgttgcatctaaaccaggatcatgtgtttgttcagttgttttatcttattttttccttttcttttctttttaaaatagagatggggtcttgctgtgttgccccagggtggtcttgaactgtcggcctcaagcattcctcctgcctcatcctcccaaaatggtgggattacaggcatgaactactgtgcctggcctttcttttctttctttctttttttttttaaagacagaatcttactgtgttgcccaggctggagtgcagtggtgtgatcacagctcactgtagcctcaaactcctgggcacggtcaaatgattctctcacctcagcctcctgagtagctgggactacaggcacatgccactgtgcctggctaatttttaaattttttggagagatgaggtcttgccatgttgcctaggctggcttgaactcctgggctcaagtaatcctcctgtcttggcctcccaaatttgtgccgagccccaccagcctgtttctattgaagaacattaataaggccgtgtgcagtggctcaagcctgtgatcccagcactttgggaggccgaggtgggaagatcacctgaggtcaagagttcaagaccagcctgactaacatggagaaaccccatttctactaaaaatacaaaagtagccggacgtggtggcccatggctgtaatcccagctactcaggaggctgaggcaggagaatcgcttgaacttggcaggcagaggttgcagtgagccaagatggcgccattacactccagcctgggcaacaagagcaaaactgtctcaaaaaaagaacaaaagaaattcctgccaaaaaaaaaaagaacattaataaatgtttttggtagtctgtgttcattacagtatagcgattaaaaatatttttaacatcattttagtctcgagagttctaaagtagtattttattctagaagtattttgttcaagtagtcatgagatcattagtgtaatacatcagaaatccctgaattaaatctcaagttttaattttttgagatattgtattaatagtttaaaccttatcctagccataaatcacaaatcagaattgagaagctcattttctttttttttttttttttttgagacggagtctcgctctgtcgcccaggctggagtgcagtggcgggatctcggctcactgcaagctccgcctcccgggttcacgccattctcctgcctcagcctcccaagtagctgggactacaggcgcccgccactacgcccggctaatttttttgtatttttttttagtagagacggggtttcaccgttttagccgggatggtctcgatctcttgacctcgtgatccgcccgcctcggcctcccaaagtgctgggattacaggcgtgagccaccgcgcccggccgagaagctcattttcaatagaaaatagaatctcagagctgaatatcttcctgtctagtttcctcataaaaagaaacgtgaagcctagaaagatgaaataatttgttcatggtcacacttatagttatgtcaaccagaaatagaactcaaagcttctcacttcaaatttaggccattctacccaaatgcatgctacttactgtacttctgcattagtccattttgtattgctgtaaagggttacctgaggctgggtaatttataaagaaaataggtttatttggctcatggttctgcaggccatataaacacagcaccagcatctgtttggcttctggcgaggcctcagaaagcttttttttttgagagggagtttcgccattgttgcccaggctggagtgcaatggcgcgatctcagctcactgcaacctccgcctcctgggttcaagtgatttcctgccccagcctcctgagtagctgggattacaggcatgtgctaccacacccttctaattttgtatttttagtagagatggggtttctccatgttggtcaggctggtctcaaactcctgaccttaggtgatccacccaccttggccttccaaagtgctgagattacaggcgtgagccactgcacccggacgaggcagctttaactcatggccagaagatgaaaaggggagtgggtgtgtcacatggagacagggggagcaagagagagtggagacaggcaccagaccattttaaacaacctgctctccagtgaactaacagagcgagaactcactcattactatggagagggcaccaagccattcatgagggatccaccccgtgacccaaacgcctcccaccaggccccacctccaccattacgcatcacatttcaacataagttttggaggtgacagaacatccaaactatatcaacttcatatttatcatatgagtggttttagttgttagaaatatcatttaggatgaatttagttgcccttaacacagtgacttaaagagctgatttattgagttagtaacaggtagcacagtgtttagctcagtgatatcatcaaaggcctggcttctttcccctcttcaatttactttatcaacttgaccataaggttgtcttccccttgtggtcacaggatagatctgtgtactttctcatccatgttcagagtgaaacgggattgcttctagaagttctcccagaagactgatgagcttctatttaacagcctcctacaccccctccagtaaacctcttcttaagtcttttcatgtcttttttgttttttaagaggtggagtctcaccatgttgcccaggctgaacttgaactcctgggctcaagccatcctccctcctgcctcagcctcccaaatacttgggactacagatgtatgccaccatgcctggcttcttaagttctttgaggcaattagggcaaggtgaaggtcctagaattgttttactttccctaggaatgcgattaaactgcttagtgaaggccggagctacatgccccacttctagagttaggggtagagcaagcttctccaaagcgctgggctctgctggagaggaatggctaccaaaatgaaaatccgtataggtaccgagagggggcagtggatgctggggaggcagtcactgtgtccaacaacaaaaaactaaccacatttatgtggttttagtggatttggtggtaacaataatcaagtaatttcaatctgtaatacttcatagaataattgttttgaaaggactcattttccatgccaataatagggaagtcttttgtggaacttttatgttgtattttatcaggtagtgaaattgacattctgaaaaatgaatgctcttgaaaattgacaaaggatacacaattacattatatatacctttgtcatatgacattaaaagtagcttttatttattgatatacttaaatctccatttttacatggcaaactgattttcctaacttggtttttaactggtgttaaatgtgcctttatttagcaaagcaaaggttattttgtatatagcctaatttggttgctgttatcaacagctaggttattactatgctgataactggttctcagcattacacgctttttttttttttttttttttttgtctatataacatgtgggtgatcaaatgcaaacccagacagcctgtgtttgaatcccagttttgtcactgctggctgagtgatcttgaatacaatagatttcgtaactcctctaaggcataatttccttatctgtaaagtgggcttaataaatagcatccatcttatagagttgatttgaactttgaagtgagataatacatgtagaatacttaatttagtgtctggcacaaagttagttggctcattttatgatgattacctcagcatactctaaacattcttcaccgcttttgagtgtgtgtgcatgtgccaatagaactttatagtaaaattaatgataagagttttaatttcagaaacacgataaatacatttattctgttttagttttctcacttattatcctaggtaagaaagtccaaatgtattacaaggccatttctaattttttttggggggaggggtggatattcatttatcaaatcattattgttccattgttctagaaaggaaagaatttatgtgaaatgtttggagaattcatttggttgatagataagtttttagtactgttttataataaagccatcttttgtttttcagcaaaattcctgcctttctaaatgtggtggatattgctggccttgtgaaaggagctcacaatgggcagggcctggggaatgcttttttatctcatattagtgcctgtgatggcatctttcatctaacacgtaagtacagttgtttatttaatcattgatttcattcagatcagtgttttctttccattagtgcacaaataaaattagaaatgactaatggaagattgctttgctttaccagatgaatcttgggtttgtctgtaaatctgtgactttaatgttacttagtatcatctccgtatctgaaggcttattccatagcaagtatatgctgcattgagattatattctaattgaactttattccctgttctggattagagcaatcaagaagtgtttctatatggaactttgttcattgtaaaggcattctgaaattatcttaaattgtggaactttattgcttttctgtgtgttaaggaggcagaattgttagagaaggggattctgattatttaacaacagagaaaggcttctgggttatctattagagatgaaaggattaaagagaaactatagatcagctagtccttatggagagaggaatataaaggaaagagaaaaaataggactgtggcttagtttgggctctgttgactgactataaaagtgagccaatcacatagtaattttctgacaaaatagagtttaggttaaggcttaggtcaaggctgtactttgtgttaatagtattataatgagcaaattaatagaaacaagaaaacacaagttagaggtgagagggccagctgtgtctggttaagtgcatttgtttctggtcctcaactagataactatagtaactgagagtaagcatttagaaaatatagcaatttgactaattttttggtcatttgaataaagtaataataaaattctgccggtactttttgtgtgccttttataaaacaccatttacctctgtggtttgcataagctggctagaaaaaagatttgtttgcctagaatcaggttggtgcaaaagtaattgcaattttgccaacataatgcccaaaactgcaattacttttgtaccaaccatataattcatttgtattgtattttacaaaaccccatgacagacaatttgagaagcattgatctaggtagtttaaatttgagtgaaggtatggtgagacctctgggaagtctagataaaagaatgaggctgtgatggggaagtgatccagttttgtagagaagttttaactaaagcctgtacattggcagaacgtctgttttcctgactggttttcttctggttttggtgactgatgtgaggatttcatagagaaggtagagtgaagtgtgactcctggatttctggaccaggtcacttgaatgaattgtgataccatttgttgaaacgttaaacacagaaaaagcagcaagtattgagagagatgatgatgagttcagtttgggacaatttaaaaaattttgtagttggggcatcctgataggtgtctgtcagaaagtagaattgataggacacacgtgacagaaggatcggggcaagagaactgaagatttgggtatgagaaagtgagttgatgggtggaaaagaacttaaaatagagtgggagtgaaaataggagagcactgaaaaatggaaggcttatggatctgattccctgataaggtttcagaacaggtaggttgagtgtaaggctgtcgtgtggttagggagggatatttgacttaaaattttccaggctggagcaatttaggatgatggtaaggtcctgatgatgttggtaataaaaatatctctggttttgttgtttcttacataatattcatttgatgtgattttctaacccttgtggggggggaaatgaatttggtgaggagcatacatactatattgtatttaagtcaggctaaagataccatcattaaggaaggaaagaaaatccaattaaagtagatactatgctctcttagtatgattgatctcagaatgtgaaagtgccaaaatacgcatcttagaattgatgaaatacagtgtatatatcattgtatagtacataaagcactgaatgatacatttataatcagaattttaaaaaaatccttagatttatagtcagaaaaaaagacttgtagagattagaaagattatggattactttgaggctatgaaaattgataattctttaatttcaacagtcagatatatgttagtgtttagagtacttttcagctttctattagaacatccgaaagttaggggacagaaaaaattgttaatgagaagttttagtttatcactgaattttaatttattaatatcatgtttctctccattaatttgattaatttttaaaaattaacttttgcctcaccttgtttacttcccttggctattagaaatatgtaaaatatatacattgttgcaaacacatatacttgtttaaaatgcaaatactcatcttggtggatttgctttggctttaaatctttaaatcactctatcttattcatttgactgatttgactcttataagtgtgctagatgctgagggatgtattggtaagtaaaaacagatgtgaccatttttctcatgagcttataatacagtggaggatacagacattgaataaaatggtcacataaatattagatgtctttctagttgtgtacaaggagaaaggaatatgtgtgtgagtatgcagtgttaccttgaggaggtgacagtgatgctgagaggtaaaagctgaatgggaactaagttagcaaaaggaggaaaggaaagattattattcagagtaaatggtttgtttcaaggccctatggtagaaaggagcctgctgccttaagaactgccatggtggttagaatgaatgatgaggagtaggagcgatggaaaagagcccagggatatagttagggatgtgattaagttcaccatattaaagatatccatctcaaatggcttaaatctaaaggattttatttatttatttgagatggagtcttgctctgtctcccaggctggagtgcagtggcatcatctcggctcactgaaacctccacctcccaggttctagcaattctcgtgcctcaacctctccaatacctgggattacagaggcacaccaccacaccaggctactttttgtatttttagtagagacgggatttcaccatgttggccaggctggtcctgaactcctcacctcaagtgatatgcccacctcagcctcccaaagtgctgagattacaggtgtgagccactgtgcccagcctaaatataaaggattttaaatggacagttgaggtggggatggaggcagatgaaattgttccagtagcttattttgcaattacagtattcagttgagttgcacttttaatgttttaaccaatcaaaatgggctgagcacggtggctcatgcctgtaaccccagcattttgggagactggggcaggcagattgcttgagttcaagaccagtctgggcaacatggttagactcctgtctctaccaaaaatacaaaaaattagctgggtatggtggcatgtgcctgtggtctcagctactcgaggctggattgggagggctgcttgagcctgtgaggcagaagttgcagtgagccaacattgcgccactgcactccaacctgggtggcagagtgagacccatcgcaaaaaaaaaaaaaaaaaaaaaaaaagggaaataaaatggagtaagttgccaatagtttgaattttcattttgtataaaactatatttccaagatactgataatgatttccctagatgatgtatgagcataaacaatatagaatacttagaatacttttttttttttttttaaagagtcagggtcttgctatgttatccgggctggtcttgaactcctggactcaagcagtcctccgccttggcctgccaaagtgctgggattacagtcatgagccaccgtgtccggccagtaatgtgtaaagcttctttcacacacaacatgtatttgcccaggtgtggtggctcatgcctataatcctagcactttgggagacctacgcagatcacttgagcttaggagttcaagattggcccgggaagcacagggagaccacattgctacaaaaaaaaaaaaaaaaaattagccggccttggtggcctgtgccttgtagttccagctacttgcgaggctgaggcaggagaatcacttgagctcaagagttcgaggctgcaatgacctgtgattgcaccactgtactccagcttggatgacaacaagatcctctctctaaaaaaataaaaaagattaaaagaatcaatacatgttacttagtttgtttacccccaaataatgtcccctcccacccctggggtttgctgcctaatgtaaaggtatttcagatccttacccccattagtcatttagagttttcgctgaagttttattttcagtaggtttgtttgcaaagtgtactaatgaggacatgcaagatagtagaaataatgaaagattattttcttgtttgaatatgtgcagatctggagttactgtagttttttaaagtatatttttgaagttactgtatgctaactcgtaactatggattcagctatataaacgggagtttatctttcactaaacaagtgctgctgaggtgaaagttaggtcttattttgacacttaataaacataacaactgtcagaatttgcatgaggaattacaagagctcatcttttaattctggtggtttttttttcatcaggaaagctttgtgagaagtgtttttacagtacaaatgaatgtctgcttattaaatttaatttgaaaacagaatcagtcttcatttatcggagggtcacttatttttcttgccctagtttaaatccttggaatacttttccaaaaaaatattggttcttcattgatagtaaggagctgaaaaaaaaaattcaaagccagttgcagtggcacatgctggtaatcctagctactcagaaggctgaggcccgaggattgtttgagcccagtagttgaggttgtaatgtgttatgattgtgtctgtgactagccactgcactgtagcctgggcaacacagggagactttgcttctttaaaaaaaaaagaaagagaatactgattcaagaatgacctaataatctgctgtctaggtgaagcttcacatatagctaattgaagattctcatcttgtgtgtaagcccagtttgcagcaaatgtggactaattttatatagcaggtagatgcagcattaaaaatttttctatacacaataatatggatgaatctcaaaataattatgctgagtggaagaaggcagtccaaaaaaagagcgtatactatgattccatttatataagattctagaaaatgcatactaattagaaagcagatcacggtagcctgggggaggggcagagagagggattataaagggctgtgaggaaactcttgggggtggtggatatgctcataatcttgtttgtagcgatggtttcacaggtgtatgcatatgtcaagacatgtatacatctgactgtacactttttgcacattttgttgtatgtcactttcacctcattaaagcaaaaaaagtgggaaagaaaacttttcttatacttttccttttaggggagctttgcttgtactctgtttcagcactgtaagcgttggaaataatgtcatatttttagataataattagcaggttggtgcagctatttgtattgatttaaaaatgaaaatagggctgggtatagtggctcatacctgtaatcctagcactttgggaggctgaggcgagtggattagttgagcccaggagtgcgagagcagcctgggcaacatagtgagatctcatctctagaaaaaaaaattgaaaggaaaaataaaacctgattatttttgagccttaacattttatgaagaactttgggttttggtgcaattgtagtgaaattatttctctctgatacatcagtcttggaagtacaaaatattttcagttacagaatttgttaaacttgattccaaaatacagttgacccttgaacatactggggttaggggagctgacccttgcacagttgaaattcggatataacttttaactccccaaaaacttaactacaaatagcttactgctgactggaagccttacaagtaatataaactattaacacacatcttgtatgttatatatttatattctatattcttacaataaagtaagctagagaaaagaaaatgttttcaagaaaatcatggccaggtgcggtggctcaggcttgtaatcgcagcatttggaggctgagggaggaggattgcttgagtctaggagtttgagaccagcctggtcaacatagagagatccacatctacaaaagataacattagccagcattgtggcgtgcacctgtagtcctagctactcaagaggctgaggcaggaggattgcttgagcccaagagtttgaggctgtggtgagctatgattgtgccactgtactccagcctgggtgacagagtgagaccctgtcttaaaaataaaaagtaagagaatatgcatttacagtactatactgtattttattgatactgtcatctattcacaagattaattgtttgtctgaaatggcagtaaccccaggtgcagacctcagtctatagtccatatcaagcagttcacctttttcttgtattgtcaatgacttttctcttctctgcttcttgggagcatttccagcatcactaatagcactttgtataggtcccataatgttattttttattttattattattgttttagagatagggtttagctctgttgctcaggctggagtgcagtggtacaatcatagctcattgcagcctggaactccttggctcaagttatcctcctgcctcagcccctcaagtagctaggactacaggtgtgcaccacaatacccagctaattatatatatatgtttttttttgtagatacagggtcttgctgtgttgccaggctggtctcaaactcctgggctcaagcagtcctcctgccttggcctcccaaagtgctgggattacaggtgtgagccacttgcctggcttatgttattcaacatttatagtattgcgaccatgatgaaaaatattaatatgcaggaacctcaagggattactttttacagcaatacacgatttactggagaaatgaactgctcatgtg

SEQ ID NO: 269 - DNA, 9275 bp, Homo sapiens
  source 1..9275: mol_type = other DNA
ttcgcagccgccgccgcgccgccgtcgctctccaacgccagcgccgcctctcgctcgccgagctccagccgaaggagaaggggggtaagtttccccgtctgcccgcttccccggaaccgagccccgcttgccgtcagccccgagccgggccctggcggtgccgggaggggacccatagcccctccggcttagcccacaaactttttggcccagaaatggaggtgaggagcgagtttccctgttccctctggcggcggcggctcccccgtctctcgccgcctcagcccaacagcagcaaccgccgcggcgccgagcctgctctccctcctcctccccgcgcccctggctcctctttcttcggtgaaatcccgcccgccgccccttccccggaccccaaaccttcaccatgacccgcgcgggcctcttaactaccgcccccgggccccagcccccagttttcgagcgggaaaggggtggaaatcgccgccgcttcgcaccctggggtaactcgctttttgctgcctccccacagttgttgctaagcttcaccatcttgtctctcttctctggtcaccgaccatattttttcccccgtttctctcttccccatttcaaaaaagcaagaatttttaaaagagggacgtttttttcccttttttggagaggcggaaacttgatgcatttgaaatgcaaaaaaaacttttgcattttggagggcggcacgtggcaggggataggggtattttcgagcgatttggtgttttgtctctttggaacggaatcggatacgttttgcgattgtttccattttgttctggtcggggagccgagttggttcctgctcgaggcgctgggagcgaggcgggcaggttgggggaccctgtgccgagggacccgaaggaggcaaaaccaaaagtttatgtggtgcttggggtggaccggtcggcggatgtcgtgcgttaattaaagcctgggtgcggggcactttttatttcactgcgaagcctgtgaggactggacgcgaggacggggctttgtagaatgctcgctggtggtagctgttgttcctctcttgttttttcgagacgcctttttgtcaacataactgtaaagatgcaaaaccaagaatattttcagatatttacagcaatccatcaacagtcagacgaagggggggcagccaaagtgggggggagtaagaccttttttttgctgtaatttgactcgaccttccagtggtttgtgccttttttcttttgacttgtttgtggatggaatgtttacagacatttctaattactgctttaattaaataaattggatcaaaggccgttcgaggtatttttgttttgccgtttgtcgctcagaattggcattttgagaggtgattgatactgctaacaattttctagtactctagtttgtttcaagaagagattttgggtagacgtaatcttcaccctttcaaattatataacaatacgaacattattttttatactgatcataatttccagatttggggagggggtgatcgtggcaggaaaagttgtatgtttggtagttgcatatggtgatttttgatttttcaatgctggtaggtaagtaaggaggtctctgtaccatggctcgtacaaagcagactgcccgcaaatcgaccggtggtaaagcacccaggaagcaactggctacaaaagccgctcgcaagagtgcgccctctactggaggggtgaagaaacctcatcgttacaggtattaaaaaacaggaaaaaaatgggacaaagtctctcttgtatgtatccacataatttaacaaaaagatggataacaggaaaactttttgctttagagaaacttttttttttcatttgaacacttaactactgcttaaataaatgtactgtatgatcatttatatataaagttaagtattaggttttattgaaaacgtttaactttgaagccataatcttacctggaggtctaaggagacctcgtatatcactgataatgttaatgggatatattgacattttagttaactattagtaattctttaaaaatagttaagtgttgctttcttgaatacacttttgaggttatctttcctagtttttggcaaaataataatataatcgagattgggtgttttataaagttcctaccccctcatttacttgattagcttatttccttctgtattagctcttttgattgtgaactacctgagccactgtgttgttaagggcatctgccattagagggcagaagttgcctagacttagcctccgcaaatattacgattaacctaaaataaaagctcatacagtggaagaaataagtcagaatgagaggtaaatttcttgctgacaattacttagtaaaaaaaacttttccacgtggaaggaacactgcacaatcgggtgtattcaaatttaatagttgatgaggggtgaactgtagtcagggtagaggtattctgggaaatagaacttgaatgccacaagcagatttttaaatgaagttcattgggttgtgttggtcatctttaagggctcttaagataatagagggtgtagggaaggagagtggtgctaaattgaggggagccaacttcttcattagcctgacagctaataccttcccaaggtttatatacatgaataactttttaaaatgaaaataaatagggctttgatgaatttcttgctaagaatgcattttaatttcatgctttttgctttaaaggtattgttactagatttgaatgttcacatcttaagttgatcagtgaaatttgatactgaagctgaagaattgttgggtggcttattttttgaaagattactgcatttctttgaagctgcccacttacctttttgtgctagttatgtttttggtaacagtttctttattaattttttaaaggcctggtactgtggcgctccgtgaaattagacgttatcagaagtccactgaacttctgattcgcaaacttcccttccagcgtctggtgcgagaaattgctcaggactttaaaacagatctgcgcttccagagcgcagctatcggtgctttgcaggtaaaatggtgggtgggaagactcagagtttgtattcctgttgtgtaccaagaacagttccaaattgttgcatgtgcttatatcatttaatcacaagcctgtcaggtagttgatattgttacttcactgttgagacttcagaaaggttaaattgctcaaggtcatacacgtagaaaatggcaaaaccataatttgaacctatttgactccaaggcttagtgcacattccattataccatttaaaattttgaaacattgcactaaaaacaatatttaaagaaaatcctctggtttggtttatggatgctgcaggacattaagaagaacttgagactagaggtctatatttgtagtaacaatttcaaacaacagtgcctagaataaaagaaatgtctcttcaggtcctgaagaaacatataggtagagagagcttaatacctaggatgggaataggcagtattaaaaaattatgcattaagacgtaaaaggagcagtgagtggaggataggattggattggcaagattgggggaacggtgcttaaaggtgatactggacgtgtaaaggggccaggatttgccttgtggtttcctaaaggggattagggattgccacttacatgtggagcatattgaatttaatcttaatctctagcatgtcaggacttagagaaatactgttctagagatatttatgtatttgagatatttgtggtttaagttaagaccaaaacttgaaattcctacaagatacttgataaaggtatgtagacgtcattaacatcagtcacttaagtaacctattttatattgtgtggttggattctttagttgcaagtatcccagaatacagtaaagctaccacctccatcagaagcatgcagttgggggtcgttaaaaatgctgattgttaggcaccattgcagacctgaatcattctgggggtggggagggggcatccagaatctaagtacattccattggaggattttcaaggctgctgttgctgtgctgggcttttgctttatgtatgagaaagataggataggtggattccaccctgaagtgtaattggtcgagctgtttctatggttaatctaaacttcatttgattggtgaattccaggagtaggcatccattaaattctcagtgagttgctgaaatttcaactactaaaatcttccatgtttttacttaaaactttattttctgttttaatagccgattatcttcagttcttatttattactaaatacagaaatgttactaagattcgtaagcattggtacaaagctgctaatattttctagttagaactgtgcttaaagaacaatactgtacttgaaaagtgtagcgtttttagcttaaatgtcaataatgtagccttttaaattgaatttactaaacaatctgggtaaaagactcatctttctaaaattattcacatgtaaacttccattgttactattacatatttgtcattaagtgtggttgtattggttttaagcaaaatgttcacctcttctgtccacagttctcttagtgttagatagctctttattggaaagagtgatctttgttaagcttttgtgttttctgtttgcttttttatgcatatattttagttatcttaaaaatacagagagtgggccgggcgccgtgactcacatctgtaatcccaacactttgggaggctgaggtgggtagatcacctgaggtcaggagttccagaccagcgtggccaacatggtgtgaaaccccttctctactaaaaatacaaaaaattagcttggcgtggtggcaggcgcctataatcccagctactagggaggctgaggcaggagaattgcttaaacccggaaagcagaggttgcagtgagccgagatggcgccattgcactccagcctgggcaacaagagcaaaactcttgtctcaaaaaaaaaaaaaagataacagagggagaatttgttaatggaataggataatagaagatcgcaattgaagtagaaatccaaaggtcctttgtttttggccttagaattacacactttacaactaaaggatagcaggcagtccagtgagaatggtagaggagaaattagtctcagtttgccatagataatcaataattgacttacttaaaatatagtctttgcttttaatgtctgagaacttgaactcaaatattcttgtgttaagtggacagtgttgctttgaaatggtaaagaggcagacgttgaatatactcaaaatgtcctaaactaatactttcttgtagttcttttttttctttgccattaaatcaaaattaattcattaggtcataaattagtgtggcagtctttaattcccattacagccttaatgttttaagggactttgggttacttgtaataaaattggaaatgtatgggtcatggtcagatcctctcgtaggagttcagtctcctctcagagctgaccagacacaatccttataaactagtagccaggttctaagacagcagtgagagccccagctaccacatgccacatctgagtggttctaagtgataccactctgaaaggccaccagaaccatggtgcctgatggtttgcttgcatagtagcttgtaccacattttacaaaagcattctagctttctgtaatcccgaggtgccaggttaagcaaaattaaactgttttctttcctgatataatagctgatatgcgttgtgagcccctaaggaggctacaatatgccattttttccaggatttctacccacttctagaatatcttaagaacgaatctcggaatattaaggacttttgcttttaatacctgtggaataggtaagatgcgagggactacttgcatagaatagaaacattttttaaaactagcaaatattgaaaatctacttgaggacaaggcatttggagtattaaatgagatttctgttatcaagtaacttaagggcaccaaaaaatggctgataatgcaaggtcattgtgagtgccaaggaactaggagttcagggttgcctgcactggcaacaggagcaagagacaagtatgcgattttctccttcatggaatagtcttgagctgggccttaaagggtagataagtaagacttagttgttaataacaaatgctggagaaacacacgtgaaaatagttcaatttgaatgaaggaaacttgtagaagagtagtgatagggctaaaaaggatgaagctagaaatgtgaaagtaccttttttttttttttttgagacgagtcacactctgtcacctaggctggagtgcagtggtgcaatctcggcttactgcagcctccgcctcccgggttcaagcaattctcctgtctcagcctcccaagtagctgggactacaggcacatgccaccacgcccagctactttttgtatttttagtagagacaaggtttctccgtgttggtcagtctagtctcaagctcctgacctcgggtgatctgcctgcctcggcctcccaaagtgctgggattacaggcgtgagccaccacggcacctggtctggaattttttttattagaataaaaatgcaactataagactgttttctcccttaatatatcttcagcagagaaataacttttccttatagaaaaggagagagagccaactaacctatcatttcatgctccagatccaaaactgttggatttatgattattttttaaaatggtaatttctccatttcaaaatgagtaagcaggccgggcatggcggctcacacctgtaatcccagcactttgggaggctgaggtgggcagatcacctgaagttaggagttcaagaccagcctggccaacatggtgaaaccccatctctactaaaaatacaaaattagctggacgtgatggtgcatgcctgtaatcccagctactcgggaggctgaggcaggagaattgcctgagctcgggaggtggaggttgcagtgagccgaggttataccactgcactccagccagggctacagagcaagactcaaacctcaaaaaacaaaaacaaaaagagtaagcagatgttttggcttagactaaaagattcttcagcttttcagacagctataagtatactaagaatttgagttatgagttaattctaagtggaaacgcccctttttcctcttcacaagttaagtgtcaatgagtgattcatacactgtcatttttaagtggtagtaggaataagataacttgaaaggatcttacagtcaaatgggaaaaaccagagaaatcgatactagtactagagggcaacaaatgctgttacaaattggggtacgtagaggaaggtacttggtagaggacaggggcatgtttccggggcatagatcaaagtatataaataaggaactgccaggccagttgcggtggctcactcctgtaatcccagcactttgggaggccgaggcaggaggatcacgaggtcaggagatcgagaccatcctagctaacacaatgaagccccatctctactgaaaattagtcaggcgtggtggtgggcgcctgtagcccgagctactcgggaggctgaggcaggagaatgacatgaacctgggaggtggagcttgcagtgagctgagatcttgccactgcactccagcctgggcaacaaagagagactccgtctcaaaataaataaataaggaactgccgggcgcggtggctcacgcctataatcccagcactttgggaggccaaggtgggtggatcacgaggtcaggagttcgagaccagcctgaccaacatggtgaaaccccttctctactaaaaatacaaaaaagtagccaggcatggtggcgcatacctgtagtcccagctactcgggaggctgaggcaggagaatcgcttgaatccgggaggtggaggttgcagtgagccgagatcgcgctactgcactccagcctgggcgacagagtaagactccatctcagaaagaaagaaagaaatacggaactaacttgtgatatgttctggaatcaaaagtactcttatgataaaacaggtatgaaagggaacatagatgagaagcatgtgataaaaaccacttgttcaccatgttatactactggacaaggcagaggttcacatactgtgtgaatgggattcagagtgaggaggagactaggctgggatggggtatttggattggacatgattgcgtttataagaatgagagtgttaaattggatttcttgctttatttgtgacatttcagtttattagaaatcatgttaccattagaaaaattgaagtttcctagtaacaaagtaatttgatttgtgtaacttgataaaagatttactgacttaagcttttgttttttttcataagctgcttttgagctttgtcccacaggttgtaaaatgtaagcatttggtaaaattgtcagcatcttgcccagtcatttttttaaagggttcaaaaacctttttgttttaattcgtatagttgggtcttaactattggaaataacatcatcagtaattttttcttcattccttttgcaggaggcaagtgaggcctatctggttggcctttttgaagacaccaacctgtgtgctatccatgccaaacgtgtaacaattatgccaaaagacatccagctagcacgccgcatacgtggagaacgtgcttaagaatccactatgatgggaaacatttcattctcaaaaaaaaaaaaaaaaatttctcttcttcctgttattggtagttctgaacgttagatattttttttccatggggtcaaaaggtacctaagtatatgattgcgagtggaaaaataggggacagaaatcaggtattggcagtttttccattttcatttgtgtgtgaatttttaatataaatgcggagacgtaaagcattaatgcaagttaaaatgtttcagtgaacaagtttcagcggttcaactttataataattataaataaacctgttaaatttttctggacaatgccagcatttggatttttttaaaacaagtaaatttcttattgatggcaactaaatggtgtttgtagcatttttatcatacagtagattccatccattcactatacttttctaactgagttgtcctacatgcaagtacatgtttttaatgttgtctgtcttctgtgctgttcctgtaagtttgctattaaaatacattaaactata

SEQ ID NO: 270 - DNA, 17231 bp, Homo sapiens
  source 1..17231: mol_type = other DNA
ggactcctctttctcccggaagcggagcaccgagccggcaaaggcttgggtgtgagacagcagcggtggcagacaccgcagaagcaaagagcagtgaggctcctgcattcgggtggagcaccatggacgaagctggcagctctgcgagcggcgggggcttccgcccgggcgtggacagcctggacgaaccgcccaacagccgcatcttccttgtgatcagcaagtacacacctgagtcggtgctgagggagcgcttctcgccttttggcgacatccaggacatctgggtggtgcgggacaagcacaccaaggagtccaagggcattgctttcgtcaagttcgcccgcagctcacaggcctgcagggccatggaggagatgcatggccagtgcctcggccccaacgacaccaagcccatcaaggtgcgggtgcccgggtcggggtgccctcgggggaaggagtgggcctcttggacctcccttcacctgctgctctgccggggtgagggaggagtggaacatccgttcccggcagctgaccagacagcacctggcttggggacaggggctgctttgaggagaggctcccctcccacgaagctgcgccgggttgcagggaaggggacgggatgcggagtgtttgccccacgagagcggacccggcagccgcggccaccgggtgacagaacagcagtggctgggcttcccctctccctcgccctcactaatccaccagctcttgagttcactgccaaactcgtcctagcctactttgagtacttttctgaccttcctctctcagatgcccagatttccatatataaaaaacggaaaaactctacttttcctcaggtacagatgaggcgttaacaacttgacagaagtactttaaactggggagggacctctggtgttggacgttttcctagtaccaggcgaaagaatacatgtacagaaagaataagtgcaggtgtttaaaacggtcactgttacatattcttcacattttgttattttggaaaattgttttgaatgagctctgtttctgaaagtgttaatagcatacatttggttcttgaccctttctgttactgcaacttttctttgaaagcagaccaaagtaaactgccttaagaagagccaaatcattgtgataatgacacatggcaggaaggatcattttgagggttatttgacataatatgtgctgtcagcacagtgcctcacacagggtaagccctcaataatgtccttgttattgatcagtagtagccaagatgtcacagcttactccctgtgatctcaaatcaggactcaatcctgagaatctggcaattgcttaaattgtagccttcgtctgccccatgtaaatagttgctgtgtatgttattctgttggtactttgcacaaaaatattttctcaattttttaaaaaattgttttccaaactgagaatggtattaatatggatttatgtaaataaagggctcagagatatttcagtctctggaggtcttgctccatccaccaaagagaaggagcctgggactctaccaacaacacagtaaacagtcccttcctcccacttctccaaccctctgaagtgtgtcagagtgacagcaacaaaattaattgtagggccacagcatacaggatcaggaattggcaaactttttctgtaaagggctgactagtaaatattttaggctttgcaggccacatacagtctctgtcacataaccttgtctgtttttacagtccttaaaaactgtaaaaacaattattacatcatgggctataccaaaaatggagctgtggtttgctgacccctgtactagactaatgaattttatcgctgtccaattatgaccttagtggagaggatttttatattttgagtgtaacatggccacagagcccttgtgggcagcccaaaaaactgtcccatatttgaaattgatggaccaccttcccctgataaatttctataagagaaattaaaggcccaacaccgaaatgtaccctctcttttagcctcagagaaattaaagatcttgttcccaaaaagaaataaactttactattttctttgtcacatttttgactattcagttttagccagaaggttgtttcactgtagtacctagctagacagtctagtttctgtttctttttctttttttgagacagaatctcactctgtcacccaggctagagtgcagtggcttcttgatcacagctcactgtagcctccacctcccagactcaagcaatcctcttgcctcatcctccctctcgagtagctgggactacagatgtgcaccaccatgcccagcttattttttttatttttcttagagacagggtctcactatgttgcctaagcaggtctcaagctcctggactcaagtgagcctcccgtttcatcctcccattacagttgtgagccaccacaccctaacagactagtttcattcagcagctgcagcttgagccatcttcaactggaacactcttgggttgttttcagcatttccagttaaattaattcagcttcaatatttctattgtactttgcttttacaaagtttcagaggatctgtaagacaacaatattatcttaccagccctcagccagaaaagattgtccaagtaaaagttattctgtgaccaactatgttatctggcggaaagggggaaacctagaaaacagaagaaaaaaatcttggctgtagttttgcaagaatgcttcttatctagagcctatgaacactcagtctatgaaggtaaaaatttatgggagaaatctaccatgaggaggttaattattttacgtatgttctacatagactgtctcctttatcagagatttgaaacacctcagtcctctaaaatatagaaatctgtgctctgatggcacttccaatttcatcttacctgaggttcttttttttttctctagtgtctttgcatatacttaaagcttccctatttgtatttccctatttaccatttattactgatatcagccacaagactctagtgggccatttccatgttactcaatagttgtactcatatggtgcttgacatatagtatagatttattgaaggaataactagaagtagactataaagggatatgtctctaacactgtggttttcttggttgctgcttcctactgtggaatttcataagttccagttttctcatgctttaatgatacagagccccctttaccagcagtggatcagagaccaagatatagagacccctttaaaggaaaaagaaacaaacaatgcaagtgcccttgtttatggtgttttaattaattgtattacgtttcttcaaattactctggctaaaaataaatgcaaaagtagaaatacatttgggaaaaacacaatgcagagattggtattatctcataaaaaaaagtcattgcaggcccagcacagtggctcacacctgtaatcccagcactttggaaggtcaaagtgggaggatcacttgagcccaggaattcatgaccatcctggacaacatagcaagaccttgtctctacaaatattaaaaaattagctgggtgtggtggtgtgtgcctgtggtcccagctacttgggaggctgaggtgggaggatcacttgagcctagaatgttgagactgccgtgagccatgatcacaccactgcactgcagcctgcttttttttttctttgagaccctgtctcaaagattaaaaaaaagtcattgcaagaataattgcttttgaaaaaatttaagaaatgggaaaatagttgacattattttattttgggagttttgtttgtttcttaggttttcattgctcagtcccgatcatctggaagtcaccgagatgttgaagatgaagaacttacaagaatctttgttatgataccaaagtcctacacagaagaagatctgcgggaaaaatttaaggtatttattctaatcagctagcatatgtgataactcatagtcctgcataggttgtatgggtactaaatctgaaatgttgttggaataaggtcaatagagtagtcttggggaattacataactgctttcatcaatttcaatctactctttaaatattaaacctagcataaattagtttttaaaattaaagaatatataaaagctggaaaatagtaatggtagtctctccctactttattgtgaaagtagagattcgcagaaatgaagcataaagctcagaaacttttaagtaaagtcacacaactagtaggtggtagagctatgatttaaacccaggctgtcggagtctggagcctgctcttggtctttaaaatttcaaagcacgcttttatcactcccctctattgcctggcatgtagaggcgaatcaggcagacctgagtgtgtgaactgtattatctagtattgagaacgggcctatggtgtgttgacatggtactcattcacagaaaggcttattctttgaagagtttttgtcctaaaattgggcctttgaaggaattatatttaaagaagaaaacgtaaatatagctctgacctatataagtgaaatttgaggataattttatgtctttttagccattaacttatgcagtgatgagctttcacacaaattattaaaaagcaattttttaattgttttgaattgtagttttttatcttttttctactaatcctcccatgaattgggtggcaacaagcaagaaagaaaacaagcagtaaaaagtaattttcaaactttctctcctaccccaattgagaattcaatgaaatacttcaaaaataacaaataccaaaaacgtatattttatacatcctccagtagtaaggaaaatgttttttaccttaaatatttataaatttttcttttcctgaatgaacaaatataacactttaatgtatagtaattaagttgctaattgattacataagaatttataaaataaataataaataccaattatattccatatttctttgaacattgaaagtaaacactactgcatgtttctcagaatagtaactttctgagtgaaccagcatattttagaaataccctttgaaaagcactccttcaaaagaatacacaatcatttatgttcctgttagaagacagacaagtaataatagctaatgttctttgagtatgttccaagccccatgtaagcacttcacatgttttacttcagttaacccttaaacaaccctgtgaggtagatactactgctagcctctttaataaagaggtaggcacagagagaataagtaaactgcctaattaatgagtggttgattcaggatttcaatctagaaagtttaattccagagctctggctcttaaccactgttgagcaagactttggagctatccagaccatgtacaaattcttactcttctgtgactttgtccctctttgatttctctaaagcccagcttccttatctatgaaataagcatatttgcaaatacaaatatgcaatatctgcatattttatactgcctatttctttgtttgcatgcaagggtcacatataaacaaatttttagttctgaaatactctgttcaattaattttaagtcccctaaaatcatgtcttttaactctcttaggtgtatggagatatcgagtattgcagcattattaagaataaagtgactggagaaagtaaaggtttgggctacgtacgatacttaaaaccatcacaagctgcccaagcaatagaaaactgtgatcgaagtaaggatgtgtttaacattgttaaaaacttttgtaaaaaattctgattattctaaatagctgaatttaatattagtttttgctaataactgtatctgctaatgtaattttagcagtgggtatttaaatatttacagtccaaggaagaaaaatattttggggttatgattaaacattcattgaggcactatcttgaagaaataagagcaactacattaacttagtaagtgaaatgcatactttgggtattatttttataggtttttagggttttttaagtgtattttagaattttaagtattaaaaacttgacttaccttttcaaggtttttaaaatattctttatatttgtttatatttgatctacatcccaaagactataaagtataactaataaacctataggttaagggtaagatttataagatgtgctaacataggtaactgatatagatagggttaatttcaagctagagtgacatgaatgtgatcttctgatgttgctgtatatataaagaataagaattttaaagatgtcaaagagaatattctttgttggtatacttctagttaggtatattgacctttagaaatgatatgtagagtaattaaattactggattttaggacattataaaaatatatacttactggaaagaattactgttaatcagtagaattcttagatacccctaaggtacatacccagattttctcttagatccttctaaatttctcatttagctagcagtaattgagtacctgcagtatactgatcaatatgctaagtagagggatacagatgaagtatatggcagccctcacatttaaggaatttatagctgtattgggtagccaagatctaataggcaaaaaataaagaataatggaagaactttttttaaaggctctttgaaagcaagaagtatgccttatttgtctgtcactccaggtatctagtacaataataggccctcaataaagatttattaagctctctataaaagtaaatgccatttatagtagactcagtaagaatttgccaaatgaaaaaaatgttcataagtgtatggtagagtctgtcaatggtgaaaaacaagtgctggatgagcatggcaacacatgccgagggggtaggacttgtgtctggtgtcgaggaggcaggacagaaggtgagagcagtgctagcagaggcacaatgccaggaataaacatgtgttttgcttggtgctgtgaaggcagctgtctgagtaaagcacagtatttctgctgagacattctgagacacagttaactaggtacattggaacatgggaaccatatattggaggttaggaaaagttcaaggttagtccgcattaggattcctttgtagattgtttagaaagacaaaagtaagaacagttgatctaaccccactgtattaatgatagatttccagagaagaattcaaactggctggttttatcctttttttaagccactgaataatgtgaagaaaactgaacccttgaaatatgcccatgtgcacataaatgcataataagcattttgtttgaagtgtcagagggtttgtggaatcttcccaccttttgaagctcatccttggacccctagttaagaacccttgatccagaagcaaaaaaaacagttaaagggctcttgtaattaattgaagagaatctaaattaaaaacagaggcagggaagttagagtaaaagatagcatattccaattgtgtgcatttcaaaggaagaaacttggtgacaggttaaatataaagaagccctacaggattttaatgttgaggagcttaggtgaatgaatgacgatgttatctgtaatagggggagatgggaaaggatagcatagaattgctgatctttcatgtctacattgacccgtaatttgggatacttgctgtttgtcatttactctttgccatcttccagaaagcaaagaagtaggtctggaggagatggccattgtatagattttgctttgtacaattatatttataaagctgagtcaggcactagcaatcaagtatatttgcaggtatgttaaatttgctgtgaaacttgaaattcatggggttttttcaggttttagagcaatcttggctgaacctaaaaataaagcatctgaatcctctgaacaagattattatagtaatatgaggcaagaagctttgggacatgaacctagagtaaatatgtttccatttggtaagtaggcaacctttacttttaatagtataatgtagtatatgcaatctaatttgggttttaaagaatactctgttattgggcatctataaatttcacctagtgaataaaaatcttaaatgtagtttttttattcctaaaatgtggattatgactcctaaagttcttaatatttaacacttattttgtttaactgatttctaattatagttttctctgttaagttacgcattcctcatattagaaactattaccactgccacttttttgggtgagcttctgcctctatatagctgaccaaaaacttaaaaagacatatgtagagatcctctccgtatgagtcctaaaattttgttccagaactactgctactttaaaattagggctacagaaaggagaggaatggtaaaagtagaagctctaatagaaaaaggggaaaatgggtaatgaaagtaaggcctgtgaatgttatttgacgtaaacattcaggtaaaatacttaccatatttttcagttttgcatactaaacttctttctgtgaaattagactatgcatttcttcttatatttctgcattaaaggtaggggagtggggagagttgtctcttcttgtcattagtcccatcggtagttctgatgaccagaagcgtactacaaaatacagtgcctttattcagtacaatggactctgttttctagtatttaaaatgttaagcgaattgttggctgtgtagaaatctaaagatttacttttttttatattgtcggagaacaacaatctgaattttcaagttttgacaagaatgatagccgaggccaggaagcaatctccaaacgcttgtcagttgtatcaagagttcctttcactgaagaacagcttttcagcatttttgatatagtaccaggattggaatattgtgaagttcaacgagatccttattcaaattatggtaaaataatgttcacattaaaaaatatatatatatgtatatatacacacacacacacacacacacacacacacacacacacacagagttttgttaaaatggcttttctctagtggcacttttatgtcaagtactgctcatgtgacaggaattttatctttcctttttctctactttagaattcaaaatatggtgataccttaataaacaaagccctggaaatatatcttctttttacaaaattgttcactgtaaaatatattttaactcccacaaaatataacattctgtattccagttgcataacaaaaaatacctctggatagagcctctgtttctatgtactcttttggttaatgctagacaaagttacgaaactcacaaaatttcctcctcattcatccctagatctctttctcttaaatttatacccctccttcctttcattccaagcatctaaatgccctgcttctctcctgcttcttccaattctcaatggaagcaagtctccaatatcagccatttgaacttattaattagttaattgattaaacccattatctaacattagctaacccatctttgtgttttaagcttttgattttattaaggctctttgttaatggaggcattgtggcataatgggaaagtctggcattccattttgcatagaatcgggtacaaatcccagcagtgacatgtagctttgagaccttggcaacttgcttatcccctctgagcctctctttcctcgtatgtaaaatgggatcattgataccttctttgccagggttaggtaagaattagagataatatatgtaaaataacttaatgcaagttctggcatgtaatagggcactcagtaaatctaaggggtttttttttctttgttagtgaggggtggtagagagaaatcatacttggttggcatctcttccagttttgtaaggatacctgatttagtccttttagagtggcatggctattgacatagaagtagtgacgtgagtttggtcatgtggaccaacaggactaaggtaactccacccttcatacagacacccccacatactcactagtacccaacccagcactagtctttttgtagaactgtctttgagccatccccagtcttaacccgatcatatgcgtcattctctgttctaagacttctaggcacacatttttgtgttctctggcacatttgttatatgcatatgaagttgtgttcattttgttttgttccctcccttttatctggtatgtcaaaatgtatttgttcctgtacctcctgttttgtttctctggttggatgtgtctgaaatatatgtgtcattggaacatctttttattaatagaggtgtcatcatatagttcgaatctcatttgaattaactttatatggtcatttgatttctgtgttttattttaatttcattaaaatgttggatgcttgggtttccagatgaacataaattataagtgtttccccagtggtttgtattataaaagtgaaaaccttttagttgtgtcacaaactcctgggctctctaaggaatgcattataacattgtccctcccttcaacatcaccctcctaaattgaaattcgtccctttggcagaaatctctccaaaggaaagtaaaatatatcacttgtgatctgagatcctctgttccctatctttttgtttttcattcaaatcacttttcctctccctactgctgcagatagccgggatgagtatatattcttttcaactatcacttctcatttcatttcctacccagtatggttgggaaaatcttaaaatttcaaagtagatttcaaagaataaaaatttagacttttaagtatattggtatcatataagaaaagctagtatcctaaaactaaacttattagacaggacgtatgttaatattccattttccctaaaatatcatgttcatatttttccctaaattatttcttccttttctaggaatacacctgttgcacacatgataacagaactgtgttttctgatacattcgattctgtatttactagttgtgtgatattagagttctacatggtttcatttttgtgatagattgtaacataggccttaggcactcagtctgctttcctttttcatttctgtatgttctctattttaggtcatggagtggttcagtattttaatgtagcatcagctatttatgcaaaatacaaattacatggatttcagtaccctcctgggaaccgaataggtgtttccttcattgatgatggaagtaatgcaacagagtaagtaccattccaggagtgtctaaagccgagctttgagtgtacatgattgataggacttgaagaataaaaatagaaacaattgacctctcaggtgagaaagtcacacaaaacaagctactgttaaaagactgaatatttttagttttctgtaaattatcagttattttttccagtctccttagaaaaatggcaacacagatggtagctgcacagcttgcatcaatggtgtggaataacccaagtcagcaacaatttatggtaagtaggtaagaatttaacctttataatatatcaatagcatataaaataaatgtgaagagaaatcatgctttgttgattatctgtgtatgaaaattttcagagctattgtggaagaccacatagatgccatgatacatatctgtctttagctcttggccaaaaatccctaaagggcatttttttctttttcttgttttctacctgttaacagcaatttggaggaagctctggatcacagttgcctcaaatccagacagatgttgtacttccatcatgcaaaaaaaaagctcctgctgaaactcctgtgaaagaaagactttttattgtgtttaatcctcatcctttacctttagacgtattagaagatatattctggtaagaaagttacattttttgttatattttatttacactagtaatttaattattcttataatctagacacttccttcacccagtacctatcaagtagagagtattagttctctgcttttaaaacctccttatttgtatcatctttttcaatttctgattattttcttctcttgtttatcagtcacacatcctaaggctccatagagaatttcctgctattttgtttttgaaacataaagtgggcctggtgcagtggctcatgcctgtaatcccaacactttgggaggccgaggtcaggggatcgcttgagctcaggagttcaagaccagactgggcaatatggcaaaaccccatctctacaaaaaatacaagaattagccaggcatggtggtacatgcctgtggtcgcagatacttgggaggctaaggtggcaggattgcttttgcccaggaggtcgaggttgcagtgagccaagattgtgctactgtactccagcctgggtgacagagtgagaccctttttgttttttgtgttttttttgctaagcatcttctgttttgttggtgcattgtaggatccttaagggttatgcagtcgcattgtgtaaacaattacttgattgtagggaaaaatacataaatgttttttataataaaaaagggaaggttcttatttatttttgtgtttttaacataactcctttctttgctttttcttttaggcctttttcccatttgccttacaagaatgttagtgaatttgatagacaggaagcttgttaaagagctgcacaaaatatcagggacataatgtgatagtatattgaggctcaaaaggaaaaaaatatcaggatatggttcaagtattttgacctttatttaactgatatatttagttttcttcttgaacctcctctttgttcaaggcaggaactgtgctaagtacaagagacatgtaaacaaaatattaaatggacaagacattatgattcttgtcctcttagagctgatctcatgtaggaaacagacaagtaaacagaaaattacaacccagggtgattgttgctgtgataaggaatgtgtaagatacaaaggaggagcagttaccttagaaactctgagaagccttgaaagaaggaaggtgtatgtggagacctgaagtataaaaataatttctccacaggtgaaagctgggggtatgcatggttatttctgccatagagaatgtaaaagaagggctgttaaatagggaatttgagagattgttaaggaagatgaaactaaagagtccaaggacaatgtcagaacggctctagagctatattaaggaatttgttgtcaccatggaggcaatggggagctgctgaggggacttttagggagtaaatgatcatatttatgttttagaaagatcactcagaagacagagtgaaaaatggattgaagagggacaagctcaggggtaaggaaactagtgaaaaaggagttagattaaggaaaagatgatggtctgaatgagaagagagatctgaatgagaatgaatagaattgactgagatgtttaagattgacatgagttggatgttggatctggggagaagggtgaaaatggagtcaagaatggactccaaattttagacctgagcagttgtatttatcaattttggttgattatttttttcactttgtttcagtcgttttggtaacctgatcgaagtttaccttgtgtcaggaaaaaatgtggggtatgccaagtatgccgatagaataagtgctaatgatgccattgccactctacatggaaagattctgaatggggtgagacttaaagttatgctggcagattcgccaagagaagaatctaacaaacggcaaagaacttactgattcttgaggtaagccctttttaatctgaattttaaaacatattgagtaaatagtatatgaggaatatgtgtaagtactttataaacttttctttttagtgatttagaagttgtcagttaaaagagctttgcaactatttaaactttaaaaattgttgacatttactgaagaatgtttttgcccttctgtaaaataaaatcacatttcaatttagaaagataaataattgttttttgtttgtgaaatcttcgattttaagaattcaactttttattatgtgcttatataaacttttaagttgtccggtgctagaataaggattgctttaaaaaaaaattgaaatacttctaaagatttttaacttgaaaaattggtgtcttgagttatgaattgaggtaatttataacagtcgtttataaagataatgttttgacttctctctaatgaaatgcctaaaaagcaatatcaaataatatatcatttttggaccttttgaacctaaatgttggtgttttctggacttgtatttgtgagtttgtgcattaaaacaatacattcagaaaatattctcgtatgcatatatgtattttttaagaaaacctgacaatttaccaaaaactctttattgtaaattttgatacatacagccatatgaattccatttcctattttatttattagttttcaaaaatcaaactacaatttatttgactgtgacagtgagtttatatctgtgtggtttggggaaacattccttaaagtttgactttttttttcccccgagacgtctcggtctgtcacccaggctggagtgcagtggcgagatctcgattcactgcaacctccacctcctggatacaagtgattcttctgcctcagcttccccagtagctgggactacaggcgcgtaccaccacgcctggctaattttttgtatttttagtagaggcggggtttcaccgtgtttcgatctcctgacctcatgatccgcccgcctcggcctcccaaagtgctgggattacaggcatgagccactgcgcctggcctaaagtttggcggtttttattctgtaaaataattctgaatttcaggggaagccgttttcctgttcccacacactaactttccaagtctactataggtcaaatgtagtagatggcaggcactttgaattcagtttgaagttactggcttgaaacctttatttttttcacttaagattttctttctgaccaattgtgtgagctagcacgtatgagaatgattcctgccaggcctcactgctgatgacccttcctctcctagaacagatcacatgattagttcctccttcatagcttcatagaaggcatttgacaagagaaagtgcccattgggcccataatcctaatttttaaatctttttaaatgttttattaaatgacaaaaccactctcattgtaccatacattgttagcaatttaaccctggatatattaaattgggagtggaaaagaattagcaagcattttttcctgtttatggataaaatgttaagaatgaattctgtttggagaagctattctctagcatgcaaaaaatgtgttttttctagtctgtgaatatttcaataataggaaataaatagttcttgcttttactcaataaatctttgttcttaaaaaggacaataatatagactttagacttctcagtatagaaaagtatataaattattcttgtggttgaaccttttctaatgattatttacatgttaaagagaatattgggcttaaaataaaaagccatttaactgtgactgggctggtctctacgcccttttttttttttttttttttttttttttaaacacagaatcttagtctgtcacccaggctggagtgcagtggcctgatctcagcttactgcagcctctgcctcctgggctcaagcagtcctcacagctcagccttgcaagtagctgggactacaggcatgtgccaccatgcccaggtaattttttttggtaagacagggttttgccgtgttgcccaggctggccttgaactcctaagctcaagtcatctgccttcctcggcctcccaaagtgctgggattacaggcatgaaccactgcgactgaccctctttgcctttttgaggcccagttttctcatagggcttttgagagacaatgagtcaacaaaatgtaaaatgaaaaaaaggctttgcaagtctaaactaaaactcttgcatttgtagcttcagtgaaacctttgagatgtcctcttatctaaaataatgacatccaaatgatcagaaactaaaagtataatgatataaaactaccttgtggccagttggtactgtgagaactaagctttataaataccacatttttcccttaaactcatccaatttcctacatcagaggaattgcattttcagcatggctgttcataaaaattttaatctatcatttttcccttttttgaactgttacgcatattcagggcagagataaaatagggtcaggttagttgaaaatggctgtttggataggatacgattagctacacggttttgaatttcttctaattgcagcatggctttttttatttttgctgcggatctcctatttacaatggactccattatgagattcttcttctttgttggtgtattaaataaacatattaccttattttaagtttcgataaaatactgtggaagactttgccaaattttatatgattgtgacaagttttttggggtaggtgcacttttttgtttgtttctttaatttttaaaaggctgcaaacacagctcatgaaggctggtttcttttatctctgaggtatgggcctgggattaagtgagtcatgcctaggaaatagaagcaactgatccaaggatataacattgaaagtagttgaattctattttgagatgggtctgataaccacaatgtaattctctttctatttgaggaaaatataaattttagtatttcagagcatcagattttttgttaattcacaacactttccctctagaaattcagcacctgcatcgcccttcttagtaagtttggttttatttgggggcagctatgattaagcagataacattgggtatattgaaataaaggaacaattcctaacattttaggaatactacaacagctatttcctttcctttcaggtgatgattttcatacttgtgttgtgttctttctacagaacaaagactaaataatgacataatcctcagctgactgactgaaaatgtgactggacgcattccctgtggacagttgacagctttttttttttccatatacctgatagtctgtgtacagcattgttttgtctgggaagcagggattgctgacatgtatttttgaatccatacattaatgctaaaacgaatatagtagttgttccttagagcaatatgttgttacgtgtagcagaaataaagttttctttgcttaactaa

SEQ ID NO: 271 - DNA, 32742 bp, Homo sapiens
  source 1..32742: mol_type = other DNA
ttaagtgaggggtagcccatgctacaccaggtgctgaaggctgagacggtgagagcatgagtgataagatgctctctccccttgctctctttctgaagatgacaaactccatcttttttctaaagtcttactaaaggtggaaatcttttttcttcacttcaattttaaaaaattatttgtttttgttttatagaatagactgagagtgggcttttaagagtaacaagttgattttgtatttatatacaaacactgcatattgttggacacttataaataggttgatgaatattcagtatatatgatagatatacaagcagtttggtgtggatatattaaacttattgaaaaatttttaaaatgtgagattttacatatttctgactttttcaaaatttgagtttagaagaaagttgaaatatagctcagagctaattttcaggttgagctctctgtagccctaggtactccaaaccaagtatttcaagagtcacctggagttgcgatacttggcagtttagggggcaagaacccttgtactctttctgttcctcccctcccaactgggcagttgtatttattaagcatctgcaccatcctttgttgaagaaagggctccccacctaagtttgataatcaatggtctacaaaaatagcactatgatgaaatctgatgtcctgggaggaaggaattcagaacagaaataggaaacaggttccatttgacagtttatttagtgcgttcagaatagaaggtagagaaaaaagtattgtaatcaagataatattcatctacagaggaatatagtgaacatgcagtatttctaaaattgcagtttaacaagaaataaaaaaagtacaaatgtttctcattcaagataatccacattttgaagatctcattttacacaaaaaagggtaattagaactataaacaggtcttcattttataataagcacttaatataactaatgtgcagttatgatttttaaaattggcaaacatgcaaaattgcattaaataagttatgtcagataattatcctttgtttaatgtttatttacagcttgtaattaatgtttaatcattttgttgtcagtggtgggaatccaaattacacagcaccaaaatatgttgtcagcggcaaatccatacgggtctgcaacaacaattcttgtgtcctcaggagagaatctgactaaggggcataaggcagaagagaccaagacaagttttagagcaggagtgaaggtttgttgaaaaacttgagaggaggaatgaaaagaaagtaaagtacacttggaagagggccaagcgggcatcttggaggacaagtgccccatttgaccttggacgtagggttttacatgttggcatacttctggcatcttgcatcccttttcccttgattcctcccttggagtgagaggcctgttagcactttggaggtaagcatgcgcaatgtgtttactggagttgtacgcatgctcactggaagtgttcttcccttaccagctgaatgtccttaggaggtcagataccagttaaactcctccattttgcctcttaatatgcatgcttgagcccactttcccaactccttggatcttatcgggaagctgccgatcaccagttttaggtgtttctatctactgggaaactgccttttcctggcactggctgcaatcaattattttagagagagagtttaacaaccgcctgacattcctggttggggtagggggcaccttctcttgctctgtttatgcctgaatagctacctactgtaaccatttatttttcaacatacatttaattgaaaaataatggaaatacaaaataggaaaagttatggtccctggcctcaagaaaatccatctagtggggctgaaaagaaaacttacaaaacaagtatcttacagcaaagtgaggtgaagagataagacgaatcagagttggcatggctggggcaggtttacatgacagaaagaggcttgagctgctacttgaaagaaacacaagactttgcaaattggggtggaaagctaagggatgctaggcagagggttgatgtgagcaagaaatacaatgtgaagagctgttcacaagagaatgagggttttcaacagggaataatgagagaattgattggagcaaaaggttaggatgaggaggtgaaggaaatttttctttttggaggggggtgggcagggaacagggtccagctctgtggcctaggctggagttcagtaacaggatcatggctcactgcagcatggaactcctggggtcaagtgatcctcccgcctcagcctcctgagtagctgggactaaaaggtacatgccaccccaccctgggattttatttttgaagccaaggatctcagttaccccagggtgaaagtagggtaacaatgtgtattgcctttaggggttcctatggaagtctcttaaagagatgcttctaccctcccaccatgagagattctgattttttccttctttgctgtccaggtgacaatgtatatagtataatgaaggatgttactaaatgacatgtgctgcacacctgagtcttgtggaggctgaagaaaaggaggcttctgtagaaaataggaactcagtgagtgttttcagacagctgggtaatgtgtatgaagaagaaagctttgggccaggcacggtggctcatgcctgtaatcccaacactttgggaggccaaatctgacagatcacttgaggtcaggagttcgagaccagcctggccaacatggcaaaaccctgtctctactaaaaatacaaaaagtagccgggtgtggcggtgtacacctgtaatcccagctactcgggagcctgaggcaggagaatttcttgaacacgggaggcagatgttgcagtaacctgagatcgctccactgtactccagcctggatgacagagtgagactccgtctcaaaaaaaaaaaaaaaaaagaaagttttggctactggtgtgttaggcttggtgggagaaactgaaggcagggagatgtaaggagttgactgcaattgtataggaattgaagaggcagaaagaatatctcaatgtttgatggtagagaaggtgaatgtcagaaaaaacaaagtggagcagacactgtactaagaataaccatttttcaaagtaggtattgtttctattttacaaacaatataatctagaaatcaaatacaaatccaagttatataggttttagtgagagagttgggctctgaattgaggttcgtctgactctaaattctgctaatgcactatgaattcaattttgagtttctaagagatggaaagaaaaagacaaaagatgagcttgcttttgaggtttgatgtacgggtaggttgtgcagcaagcatctggaaaagtggcatttggctttagagatgttgggtatagattattaaaaattatttgcacagggtgacaatgataaggattccaagggagaccactaagagttgaaaaagaaaggagagagcaaaggcttgaacatcaataatattcccaggttagaaaaaaaatgggatcaattattgaaaaaccagaaaaggagtaggaagttatgagaaataggaagtgtagcatcaccaaaaataaagaaaacacttgtacttaggaaaagattgtcaaagctgttggatactgcagatgtcaaggaggcaggtctaatttggcaattagaaaaaaaaaatagttggggtcagtagttttatttcggaagagcattacacaggagccaatctgcaattaattaaaaatcaaaatagtaaagatagggaaacagataatttactaaaatctatagacacttcttttgagattttgaaaaaatgaaatgagagagaaattagcacatggtaggtaggtggaggagcaaggcctagggagggtttcaattctgggcttctttatagcttggtaaggaaagagcctgttgaaagggtaaaagattgaaatgcaggtaaagaaaagaaaataaatgtcttaatggaaaaaagtttttaatttaaaaagtaaagaaaatagggctgggcgcggtggctcacacctgtaatcccagctctttgggaggctgaggcaggtggatcatgaggtcaggagatcgagaccatcctggccaacatggtaaaaccctgtctgtactaaaattcaaaaaaaaaaatgagttgggtgtggtggcatgcgcctgtactcccagctactcgggagactgaggcaggggaatcagtggaggttgcagtggagtgccagagctgagatcgtgtcactgcactccagcctggtgacagagcgagactacatctcaaaataaataaataaataaataaaatagcaataacacctgtcatcaaccacaaaattgtataaaataagttaaaggccattctttttattattattattattatactttaagttctagggtacatgtgcacaacgtgcaggtttgttacatatgtatacatgtgtaaaggccattcttaaatcctccaatttacaaacccttttctactttactgttaatagtttggtgcaaatctttttctttttcttttcttttttttttttggacacagagtctcgctctgtcgccaggctggagtgcagtggcatggtcttggctcactgcaacctccacctcctgggttcaagcgattctcctgcctcagcctcccaagtagctgggattacaggcatgtgccaccatgcccggataatttttgtattttttagtagagatggggtttcaccatgttggccaggctggtctggaactcctgacctcgtgatccgcccgccttggcctcccaaagtgctgggattacaggcatgagccaccatgcccggctggtgcaaatctttttcaacatcttcttttatttaaagaagtatcactcttttctctttctctgcatctgttcctaaataaacccgttattaaataaaaatggtgccgtatatgcatgcatgttttcaaattactttttttcattatatctatcacagaggtctttctaggttaatatttacactcatatcaaatccatctaattcattttagttgttgtatagtgttcttttgtttggctagatcataatttgtatagaaatttcttttttattttgtagagaagtggggtctcactatctcaaactcctggactcaagtgatcaacccctcagcctcccaaggtgctgggattgcaggtgtgagccaccacatctagcctcaatgtgtgtagaaatttatacattgatatacctttcttggtagcttaattctaaaaagtggattgccctgtgttgtgggctgactactccccaaagatatccatacactaagctttagaatctgtgaatgttaccttatatggcaaaaggtattttgaagatgtgattattaacttaatcacctctactgaatattgaaatagtaagattatcctggattacctgggtgggtcctaaatgtcatcacaaggctatgtgatggcagaagctgaacaaagcagtgtcagacagaccaaagatgctacatcgttggctttgaaaaagcaggaaggtggcacaagctaagaaatataagtggcttctagaagcttgaaaaagcaaggtaatagattctcccctggagcctccagaagaaaatagtccttctggtactttgattttagccctacaatactcattttggatttttggcctccagaactgtaagagatacatttgtgctggtttagttaaccgagcttgtggtactccaatgtgactttatctgaactttattacatctgcaaagacccgatttccaaataaggtcatattcataagtatgagggttaggacttgaacataaatttttgagggacacaattcaattcacacacccattttcaaaaagtcaattcgatctgtgagtggttttaaaatttgatttctgtgaacctaccatttaattctggaattgttactgcctcattccaaagacaaaattcttcctccatttgagattttaggaagtcctagaagaaatagctgagcatgggtggatattttggaaataatcctcatggtatggagcagagaacgtccccagttatacatatgtagcacattattttataaagttagtatttgagcaaaactaaacaatatatttttacacacacatatgcagaatatgtgtatgtgatttacgtatgactatgccctaaagaaaagcagcaaagtgaggggacgtggacggcagggatggcacatgcagaagcacgcaagattccgcggtgtggagggttcgtgggtgcgtataattatcttccattatttacatgtgtactttatgcgttcgttagctatatttttgtatgttttaatatgcaacaaaacggcgtatgagttacgctttaatgtaaaattgtctacataacacaaaatttaaaagaaatggcatacggatagtagaaaacatgctttgaggaaaaagcgtcatgtactaagtccagaaatcgacattgcaaagaggcaccaactgttttcatcaagctgacttttccaggtgctactcagaaaagctgaccgatgatagagcactgggtcaactcacgctaattatgaaaccgtgagtaaaataatctgtgcttctatgtaacttaagtacccacaaatcaggaagcattcccggatgaaaagcattcacagaaccatacgctggttcgccaccttcccggtgcaaaaaccctttcctcggaaattctcagcgcaaagactttgccctattccaaaatggctccggcgcctacaacttaagcatagcgcaggtccggaagttacgcaaccccataaggtagcacgccgttacccgtggggagcgtttccgccatttttgaaaattaattgggaaggtactggttttaagtgtagttgccgacgcaatggcagcctttgcagtggaacctcaggggcccgcgttaggtgagtgaaatattgcttttccttgctggcactgccatccatgctctgggcctggaggcgggcaagactgaaaggcagtcgtcaggctctcgtctgctggtttcagtcgcggagagggaatccttgggtgcccccaagttcatagtcggtcccctactcgacgcgtcgcctccatactgctacaaaggtggcgccgggaagctgagggccctgggagggtgaagaaaaggccgtctggcggtgactgagctgtgtttgtgcccccacacgccagccacgttagactggcccataccttaacctccttctgatacccgagacgcgatgctggttgctggattcccagctggttgctggtccccagaagcatccctgggaggaactgaccgcggtacacgtgggtgggcggtgccctgaagtgtgtgggtgcagtccactgcttcttgatcaccggtgcttccagttcctgttttgactcctctctcccgggctttgccaaaggaatcttgttattaatggaagcttgaatcgtgcaacatttaatcaaccgtgtggttggtaatcattgagatattgaccttaacagcaagctaggagttcgcacgatatttcccgcctttatttggggaaagtgactcttaagtattgtaggaggtatttttctctagtaagtcacgatctgaatttttttaaagattcattcccattattcattgcggagcctcgttgaaatatgtcgtctttgaaaaaaatctaccactttaacagcacgcggatttctttttttcctgctgagttttgcgacttgtgagaatcgtcgaaaattttagaacggaaaataaaccgtcttactgtcatagagacttacctgaaaagttaggttataactttctgagcttggaaaagagagcaaatgtaatatatatggtgtggaaagagtctttagatttgaagggtatgtaatgcttgccatgtttggtgtaaaataagttctttttgagaatagagtaacttgaactactttagtctgtcataaaaaaactaaatgcataatgtcaataatgcagatactctgcattaaaatttatatatagatgtcgtcttggtatttatttttaatgtattttagagatcaaaaactcttcatttccagttccaaatttttctattcaacaaaaacattttggagtgcatatttattggggttacaaatgtgagtaaaccaatccctgtatattgccttgccagaaatctgacattagccagtattaatgtttaagtccacattttgcagatattccaggtgcccactggtgtagtaaaactaagggttgacttcaacaaactgctagctgagtacgtatcttttgggagcacagaatatgaaatggaattgaggacatgcagcatcttttccttaagtttgctttaagtgaaatttagcctgaggggtggttggtgacagtcctgattaagagcccattgtgccctccttcctgtctggtgctttcttttttcttttccttccttcttccctctctccctccctcccttcctcttttttgacacagccgtgtcacctgggctggagtgcagtcgtgcagtctcagctcactgcaacctccccctccgggctcaagcaatcctcccacctcagcctcccaggggctgggaccacagtgtgccgccactcccagctacttattgtatttttggtagagacaaggtttcgccattttgtccagactggtctcgaactgagctcgagcgatccacctgcctcggcctcccaaaatcctgggattagaggcttgcgccttctactgtgtctgtatgtatccagatacatcagaacttttcttaagccaattcttactttattttgctataatttttttttcttttagggagggggagtgaatgtagtgaatgttaccaaaaactttgcgtttaatatggtattctgaatatctgttaagaatatgcttttgtttagacttttggtttgattttagtggatcttcttacgaaatatttctacagtgccatgtaacatagtaactagcactttataaaataattacaatgtaattagagtttttcacaccttgttttagcatttgctttatccatttattgaatttgtttttttttttgtcttttatacacttgtattgttaatatctaggcctaatataatgggaaataagaggaagactaaatagttggcagctttcggatattaagaaacagattgttaaggccatctagaagttaagtaatagttaataaaaaaccatacaaataacatagcaaacatttgacccttctgagtgcaatgagtcacactcaggcttgtcacctagttgaaaattattttcataagcagagattgcaaattctacatttatactttactcagtttttgctattataaaatatttgtagaaaataataattcgtatttattgagcacctgtgtatcaggtaccaggtcaagctatacttgctataattctaacaaaagctctgttagtggatgctagctatgcttattcccttttactgagagaacttgaacccacatctttgactccatagcccattgttttccttattctgctattttgctctgaaattagaattatatagctcactcatcttcataagggaaataatatctactctatagattgtgaggatttattttgtatcaattgtgaggtttcagttctctaagttggctttatattagggggatatttaatgatgattctttaatttttttttttttttaaataaaaaagatgagatctcagtgtgttgcccaggctggtcttgaactcctgagctcaagtgatcctcctgccttggcctcccaaagtgctaggattgcaggcgtgagtcaccatgcccagctgtgattattcttgacttaaactaatgattaagaaaaaagatacaaaaataagttttcgactcttttcaacatgtttctgagttagggtgctagttatcactgttattttgtaagtgctctaatatatgcatggttacggttttatcacaataatgatgaactttttatggggaagaaaaagaaacaatttagcaagcttaacccattgtgtttgatatgctaagctttgtatgtataagtagtgcagcctgtccttgtttttggttgttacatagtccaaactgattcggaaatggaaagaagttattagtgtgatttttaaacccctgaaataatgtaaacaaaaatagctgtcacagataaatattgtgctgccaggtgtactggcttcacacctttaatctcagcactttgggaggccaaggctggtggatcacctgagctcaggagctccagagcagtctgggcagcatggtgaaaccccatttctgcaaaaaaatacaaaaattagctgggcgtggtggtgcaggcctgtagacttagctactgagaggctgaggagggaggatcgcttgagcctaggaggtgaaggttgcagtgagctgagattgcgccactgcactccagcctggtgacagagtgagactcggactcagaaaaaaaaaaaaagtgaatacaagataactttacatttttctagaaatattttttgttggcttttaaaataataaattcaactatggttctattatatctaaaagttttgattaaatttgcaaaattatgttagattcttgcatgtttttgtcatcaacatgtaacagaaactgtaacagaaaagtccttaatttattttttgattcatgtaggatctgaaccaatgatgctgggttcacccacatctccaaagccaggagttaatgcccagttcttacctggatttttaatgggggatttgccagctccggtgactccacaacctcgatcaattagtggcccttcagtaggagtaatggaaatgagatcacctttacttgcaggtaggtgaattgcttaaaataattttatagacatgctagatacagggatgtccaattttttggcttccctgaaccacattggaagaagaattgacttgggccacacataaaatacagtaactctaataatagctgatgagctaaaaaaaaaaaaaaatgcaaaaaaaatcttaaaatgttttaagaaagtttaccaatttgtgttgggcaacattcaaagccatcctgggcttcatgcggtgttcaagccatgggtgggacaagcttgtgctagaatttttaaaagtgtagtggtgcagcattcaccctcatcaatacattaattaaaaaaaattaagcaatgtgtctattataaagcaaagcttttaaggctcttggaatagaggtgtaagaagtataagctataatttctagagccactaaaatgtattctatgtttttttcattctaagatgcctttgaattggcttttaagtaccactaggaaagataaccctaaatatgacacaatgctaagatgccattttttgtaaaatttctgtgtcggagatgtcagagtgtggtgggggaagagtgcctcacagagttgatgaaataccatcatttagcttcaactgaattcatttaaagtaattcatcttaagatacaagaataggaaataatcggtcaaaagaagtgtaacttgaagatgtagatacgaattctgcctttagtcttagtgaattgagattctcacatatagcgtgtttaaggaaacttgggggggaggttttatacacagaatttgtgattgtcagggcaaagtattgtaaatgcagcctgtgtttattacagaactcctttagcaaagaaatactttaaaaaatgacttcgaagttttaactgagtagtgagaattagatacagaagtgttgaattctaattgtgagctaatatcctttagtagtagttcaagtgaaaactctttttaccttaattgccctttaaagtatttttgctttaaaatggtttattatttaggatttatcagggagaattataaattatatttgaagtaattcatttaacattaaacattaaatttcaaatgtgttattttattatggtagccaacgtatattgattgcttatgagcctggcagtatgctaatcattattttgtcaatcttaaagggtaggtaatagtatccccatctttaaaaagagaaaactgaggctaaatgcaataagtaatttgctgaagctcacttgctagtaagtgagcgagcgctataaacctcaggttagtcttattccatagactgtgctctaaatagcttaagctgtacagtccaggctcagacattagtcttaccgatggcctgggctgcatcactatttgacattgcatgttctctgatcgataaagacatctttatgtcacagaacttggtccttttactacatctttattatgtacttaaatatatttctactgtgagaaacatgaatgggatctacttaatctagatagtcaaactctacatagggaattgtatttattcaggaatctacagactggagctgtttagtacctactttcaagtgagaaatgggatcaagttttgtatttaaatgttaagcgttttgtagagtgagcaaaagttacatgtgttttctgaaaactaagattttcattaactacttactctgaatccttttattcagagtgcagtctatggatcagcagcattggcattacctgggagcttattagaactgtataatctcaggcttcaccctacaccttctgaatcagagtctgaattttaacaaggtccccaggtgactgttcagcatattaaagtttgaaaagaactaacagacaagattttaagtcagtatttcaaaaatataaatttaaaaaatcttaccaaaaagaagaatccctttttttttttttttttttgtacactgtaggtgggtcaccaccacaaccagttgtaccagctcataaagataaaagtggcgctccaccagttagaagtatatatgatgacatttctagcccaggacttggatcaacacctttaacttcaagaagacaggtaatataaatacccttttgatccccaatgaacaacatcatggttttatgtgtctgttcagtgagagtcaatactttgaaatgtttccctgaagtctgttttaatgtaactgtgttgcacagaataaacattaaacacatcatagaatctacttaaattgtgttgatgatgaactgtacttaacagtgtagaactctagattttctctcataggtaattctcaggtgtttataggtatgccttatccacctgcccatagctccaacctacttaatatacatgtagaatgtgactatggtttaaatcattctgattgtttaagaagtttaatatttaatatttaaaaattatgtgaaagaacaaatgaaaatttagagtttcatctagatctagggcactcgtcagctgagaagtagtatggacttgtctttattttcttctttttttagggtccccaacagggtcctgatcagttgcccaggctagagtgcagcggcacagtcataactctgcagccttgaactcctgggttcaaccaatcctcctgcctcaactgtcctattgggatataggcacgtgctgctatgcctggctaattgtatttttttttgtagagatgaggtcttgccggattcaggtgatccttgcaccttgacctctcaaagcgctagattataaatgtgagccactgtgcctggccgacttttcttttaagtagaaaatttagtagcttcatagacacaagtgttgtttcctattattattgtgcttagtaggacatataaacaaagtttatcagttaagttggtaagttctttatataaagatatgtctgctgtttgctttagatatatgttttatgcctttccctaaattgtatttagtgaagttgagagttcaagaatattagaaagcatttttcagtggattcgtgctatttataggcttgatatgtctggcatactaggcttacttgtcaagtaaagcaaaattcattcactgtggtaaacagattactgtttcttcccaacacttctagacctgccttcctgtccaacaggagccactagctaagtgtggctattgatactaaagatatagctagtctttattgagatacactttaagtataaaatacacaccagagtttgaagacttagaaagaatgtaaggtatcttatttttttatgttgattacatattgaaatgataatgttttggatgtgtttggctaaatattactaaatttcacctgtttgtacttttaaaatgtgcctactagaaatggtaaaattacacgtatggaatttattgttcctaatggatagatatcctggtctgggatggttttctaaaggttgataagtaaagcttatgattagtttggtatgaaggctgggcgtgttggtgcatgcctgtaatcccagcactttgggaggccgaggtgggcggattgcttgatttttatgtatttttatttattattattattttttgagacagggtcttgctctatcacccagactagagtgcagtgaaatggtcatgccccactgtagcctcgacatcctgggctcaagtgatcctcccacctcttctccctagtagcagggactacagatgtggaccaccatgcctggctaacttttgtattttttgtagagatgggatttgtcctgttgcccagggtggtcttgaactcctgagctcaagtaatccaccttccttggccttcaaaagtgctgggattacaggtgtgacccactgtgctgggctttgggcagattgcttgaacccatgagtttgagatcagcttgggctacatggcgaaactcttgtctctactgaaaatacaaaaaaaaaaaggctagatgtggtggtgtgtacctatagtcccaggtactcagaaggctgaggtgggacgattgcttgagcctgggaagctcaggctacagtgggctgtgatcgtgttactgcactcagcctgggtgacagagtgagaccctgtctcaaaaataaaataataaaaactaaaaaattaaaaaattgtttgttgcaagaaccactggcttctaaatttgtgcaaggttttattacttctctgatgatacagacaaaggcttacagatattgctgtattcaaaatgtttgaaagactcgtgggtcataatttatagagaatgtttttgatttgaaagttggtaagaatattattgctagattagagcccaaattagttatgccccctggaatttgctcagtttgctttctaatcatgaaagaattggcattaataattgaggaataaattttatatctctcccaacattctctcagcatttagttctggttgctaaatgaagctatttgagatttccttagtttaattagaatctgttttaaaaaatctttattgagttctagagagattctgttctcatttattgattggatattgtctttgttttagaaggattttaaactattttaatccttaattttcttatatttaaaggaactaaaatggataatttaccagttttggaactttctactggtagtggtagggatatgctgtcttttattgtttagactgatttgaatctatagtgtttcatggtttctaagtatctgttgaaaatcaaattttgtcacccttctgtttttctgtatgaacctggtcattttaaaaattaccattatctctgttatttcaaatattgtacattagaaactaaaaacaaatagttaacatgtcaccttttacagaagatagtctttttttttttttttaacataatatgacttttcttattttaaacaaatactaagggatctagtaaattttaggttaatactgtttaacttatggggaaaaaagagtgcctttgtactttgagctaattagaggcatctctagcacatgataaaaattcagttatccattgaatgaagccttttaacacttactgtatttatgttttgcatttttaccataacactttcttctgtttgtgtagccaaacatttcagtaatgcagagtcctcttgttggagttacatctactcctggaacaggtaagtgattctttctttttttttttttttttaaaagacagggtctggctctgctacccacgctggagtgcagtggtgtgatcacggagtaaacaactctgacaccaaatacttctctattcttcgaatgaatttaatataaaatgtttgttggtaactgccaaaattttttattttatatttcaaacttggagattttccaaaatctataacttctttcaggaaggaaatactttgtatattgattattttctgaatcaaatcaccctaaaggtatggtggggtgaatattcagaatgtctttttaagaaattgtatacttaatagatgtttgaagtatctccttagttattaaaacttgtcaataaaaaagccattggaattgggatgaaaaggaatagttaagacactgaataataaaggtgttttgagagatgttaatgcatagttataaatctaaatgccgttgaatagaagcaaccactgattatatacctagtttttctttaagattaatggctttttaataatcatcattatgcttagcacagttcttcatatgtcgtcatatgtgtataatcccatcaaatgtttattcagcaaatatttgagcacctaactgtgtactctgggaaatagtaaacaaaatagatattccctgcctttatggaacttacatttatttgcagaatttacatttataaacaaaacaagtaaattataacatttgttagaaggtattacattttgtggaggaaaaaattaagcagcaaagggggggagggggtagagacttagagttttaaatagggtaatgtattagttttctgttgctgccataacaaactaccacaaacataaaagtggcttaaacaatacacattcattatctttcatttctggaggtcggaagtttgaaatgggtcttggtgggctaaaatctagacattggtagggctgtgttcatttatggaggttctagacaaaaatctatttttctttttttttttgagatggagtcttggtctgtcgcccaggttagagtgcagtggcaccatctcggctcactgcaacctccacctcctgggttcaagtgattctcctgcctcagcctcccgggtagctgggattacaggtgctcgccactgcgcctggctaatttttttttttttttgtatttttggtagagatggggtgtcaccgtcttggccaggctggtctcgaactcctgaccttgtgatctacccacctcggcctcccaaagtgctgggattaaaggcttgagccaccgcgcccagctggcaataatctattttcttgccttttccatttctagaggctacttaatgtttcttggcttatggttcccttcctccatcttcacagtcagcaactttgtaactctttgaccattcttctgtagtcatatctccctctctcttttaaagacccttgtgaatacattgggcccttctagataatctaggataatctttgtattttaaggtcagttgattagcagggttaattccacctgcaaccttaattccctttgccatgtaatgtaacattcacaggttccagggattaggtcatggacatcatttggggacctacccagcttattccacctaccactgatagttagggggcaagtaaactttactcaaaagtctgtaagtgagggaggtagggaatagtattctagacggagggaacagtgtgtctggggtgttcaaggaagaataaggggatggtgactgaaatggagtaagtgagggggagaatagtggaaaatgaggtcagagaggagaggtaatgggggcagatgtattacatggccctgtaggttattgtcacaattggtctttacccagaaaaggtggaagacaataaggatgagactgttgctgggttcaactagtttgggagtaaaagttagcttagaagcaaggagacaagttaggaggctacttgtagcaatctaggtgagagatgatagtgatagaaaaagtaggcaggcaagaagggaaataatacaataacagggaaagatggaacataagaaacaatagcaagacagtagattttaaactaagcaaatcaggcatgtgcctgtagttccagctactcggaaggctgaggcaggaggattgcttgagcccaggaattcgaggttgcaagggagctgattttgtcactgcactccagcttgggtgacagaacaagaccctatctcaagaaaaaagtaaataaaaatttaaaaaaaaaagcacgcaaaaaaactaaccaaattaacaatgatgtaaaatgtattaaacactctggttaaggcaggtattgtcagaatggataacaaaaggaacacccaatacaaattggatcctttgaatcctccaagtctgaatttcttgaggcagtctgtgagcactcattggccgtgtctttaaagtctacatttctagtaaaatgttcttcaaggaaacttagtcattttctatcacgatgctcagaattcttccagcctctacccactgcctgatttctaaagccatttccacatttttacttgggtgttaacagcagcacctgacttgttccaaaatctgtactagttttctgtagttgccataacaaattacgacaaacttagtggtttaaaacaatacacgtattatcttctggtttctagaggtcagatatctgggctgttggttagagctcagatgtcaacagggctgtgtttctgtctggaggctttgggtatgaatctgcttccaagctccttcaagttgttggcagaatttagttctgtgtggttataggaatgaatgaggtccctctccttgctggctgttaccttaagatgttaacttctagaggctgccctcactccttggctcatggctctccatcttccatcttcagatatagcaatggcagatcaagtcctttgttatgcttcatatatctctaactttacttttctgccttctgctggtggttagagctcattcgattttatcaggcccatgaggataatctgagatagttccttattctaaagtcagctgagtagtaaccctaagttcatctgccaagttccttcacggcagtacctggattggttgattggattaccaatcagtcaaaccaggggacagaaatcttggaggcctctttaggctgggcgcagtggttcatgccagtaatcccagcactttaggaggctgaggagtgcagctcacttgaggccaggagtttgagaccaggctggccaatatggggaaaccctgtctctagtaaaaatataaaaattagccaggcatggtggtgcacgcttgtaatcccagctacttgggaggctgaggtgggaggatcacttgaacctgggaggcagaggttggagtgagctgagatcgagccactgcactccagcctgggtgatagagcgagactttgtctccaaaaaaaagaaatcttggaggcctttttagaagtctgtctactgtgtatgtcatgatcaaacatctagaatgtcaccctagtcttttcagccatgtaactgaggttgaatgtctaggaaaattagtgctgaacagccttaagctgatcaaactgtaacaaataggtggatgatgatgctttgttacacgcagaaatagtgattattcagttatttgagtcatgccaggtgccactggctcatgcctgtaatcccgaggcaggtggatcacttgagtccaggagttttgagaccagcctgggcaacatagtgagatgcctgtctgtacaaaaaaaaattttttaaattagcctggcatggtggcacacacctgtagtcccagccacctcggatgctggggttaggaggatcacttgagcctgggaagtcaaggctgtagtgaacagtgatcacaccactgcattccaacctgggtgacagagtgagaccttgtttcaaagaaataattgagtcagtaagtgatcccagggacattgaaaatccaaaaacagggctgagtgtggcatggtggcacatgcctataattccagcgctatgggaggtcaaggtgggaagaccgcttgagccggggagtttaaggctgtaggcagctatgattgcaccactgcacgcgagcctgggtgacagggagacctcaaagaaaaaaaaaaaggcaaaaacacataatgttaagtaatgttttacattttagtggctctcttagttgactgaaaagcatacattttaattttcctaccgttgtcaagtagaaaagcgcatgattaatgttaataaatatctttttgttaacttatttttttctaatatagtaacttctgtgaggttttgtaattgtagaaactatatatgaaaatacaagagctgtgataggaaaaatacctatcatgaattggccactgggagccactgctgcttctactttgactttaaggaatttacacatagaaagtcttaatggggtataagtgacaaagaatatttttgaaaagatgacaaggtgtggagacctatcatgcatggccaatgataggcaagaaatagaaaaagagaattgacaggaaaattgaggggaaaacctagatttttcatttagagctatatatatatatatatatatatatttttttttttttttagctcctgtatttagtgttaagtgaagtttttttggatgattagtaaatcttagctttctgagattggcaagttttataaagagatgtcatgggatataatggcatgactgccactttatgcttaggttgttttttgcatccaataaagaggttggtgggtttattttattttgtaaacattctgtaactgatgttaagatcttttttagaatattatttctggtgcaggaaaacattggtcataagtcaaaataggaaatctggattaaagaatataagaaactcttagtcatggtatattactgcccctggtaaagaacattgaatgtgttttttctactttccccatcctcatccctgaatatttttttctgctgcaatttaagttttcttctgcttttcttcttcctttatattttttattactttttttcttgagaagttctttcacttatatattagctctcttccaaaatggtaggtcactcgttaattaactagaatcatttgtgttagcatattgttaacaggttaagcgtgatattaagtgatagtagcactttatggctgcttttgttgatgcaaggacctcagagttttgatagtgttcctggaagtgggggccaaaagggactcttctttttctggtttgggttaggtactccttacatgtgttccttttaaagctctctgtttggctctcatctgtctttattacctgattatgaactccttcaagacagagatttttcctgtgtcttcagtgtttacccatctcagagctgggtacaaaggacctaacattaatcctgtgcttttccacttgacaacaataagaaaattaaaatgtatgcttttcagtagactaagagagccgctaaagtgtaaaactttacttaacattatggttttgcatttctttctttcttttttttttttttgagaaaagatctcgctgtcacccaggctggagtgcagtggtgcagtcatagctccctgcagccttaaactcccaggctcaagcagtcctcccacctcgacctcccatagtgctggaattataggcatgtgccaccatgccatacccagccctttgtaaatgtttgttgactgaatatattgatggatataagctgtagagagttgaatggtggcctccatacaatatgtccacatcctaatcactggaacctgtgactgttaacttacatatgattgagttaaggattttcagaggggagactctgaaggagagtttaaagagttaaggagggaaggggacagaatcctggattgcctggatggtgcctaaatccagtcacaagggtccttgtaggtaagaggcagaaagaaatttgaaactgaagaggaagagaaacatatagaggagagagaaggtgatgttcagaagggggcagagattagagtgttgtttccaaagcatgccataagtcaccaaaaggtggaggaggcaagcggcaagcagtggatccttccttagagtctgcagcaggcatgccaccttgccaacaacataattttggactttgggcctccataatttgtgagagaataaatttctgttttaagccatccagtttgtggtaatttgttacagcagccacaggtaactaatatatgtaaatattgttttgagacaatgacattccaacaccagtatccactaccaaataagaggattggtgtatttgcatccaacttggcaaggcatgatttttctttaataatactgaataaaaactatccttattctagactatgtagcttcttattgctgctgaaccatattatcacaaattaatatcttaaaacaacacaaatttattgtgttacagttatggaggtcagaagtctgaagtaggcctcagtggactaaaatcaagatgttagcaggactgcattcctttctggaggccctagaggagaattttttttttcttttctaagttgtagaggctgtccacattctttggtttatgtccccctaccatcttcagaacccccagtgtccagtgagtgtttctacattattattttcctttcctcttccccttttaaggaccttattggttatattgggcctatttggataatctaggataatcttatttttaattagtcaccaaaattttatttactctcatgtcagattaactatgctaccattgagtggtctctagttatggtggtggcaatgtttatgttttagtcaaaataataaattcagatggttttagaaaattaaatagaacttactgtaatcccagcaatttgggaggccaaggcgggtagatcacctgaggtcaggagttcaagatcatcctggccaacatggtgaaaccccatctctacaaaaactacaagaaattagccaagcatggtggtggacacctgtaatcccagctactcaggaggctgaggcaggagaatcagttgaactggggaggtggaagtggcagtgagccgagatcgcaccactgcactccagcctgggcaacgagagcaaaactccattcaaaaaaaaaaaaaaaaaggaaaattaaatagaactttaatacaacaaaatgcaatgatctttaaccttattatgaactagccagtccagatcttagagctattctttttggaatttactatgtccaaattagatgctatattagtttactcttgccattgtaacaaattaccacaaatgtattggcttaaaacactttacatttattctcatttatcccaaagtcagtttcactgggctaaagtcaaggggttgataggattacctctggagattctatggacaatcagcttccttgtttttttttttttcctcagcatctagctggattctcctttatgcctttttcctccatcttcaaagcatatcattccattccctgcttccataatcacatagccttccctgaagtaaaatctcctacttccctcttgtaaggatacttgtggttacatatagggcccacctggataatctccccatctgaggatctgtaatcacatctgcaagatcccttttgccacatagatagcatttgcagatttcagggattagaatgttgttatcttggagggctgtcatttagccagccacgtcatcatattgctaattcttaattttcagtttttaattttgctatatttctcttaaagtaattgaagatattgtattttcccctcatattatctgaatatagttacatctaactttattcctttgtcagtgtttgtactgtgactatgtaaatactgctcagtgctgaaccaattaatatgattattctttctgtaaaactcttgattctccaatagttaataattgttttttttctattaagtctaattttctatgtgccgtttgttccctttattttaagcaaacattctgctgctatggtacatacctattttagtatactcacttttcaagcacatttttctttgttttaaattgagaatttctctctcttagcctctgtcttgatttcttgttttggcatggtgtatgacaatcatcctaggacttgcatgtttgtagtgttgagttctttttcctagaaagcatgcctccctctttatgtcctgattttggtgaagaacatatttaagtagctttctaaaaaagcttgcttaagaagtaaaaatttaaaacctcatgtcagaaatgctttttttagtcttcacacttgattgatagtgtaggtgggtaggttggaattttggaggcatcattccattgtcttctgccttccagtgttctgtggaagccatttgtgatgatgattcctgagtatttttacgtgacctgttttccagaatttatgatatttctatggttggtattctcaattttgcaaatgtgtcttggtgtggaactttttcatttgttttgctggggaattgatggatcctttgcatcaagatgcttatatttattcttcagttctgggaaacttccctgtattatttgtttgataattgctttctctctgctttctcttttccgttttttggaattgcttgtttgtgtgttgcattactgcagagatttctaattattgtttcccttttatgttatcatttatatctgtatgctactttctgagagattttctcaaattttgtgtgttttctttttttttttggtggggggtggtgggcacttttgtttttgttttgagatggagttttgctttgttgcccaggctggagtgtagtggcacaatctcggctcactgcaacctgcctccccaggttcaagtgattcttctgcctcagcctcccaagtagctgggactacagatgtgcaccacatgctgggctactttttgtatttttagtagagacagggtttcaccatgttggccaggctggtcttgaactcctgacctcaagtgatccacctgcatcagcctcccaaagtgctgggactacaggtgtgagccaccatgccccaccatctcagttttttattttctctgtcattttaattccaggaacctttttgttgttgtcctttgaatgtacttagaaatatagcattctcttctctcagctgggcacggtggctcacgcctgtaatcccagcactttgggaggccgaggtgggtgggtcacgagatcaggagatcgagaccgtcctagctaacaaggtgaaacaccgtctctactaaaaatacaaaaaattagctgggcgtggttgcaggcgcctgtagtcccagctactcgggaggctgaggcaggagaatggcctgaacccgggaggcggagcttgcagtgagctgagatcgagccactgcactccagcctgggtgacagagcgagactccatctcaaaaaaaaaaaaaaagaaaagaaatacagcattctgttctttcataggtaaaatgtcctagcagtgaggttaatagcagtcttttttattcttgctcttattgtctcgtctcttctagttcttggtatttttttttttacccctctatcattgctggtgagcaaatatttatcaaatgaggcactaaaagctatttggaataagtgtgtgcataggattcggtattggcagcagggtagaattgatggagaggagctgttttatatcttactgggcttcacttttaagtgttcccaaagaagaatcttttaatactcagccttatgcctaagctggtgttctgaatatgggcaggggcaaatctccttttcaatgtgcagattttcacttaatctccttacagttgtcttctgctgtcagactcattgagttttgagctgtttaggttccttttctccagagacaaaatctttggtcttttgagggtggattgggaaagtgagagttatctagctgcctgggataaggagaggcctggtctgtaagcccttattatatactttacactagttttccttaagttcagtcaggagtttctcacagtatcattggtccccaaaacctgacacttttttagagtgtctgtcagtaggggtttgcaagggattataagtgaatacagggttcagttcaccatgcttgattggacattgtaccattcaatatgctttttcggtataatgtgtgtgccatactgcaaagtctgattaaatagtccttataagattatccttacttcagatactagctgttaagtttgggatgatcactttagaccagctgtctataaattaagaggttaccaaggctgcttgtaatgtttggtagtttactagaaagactcacaacctcactgaaagtgctgtgctcatggttacagttttattacagcaaaaagaaacaaattagagccagccaaaggaagacacatagggtgacgttggaaagggttccaaatgtgaagcttcctttccattgtcttcagggagatgtgttatcctcccagcgtcaatgtatggcaatatacatggagtactaccaactagggaagctcactggagcatctatgtccacagtttttattggagtttcattacataggcatgattgaattaccaatcaggtggttgagttcagtctccagtcttcctcctcttgttgagcagagaccaaatcccttattacatattgtgctactttgtttcatgataagaagttaacaccgccaggaacctcttttttccaagtttcatttggctcgtatctatttaaaatttactagtcttttaatctcttttgttttcatttaggttagtggtctattttgaaataattgaatctttcttttaattgaagacattttcataaagggtaataaggtcttttgccctctgctttaatccagtcttaggaagaatgtttgaatagtgatttactcagggagacacattgcagtccgatttgatgtggtttgataggcacactttattttcatcttacaaagcatggcatgtgggcatcagaagtctgattgaaaggaagtaaaattagtggagcaattaaacattaactaggtggggggcaattatgctaaagttatgtaaatagttttagattatgtataagtaattatatttttcagagtagttgacagggcaaaaattagattgcttattcgtttgagacttatttttgatttgttttatttttaaaggttgtaacggttgtcacaattcgaaccttcatttaatttcttgcttgaagattattacatgatgtagcataactaaattttatcttcttaatggtaatacttgtagactgtagaaaatttggattggcttcagattaaatgccttttactgtcttcagtttgttaatggaatgtctttgtagtaactaaaattagttaagagtatcttttgtataaatatatgcttccacttactaaagcaatagttggtaacttagttgataagtagattcttaaaaatataacagcacttgtcaaagtgggatgtttcattctaaatcagacttattttagaaatgtattgaacaggttgaatatcccttagcagaactgcttaggaccagaagagtttcagattttggaatatttgcattatacttatcagttgagcattgaaaatctgaaatttcctttgagtgttatgctggtgctccaaaagttacacgttttggaacattttggattttgtatttacagatttgggatactcagcctatacctattaaatgcttctgtggtgatgagggaagtaaattgttaaatgtattataggatgatgtactttagtattcctccacatgtaccccatacatttgtacaaataaaaagctatccagtatagttgaagattacctgaaagagaatttttaaaagtttaataaatattacttagttattacatctataatgaaccttaacacaagacttaggtgttactccaacaataaaatgggacaatagacaagaactttaaaaagttaactgttgttagtaatacataacttcaattacagcacaaatattaatttataaagtcaagtctaacagacttctaggaatgatgtccatgtcttgcctccaaatgatatcaaaacaaaactacagcctggacaggatcaaaagagttatcaagtaaaaactacaatgcaataatatcattctaactgaaaagaaaaaatataatcacttaagaatttcaaaaatctgctgtgcatggtagctcacgcttggaattgcagcactttgggaggccaaggcaggtggatcacctgaggtcaggagttcgagaccagcctggccaacctggtgaaacctcgtctctattaaaaatacaaaaattaactgggtgtggtggcacacacctgtaatcccaactactccagaagctgagacaggagaaacgcttgaacccaggaggcggaggttgcagtgggctgagatcgtgccactgcactccagcctgggcaatagagtgagactctgtctcaaaaaaaaaagtatttcaaaaatcttacttctttagggttgctaaacaatttgagttcctagactcctttgaattcaaatttagaaactagaactaatctaatttaacctattaatgtacactttcctttaggaaaaatatttttcagatcacctcacatctattaagcttattgaagaatatattttatccagaacactattctagaccttactagacaacaagatgttcaaatagtactgctattttgagttctacaaatctccaaaccgctttctgttgaggctgaactaatttacactcccaccaacagcatataagggttccctctgcagccttatcaacattcttacattcttattttttgacctttttttttttaagttggagtctcactgtcacccaggctggagtgaagtggcacgatgttggctcactgcaacctctactccccgggtttgagcgattctcttgtctcagcttcccgagtagctgggactacaggcacccgccaccatgcccggctagtttttgtatttttagtagagatggggtttcgccatgttgtccaggcttgtctcgaactcgtgacctcaggtgatccaaacgccttggcctcccaaagtgctaggattcagatgtgagccactgcgcttggcctattttttgactttttaatagtagccattttgattggtgtgaaatggaatcacattgtggttttgaattgcagtctctctgttgattagtgacattgaacattttttcatgtttgttggtcacctgcatgtcttcttttgagaagtgcctgttcatgtcctttgcccactttttaatgttttttttcttgttaagttctttacagatgcctttgttggatgcatactttgcacatgttttctcctattctgtaggttgtcgatttattcttttgatagtttcttttgtgtgcaggaagtcattagtttaattaggtccaacttgtcaatctttgtttttgttgtatttgcttttgcgatatgagttgtaaagtctttgcctaggccaatgtccagaagaggtttttcaaggttttcttttagaatttttgtagtttgaggtcttacatttaagtcttcaattcatcttggttaattttttttatatggtgagaggcaggctgcatatggttagctagttttccttgcaccatctattgagtaaggcatcctttatccattttttatttttgccaactttgtcaaagatccattgtttgtaggtgtgtgactttgtttctgggttctccattctgtttcattggtctgtgtacctatttttgtaccagtaccatactgttttggttactgtagtcccatagtttgaagtcaggtaatatgatgctgctggctttgttctttttgcttaggattgctttggctatttgggctcttcttgcttccctgtgaattttagaatagttttttataattctgtgaaaaatgatgttggttatttgataggaattgtgttgaattcctttgggcaatatggtcattttaatgatgctgattcttctaatctatgagcgtggaatgtttttccatttgtgtcatctgcgatttctttcatcagtgctttgtagttctccttgtagagatttttcacctcctgggttagatgtattcctaggtattttaatttttttttttttgatatgtggctattgtaaatgggattacatttttgatttggttctcagcttgaatgttattggtgtatagaaatgctactgatttttgtgaatacttttttaagcactcgcttatgagtgagcatatgtgatgtttgtctttctgtgcctgggttgtttcactgaagatactgacttccagttccatccatgttgctgcaaaattgattcctttcctttaaatggctgaataatattccgttgtatatatacaccacattttctttattcattcacccattgttgaacccttagttgattccatatctttgctattgtgaatagtgctgtgataaacttatgagtccagctatctttttgttatattatttcttttcgtttggttagatacccagtaagagaaattgttggattgaatggtagttctatttttagttctttgagaaatctccatatggctttctatagaggttgtactaatttacgttctcaccaacagtgtatgagttctcttttctctgcatcctcgccagcatctgtttgtttttttgtttaacaatagccattctgactagggtaaggtgatgatgtagttttgaattgcatttctctgatgatttgtgatgttgagcattttttcatatacctcttagccatttgtatgtcttttgaaaaatgtctattcatgttctttgcccacttctttaacaggttatttttatcaaatatatctatagatatatttcgagatggagtcttaaactctgtcatttaggttggagtgcagtggcatgatcttggctcactgtaacctccacctcccaggctccagtgatccttccatctcagcctctcaaatagctgggaccacaggcacacaccactacgcccagctaattttttgtatttttagtagagataaggttttgccatgttgcccaggctggtcctgaactcctaacttggcctcccaaagcgctgggattacagtcacgagccacagtgcaaagccaagctttttatcacagtagcttttccccccaccttctatagataatcttttttgtttcttaagaacatacttggagaaatccatgtgactataaacactttggaatgagttaggatggttttcaactcatttgggaattaaggataaatggcaagtcaggagatacatacaatagttagaatatgttaagtagcctctagaaaatcaataaaaatggagcatgactcatgcgcattgacctgtagaacagtggttctcaaatgtcttagttttgtagtttttaccttgtttatactcttaaaaattaaagagcttttgtttatatagattatagctatcaatatttactgcattcaaaattaaaacaaaatttaaaatttaagtattaactcatttaaaaataaagctatttcatataaacataatcttttttgaagtgaacagtaactattttctaaagaaaaaaagatttgcaggaagagtgacattgtttttgttttaaaaatctttttagtgtctggcttaataaaatacctgtgaattctcatgaatctgcttctcttttcaacctgagtctgttgaatcacatgaagttgcctctggaaaactccactgtacactaataagagactgagaaaaaggcaaatgaaacttcatgtttttgtgaaaataattttgagttggctgatctcatgagagagtcctgggggagccaagaatctccagaccacacttgtagtactgccacaggaaataaacatgttaactagattactgcctcagagctcatgctttggattccgattgcctggattggaattccaactaaccttctggatgttatttaatattatcctgtttcctaatttgttaaatggactaattggaccttttgtaggattgttagaattaaataaaattacactcgtaaagtgtaataatcacttaataaaatgctaccttttttttaatttttttatttttttgagacagagtctctctgtcacccagggtgtaatgcagtggtgctatctcagctcactgcaacctccgcctcccgggttcaagcgattctcctgcctcagccttgagaggagctgggattacaggcatgcaccaccacacctggctaatttttgtgtttttagtagagatggggtttcaccatgttggccaagccagtcacaaactcctgacgtcatgatccgctcgccttggcctcccaaagtgttgggatgacaggtgtgagccactggcctggcccttaaaatgctaccttttactatcaaagt

SEQ ID NO: 272 - DNA, 32742 bp, Homo sapiens
  source 1..32742: mol_type = other DNA
gattgcgcgagggggagcgagcgagcgggcgctgccaggagcccgcagccctggcgcccgccgccgcccggagccccgcaatatgccgccgcggccctctggctctaggccatggcgaggctctgccggcgtgtcccctgcaccctgcttctcggcctggccgtggtgctgctgaaagcgcggctggtccccgcggccgccagagcggaactcagccgctccgacctcagcctcatccaacagcagcagcagcagcagcaacaacaacaacaacagcaaaagcagctggaggaggctgaggaggagaggacagaggtgcctggggcaacctccaccttgacggttccaggtaggtcctggctgcccagcccggtctttcagtctcggccggcgatctcttagggcctcgccggcttcctcgccccttccctatccattcctatcctcgttcgttcctgtcaccatccctcccgatctctctccccagactggctgcccagcctttggtcccttgatctggtgtcgggaatctgccctccgggtaatgagctttctgagcagctcagagcactgcggtgggttggagaggggtcgggaaggctgggggtgggtgactgcctggattgatctttttcttttccctcccttcttcctgaattctaccctctgccctgggaatgactgtaacacacacacacacacacacacacacacacacacacacacacacaccgttcttaaatcccttaaacattttgttctctatccttttctctcctagagactgagaaatcttgccatggacacccacacaccccttttcaccatttctccatgcctgctatatttaaatttagccatgaagagagaaatctttatatattttattatttatttctctttctctttaccccaggaagggtttaagggttcatcttattgcaaagaactcttttagtacaataagatgaagcaaaacaaaacaggagtttgtaattgaaggaaagggaaaaggagagggggacacataaggtgaagtctggagtggtgttagaacagcaaaagcctatccctagagagagaaatctccttacttgttagtagaacttaaatgaggcagattcttgacactgttcagtgaaggtgtagaaatacggctgtagtataggtggctgtaacagttccgcagttcctccctctttccccccattaaagctccatcggtaagcaaatagctagattatccatgtatattgcatctccctaccccgcaacccacttcgcttcatggctgtagattcttgtctgctatttggaaagaaaaaaagcctccaattttctggcacgagggcttaggttttgtgaaaccaaagtgaattttattatgacgtttgtttttgttttaaaatcctgcctggtaacactatatgagtgctgaaaatgagatttgaaagagtggaatcagcatcacattttgtattgcttgctcatcgtcaaaaagcagtacacaggcatgccagctgcgattcatgacacagccaggatgatttaatttatcagagtgctctgagcataggatgaaatcaccaaagtgtgcaggaaagcatgtgtttctgacaccctcttaaaccaattaataacactcaagtgtggctaaaagtcttgaaaggtatacagtgtatggtggttttcctacccagcttttaataactgaaagtgataatatggtttgggtgaggctgctgttagacatactgttcgctaaagttaaggaaattggatatatcagattgattggcctcattaatagagatatttcataaattcactatgaagccgaagtctgggagagtgttggtgggttttatggtttgcagtatatttttatttcaatggacctttcaggaatattaaatgaattttgactactgtaatatatatatatatgttgtgattagggttatgaactactgcaataatatgaaacctgaatccagcatgcaaattaaaatgtttgctttctgatatttgtgagggaatattctgaaaaagctgattgtctgggaaattagcagtttttgttttatttacctattagattgagataaaggaaccacactcttcgatagatcaaactagaacctgagaagtaacctatgatgattcttcttcctcaaaaactctaattacccaagccagtggcaaacaagggagtaattcaattgattgctgttttagttattggaatattgagtcttataatgcaacacagcttatagacaaatgaagttaaaatattcctttgaatgcattgtgatctctccattgaactggtcttcctgtttcaacctttgtttccctactgtctgttctcctcacacagctagcgatctttaaaaaaaaaaaaaacattaaataggatcatttctgcccacactcctccaatggcttcccgtctctctcatactagatgcccagatcgtgaaaatggcctaccaaggtctagatcctttgtatcctccttttcctcccgtctcctttagcccttaccctaactctctccactgtagccacactagctctattttctttagcttgcaagtggacccaagtgtttggcctttgcacttgccattttctctgcctggaattctggaacttcacatttttcaggtttgctcaagtgtctcagtaactgacagaccttttcctgaccaggtgtttaaaatagtaatctgcacatcctttttgctcttacccagattcattctcctccatggtactcattattctcagctgttctaataagcctgtttttcccttgatagaacataagctctgtgaaaacatggactttgttttgttcactgctatatttctagtatctcgaagagcacctggttggtacccatagacattcaaccatttgttgaatggatggacggatggatggatggatggatggatggatggatggatgaatgaatgaatgaattcactttctcagcatttgttcgtcttcattggataaattctccattggagtttagcaggggatttataaagataaacgttatgtaggaaagtttgtaagtagaagttataaagtatgtaaattttggatctttaattttagttaatttcagtgtttatcttatgctgactacagaaaactgattgatacctatacttgggcctacttattgggttttgtgaagaatttggggttttttttgagacagggttgagtgcagtggcgtgatcatggctcaagtcagtctcaacctcctgggcacagcctcctgaatagctgaactacagatgcgtgccgctgggcccagctaatttttaatttttttctttttgtagagatagggtcctgctttgttgctcaggctagcctcaaactctggaactctgggctcaagcaatcctcccatctcagcctcccaaaatgttggtttacaagcatgaaccataattctttacctgagtatacttaatcttcttatgacctaggaggattttaacatatatacctttaaatagctgtgattgagcttgcattcattctttaccgctgtatgatgcttctgattctttggacatgccacatgaaaaactgtaggacttttctcaggcaaaatttagaaaacaaatatgacacattcaatgactgatatatgactaagccttatcagtccatagtagagaaactcaccattgcctttgcttagtattctctggattttattattctaaaaatttatgtctctttgtattgctgagaaacaagaaagcaagattaaaaaaaaacttgaatgtgaacattttttaaaaatcaggatttaaaaaagtacatttccattttctcattaacttataaaaactccatcttcagagagcagtgaaaataaagactaaggttggtatccatcaaatcaattgttttctccagtgtatacaacagctcttatttctccatctgtaccagtatttgttagaaatatttgagggtcctgagaagaattaatctgggagctagtggtagttgggacaaccatattatattaattctgatggcccattagatgggaggcatgctggggttgggggagagaggagctggagaaaaataatgagctccatttaaaattctccatgtgaagcagagacacaggggatctccagggatcatagaaatgtcttttcagtacagagaaagcttcttgagaggtatattttcatggtgtgaaaatttttgattgcatatttcagtgatatctatttttaaactttttatttcgcaagatgttaaatatatagaaagtaaacaggatagtgtaataaaagcctatacctgtcacctagctttaacaatggtcaaaattctgccattgttttttcacccatacttctacctgtttccactacgtgggatttgtttttaatttttaatttttatgggaacacagtaggtgtatatatttatgggctacatgagatattttgatacaggcataaaatgtataattatcacatcagggtaaacatttatcatttgtgttacaaacattccagttatactttcagttatgttaaaatgtacaataagttattgtttactatatttaccctgttgtgctatcaagtagtagatcttattcgttctacctgactatatttttatactcattgaccatccccacttcttccccactcccaatacccttcccagactctggtaaccatcattctaatctctatctccgtgagtttaatggttttacattttagttcccacaaatgagtgagaatatgcaaagtttgtctgtgcctggcttattttacttaatgtcctcctgttccattcatgttgttgcaaatgagaggatctgatccttgttaatggttgaatagtactccattgtgtatatgtatcacatttgctttatccactatctgttaatggacacttaggttgcttccaaatattggcgattgtgaatagtgctgcaataaacatggcagtacagatatcccttcaatatactgatttactttcttttgggtatatacctaacagctgtattgctggatcatatggtacctctatttttagttttttgaggaacctcctactgttctccatagtggttgtactaatttacattcccaccagtggtgtacaagggtttctttttctccacatcctcatcagcatttcttattgcctgtctttggataaaagccattttaactgggatgagatgagatctcattgtagttttgatttgcatttctctgatgatcagtgatgttgagaccttttcatatacctgtttgccatttgtgtgttttcttttgagaaatatctatgcagatcttttgcctacttttaaataggattattgggtttttttgcctattgaattgtttgagttccttatatattctggttattaatcccttgtcagatggatagttggcagatactttctcccattctatgggttatctcttcactttgttgattgtttcctttgctctgcagatgcttttgatgtgatcccatttaaccatttttgctttggttgcctgtgcttgtagggtattactcaataaatctttgtgcagaccaatgtcctggaaaatttccccagtgtttttttgtggtagtttcatagtttgaggtcttagatttaaatctttaatccattttgatttgatttttgtatatggtgagggataggggtctagttttattcttctgcataaggatatccagttttcccagcactatttattgaatagactgtccttcccctaatgtatgttcttggcaacttggttgaaaatgagttcactgtagatgaatagatttatttttgggttctctattctgttccattggtctctttgtctgtttttatgccagttacaatgctgttttggttactatggctctgcagtataatgtcaagtcaggtaatttgatttctccaattttgttgttttttttttagctcagggtggctttggctatttggagccttttgtggttccatgtaaattttaggttatttttttctatttctgtgaagtatgccattggtattttgatagagattccattgaatctgtaaactgcttcgggtagtatggactgagttttgttttttttttcttaataggtccttttagaggtaaaatgtacatatgtgaaatgtacatattttagtgtacactcttgacaaaaagatatacccatataaacatcaccctattgagatatagatgtttatatcaccttagaaagtttcttcatagccccttcccaggcaattcctgtccctcacctggagacatctgatgtgttgatttcattttcatcatagattaattttgcattttatagaacttcacaaaatggaatccatggcgtgtgtccagcttcttcagcttagtataatttccacagattttattcattttgtagcacatttagtagtttattcctttttattgctgaataaattgtatgaattaccacagatcagtttattgattcttctgttgaggggtatttgggttgtttccagttttagctattctgaatgaagctgctatattcttatacaaatctttgtgtgaatatgttttcatatctgttggataaatgcctaggagtggaattgcttggccaactgatacacttttgcggtgaaaaatgtttttgttccccaatattctatgtagcaggaacttacctctcttaagatgattactttaaaaataatgaaatttaatgtgtagtattactgtatactttttcttaaaataatttaaacttctctttaacttttttttttcatacggactcttgctctgttgcccagactggagtgtagtggcacaatctcagcactctgcaacctctgcgtcccaggctcaagtgattctcctgccttaatctcctaagtagctgggattacaagtgcctgccaccatgcctggctaagttttgtatttttttttagtagagacggggtttcaccatgttgaccaagctgttctcaaactcctgacctcaggtgatctgcccacctcagcctcccaaaatgctaggattacagatgtgagctactgcacctggctaactttatttttaaattgtacatattatattataacaacatgatattttaataggcttatacatagtgaaatagttaactatagtcaaacaaattaacatatccatcctcttatgtagttaccttttttggtgtggtaacaacaccaaaacctactctcaccaaatttccagtatacagtacaatattctaactatagtcctcatgctgtaccttaggtctttagacttactcatcttacatatctgctactttgtactttttgtcctacatctcaccattttctcttgccctttgtagccacttaaatctcccatccatgaaagcacttatttacttacttttttctgttcaaggaatttgaaaaatcaataggaaaagtgggatttgaaattaaccaagtaatcatgcctcaaaggccatattcccagatggggtaattatgatttctttccaggattttaataaccaaaaggagttatttcttggtattgataacaggttgaaaaacatatgccattgtgttgaatttgagtccagtttgttttagtagcagttttatagtgttcttaatgtgagtaagtagaaactgtaccaattatttttctgaaacaaagctcttcccccaagtatataaatattgaacttgattctctttcaatgttctgtctgactaggttagctctggtattgttgtcattcatttacttggcttagtgtaatgtttcttaatttccttttgtccaagttgccttagctaggaaatggatacactattttgtatgtgctattggtaaagtttgctttgaaatacttacctggaagagtctaaaaccatgaaagctatgtgtggtcatgaaatgcagtcctgcattattgaacaacaaggacattttctgagaaatgcgtcattaggtgattttgtcattctgtgaacatcatagagtgtacttacacaagcctaaatggtacagctgactacacgcctattctgtatagcatagcctatcactcctaggcaacaaatctgtacagcatgtgactatactgaatactgtaggcacttgtaacacaattttaagtacttgtgtatctaaacatagaaaaggcaaagtaaaaatggtattatactcttatgagaccaccattgtcatatatgtggtctgttgaccaaaacattaattgctatataactgtgtgagcgtaagaaaacagctctgtttgctttgaagattctgtttggagatgcctctttaattggcgttttgcatcagcacaattcacatgtccaagacatatcagattctgtgccatttaattttttttcttttatgattgttcgtgtcacaatgactaggctgtatttttacatacttgttaataatgtctgtgaatataaggccagtttatttgggcctaaaatgagtgagtgattcagagtgccatttcaggtagggcagcgagtgtcagggaaatggtaatcactttccatcattattaatgtgtcaaatatgcctcagggacctagtgaaccagaactgtaacatgcctcagtaatgtattactcttcaaaccttgagttaataatgccaaagttctccatattaaggttctatatcttacaccaaaagtaagatttaaaattaatttcatttatatgtgacatttcaacttctatttaatatgctttttcttcctcaagcagatttctatatcatcataatttagggaataatttaaaatttaagtaaatatttcatttgccagtataatcacttcttgttcagttttgttcctgttcagtaaagaaatatcatttataaattatataatatgtgtgtgtgtatatatatatatacacacacacacacacacacacacaaaagatctcactctgtcccccaggctggagtgcagtggtgcagtctcagctcactgcaacctctgcctcctgggttcaagcgattctcatgcctcagcctcccaagtagctgggattacaggcgtgagccactgtgcctggacaaattatgtatttttaattcacttgttagctctgctgagatgtagaacgtttacttggctgaaccaacagcaattcgtatgtgtggatccaaatgctagctgggctttatgtgagcagttgaccagtcaaccagtagaaatgttcactttcaactcatagctcatgctgtgaggaccctgagctccgaacacattataaaattccatatcctttgtcctttctgaaataaaataaaaccagtgttcatgcttttattcccactgaccgattcctctgctttttaataataggaacatgacacaaacagaaacaggatgggtaggtaggtgatttgtttttcctaatggattagctataaccaggagttagcgacagcagatgtcctggagtttgtgacccattccactcttgcctcctttcctgtgttttgggaaagggtaaaaattaagatgtcaaattatggctcagtataattaaatgaattatgtttctttaaaacttgaaacatgctgctaatgttctttgacatttgcatgagtagggttttttttttaataaatgtctgggtgactgaaacaagattaccagaaaaatatccatttactgtaagaatgaaatagatgaagaacatgcttttgtgtaaggggaaaaaatatcaccaaaataatgggcatagtagaatttatttaactatttaagtaaaacgaaccattcatggagcaatgataagggtgtgtcatgcaagggattatggttaattcggtttgtatacctgaagttaaaaaacccatttacttatttatatttaaatgaactggtactttcaaagtatttgtatttaaagacaaataacttctcttcataaaataagtacttcctgaagtatatttttcaatatatttgtgctgtttgattctggaggtttagcagaaaacctatgacttaatacttctaaaaatttcactttctttatattaatcagattttgactataaacattatttttatagtattgtatgaaacaactaatctgatctaatgctatttacaataaagcaatgcctaatgttgattaaaatatgtaataatttttttaaaaaaacagaagtattcccttcccgggttatactaatatctatgctttataataaactttcttggaatcataggctcttagaactagaaggaggtaaaaatgaccttctcttatgttctttgcactggcagtgtttgaaaagtgtaagacacgagctagaaactcttaaaagacattcttttaaggtagacacccttaaaagaaatttttcatttttcattccagtgtggtaacactggaaattacaaagtctcataaaactgttagttaaagataatttgctgatttccttcatagcaagtttgataagggttgagcttgttcataatctaaaactttcactaccaactgcttcaagtttgtgaatcagaggagtcaaaagaatgtgtattttaaaattgcttctgtaccatagtataatatttcaaataggagagaagtctatgcatcgataaagcttggcaaatgtaggatgtaaagatgttggaagtgaagatttggaggctcaagagaagagagagggagtcaggtaagtcaacagtctgtggaggaggaaggacctcccaagtagtgaatctttttgcccccatgtatatgtaagggactctcattcctttatactttattgatgcagaacaggcgagccccaaagtggggcttagcctgtgaaggttcttggcttcgcccaggaaggaattcaatggtgagtcagtggtagagtagaagacagcagcttgattaaaccatcagtgttacagctcctatggtgttataacttcgtgactgctcctgcagcacagggctaccccataggcagagagtagcagctctgggcagttttgcagtcatatttatacttacttttaactacatatacattaaaggatggtttatgcagatatttctagggaagaggtagtagcttttgggttgttgggtctttgccatggaaaggggtggtaactccaggctgttgccatggcacactggtggacatgtcttatggaaagctgcttctgccctgtccctgttttagctagtcctctgtttggtctgttgtctgagtcctgcctcctacctcatggcaacgcagaggttcaagggagccaatagaagggtgtagggggttcctgggaaccctgaaactaattagacaatctgcaattatctaacgttcaatgtgctttgagattttcaaaggcatctctgacccctgaaaggggtcagaaaacctaccatggttaattaagcctttgtaagtggactcagtaagagaacaaagataacattcagactcaaataacatttagactcaaaaaacattgtgttttcttaacctgtgaaggttttttgttgttgttattgtgcagatatgatgggtaaaattagcaagcatgacagccatataaccaatccaaccagaaggctctaaacccttaaaagatgtgattgcttagaacgcatgtatctccgtcacttctttcagcattagtttctccattctgttggtggaatggttgccaatatgtaataaatatcttctgataaatcgcatgacttgaaattgattcatatctaggttttgttatgtaataaacgggtgggataccttatacctgaaaaaaccctttgttcagaattcattggcagtcaatccagaaactctctgcattttggctcatggctgttccactgaaagatagtcactgagattgagttaatcttaatatgggctctgatgattttccagtcatctaatccctccaggcctgattataaacctcaatcagttttagcagatgagggcttactctggttgttagtaattcccaaagaaggcatttataaaaacctaaaccttttcctctctcctgagataagtattaatctttggtctctaagctgttttggggtcaaaatagtaatttcagtctacagtgatttaaatctgtaatttaacttgctatttttatcaccaatgctgttccaggcttttggaattaatatcatctctaaactcagtgaaacccatatttttctttttttgattcacacttctcatgatatcattaataactgattacactggaaatgcaagagactatgaagagtgaatggcagggagaatttctgtactttgagcactagctctatcttaacagaatttatctttcacttggaaatccaaaaggagaaatttgtatctcggcacattctggtgttccaaagataaataatagcatgtgttgagtttggaaagctgcagctttagagaacaagctagggcatagaaataaaggtgaaaaagatatagacacccctgacaaatcccagtcctgttgtggtgattgtgctttctgtttataaggagtggcttaaagatcaggatgctatgcagcgactgtacatgttcctatcatggctctaacaaccttggcccaatttactcccctttcttctttatcaatactccttatcaatagtacagtagaaagtctataactcaaataatttgttctctaataattacattatattgaaaattatatattaatattataatcataacatttgaaactaatatacagatcattaaaatatccttacattctaaaacatgaaagtggaaacaaaatttatttttctgtttaacattctgtgactgtcttctcagcctcctctccccgaggtggtcatatccactccagttgctttaaatatcatctatattctaagactccccagagctcacttctgaatatatctaccaattattttgatatctttatgtggatatatcacaggtatcacagtttaataataaaactagacttttgatttcctagcatgccagccaaaataaatatttccttcctaattgttactaaaaaccaataaagtgctccagcagccagtgagtgagtgtagttgatgctgtgcttgctactagctctacactcctcttcatctatcagcaaactccgtttaggagtctactttctaaatatattcctcatctgttaatttttccccatctttactgcctctgctctggctcaggttactcttagcactagctcatattagcacatcaaccggcctccttatgtccattcttgatgctctgaaatccaaatttcctattgaagccttggggatcgttcccaaccctgcccttctatgctgattactatgctgattatttttaagtacacattagttacattgagaaccaagtcaaaaatcgtaatgtgacctgtaaggctttgcatgattcattactgcagtctcaactccagcttctttcctacttcatcattgcttcagttctctgtacctcgggagtgacaggttttgtgcctcagtgccttaacacaggttgcttctctgtttttaacactacccacatccaacacaggcagtgcccatcctccaccccaatcacctggataattacattcaaacttcagatattagcttaaataccactttttttttttaaaaaaaaaaaaaggtttttcattgactttcctgtctgagctaggttcctctgttatgcactctcagaggcatctcctacttgtgaaaggtctgtaattaattggtggctaggcatctgttccatatttccatatttatcttttcctttagtttggaagccagatcaggccaggtacaataattgctttgcttggggctatatccctgtataaatatttattgaatgaataaatgaaggtctcggtatagataattatttgggtaattgaatatgttctttcattcacatgcttgagctggcttctccagagtatataacaaaaggatcttatgtagggaaaaggctgtaggaccttgggactgaagtggtcaaagtatacaggttttggatgaagagcaatacctgcttcgaaaagcaaaatttggcatttatgcaaatttaacacatcatatgccagtttatccatagggttggtgagaatatacaagattcctacaagactgatttcactatttttttttctttttaaacaaaactcattgaatgtctatgtgccagataccatgcatggtgccaaatatatagaaataaaatacatcatcattgcttgcagagaacactcagttgagacatagataaaaagaccacacataataatagtgtgataagtatatttgaggtgtgtatagctactgtggaaacaggtatgggggaaagtaatttggcctgagtttcccagaagaaagcacacttaaagtgagtctagaaattatgtagaaaggaagaaaaaggaaattattttaatttttgactgagatctattttatctttctgtggcaataataaagtggcagacttaagctctgacatattaacaattatattaagtatgagtgatccaaatgcagcacttaaattacagattggaagaatggacaaaaaccaaccaaccaaaagaaatgtaacccagcaatacgttgtctaaaggaaactacttcaaatatcacgatatacttaggttgaaagtaaaaggatggaaaaagatacaccatgtatattaagccattcttgcactgctataaatacctgagacttggtaatttttaagaaaggaggtttaattggcttatggttctacaggctgtacaggaaatatagcagcatctgcttctgaggaggcctcagggagcttccagtcatagtagaaggcaaagagggagcaggctcatcacacagagaaagaaggaccgagagagagagagtgggaggtgccgcttttaaacgaccagatcttgtgagtactgactattgcaaggacagcacccagggcatggtgctacatgagaaatctgcccccatgatccagtcacctcccaccaggccccatctccgacactgaggattacatttcaacaagagatttgggcagggacatacatccaaacttcatccagtagtctctagaattttacattttatttcctatttttagggcttatcattccctattagaaaagaaaaataaatatagcttcttccatagtgcccacatttcttgaagaaaccagactggtaatgcatcttcctttcttaaataaggaaactgaattcagaattcaaacataagccccatttctatcaatttattgggatctactatgagctagcaattggtactttttgcctttacactgatatataatagaaatactttcccctgccacaaaaacagtgggagtgtcaccatcttgaccagattgtgctgttttctgaacatgtcaatcctccacacgaatacaacacagaccagttgtgtgttgatgtctcctataacctctctttcccacctgcaccagcctcctggccatttcccctaatgtatcatgaaacgacttctcttctttccccttcagtgacctcaaatttcatttccacaccccaccacaaggcagtgagtgatttaaaatatattctgttaattattgtggttgcagtatctaaattgagacttttaaaaaatgtaattgcacatagcagttgcctgggcttctgttaaattggaaagttcatgaaaactaataaatatcaagaattttaaatattcatgaaattttctttttttcgggttagcctagagattcactcatagcaagaggccacttagctggaaattactgaagcagaagaaagggcatcacatttattttaagctatatgcattgatgtattttgtggatacaactgaagtttgttcttatcacataaagcacctgtcatgcagtttttgcatttttaaaaatccctgaaattctgtaactgttccaggctgggggaactgagacactgagacaggtggcttaagaggagaagcatatgggctgactatggctgttctccctcgggctctagcccagtgttctcagggtacttgtgtggtgtgttgtctttttgggcttttagagactaagcgggagattatgccacttgcaccaccattcagagggtgaattgtgaagaggcaatgtataaatctgtttaacgaaagatactgtcttaacccaacagatttgcttcctctttagaccttatttatttccaccacttctatactcatccaacttggagggcatggaatcttcattgattctgtcttctccctcttttttaagtgtccaatgacagtgtttttagtatctgttcctgctgtttgatttttatggccactttccctgtctaggccccaacaccgtctgtttggatgattacactgttagggctcctcattttttcttccctgtaactcaaaccatacccttgctgcatcatcttgctgaaacattgttgtctttcctaaattttcattttattgtcatttaaatttgaagtttccatgaggcttctatctgcctccaattgtttataatgaatacttggaaatacactgaaacattggaattgggtaatgaatatccatacaccctccaccaagataaaacagttgttaaaatttcatatttgctttatctctattactgtctttacacacacacacacacatacacacaatattgcagaaccaactgaagcttacttatatacacagggagttttcatctctaaaagcttcaggatgccttccttaagatctggataattttcagtgtacaagtcatactttttaaaaaaaatggtaatggtaaaacaattactaaaaacttttaaataagtgatgtaaaaatgaggaaaaagtatagaatttcaagtaatgaataaatgaatcttatagactggtctgtggcaaaaaggtttactttggcctgtttttatttgtgcaaatagcatactttacttatattaatattatatgtaagtccaagtgttgtatgaaggtaacaatttagctacatactctcttccaggctttccatttattttgttgtttggtcatttcctaccaacctggggtcattttccactggtcaactctgctctttggctgtaacttttatggtgaatctatacagcattggctgtctgctacttcttcccaactttattctggttataccaccatcatccttccatatttgatgatggaaatggcaagatgtaaaaactgggagttgtcatctgccacagtccccaccctgaggagaaaaccagccaggctattaatggaaaggatgaagccagtacacagaaatggagttcctggttccagtcattcccaagatctggatggatagttaacttcccctggcctgcttatataacccttccttgtattccatgacttaataaattattatttttttttgcctcagcaaattctggttggatttccataactttaaaccaaaagtcttaactaactctatatgttatttcttacactaagccctaacttcaagcaaattttaaatctgttgacacttttttctcattgacactgccctgcctcttttatagtccaaactccagcagaaaccaacttagctgtactttctccatgaggcttttttggtccgtgattatctttatctaattgtatcacttataatctctgtttggtgagtcaatatttgataataggtcatttttaaattagtttctaattgtttctggtgtgtttatcttgtctttctcttgagcttatgaatttctttaaggcataggtactgtattcacccattttatgtcgcagaatgccttgtgctcagtaagtgctctataaaagcatgttggttcataatatgttatgaatatatatattaagggaagtatccgaggaattaagtatcttttgttatttatgtatttgctcccaaaatgttcaggataatttaaacaatatttacttgacttgttattatcttcttttttttgctaattttcctagagttttataatgtttaattatctaagtgcattgctatgaaacataatctctcattctgcctttttctttgtgcccatagtatgtcccaacatatgtttaaatgggactaatggatagttgtctgtctccttgtgagagtaagctccatggactgtatctctttgttcttctgctgtgtcctcatgcctctcacagtgctagacacataataggtattccaacattctttttcattaaaaaatatttaagatatatgagtttggggtaaatgctgatggtgttcaaatgaataggaagatgatgacttgagtaataccataagatgctttgagttggagaactgtcagtcgatcatattaatatactgaagtacaattcttaaacctggggcacttttcagagtcactttctttccctgttctgtacttttgtttctttccatttctgcctttatttttgtctcttattagcactgagttttgtcactttttggtccatgatgataatcttatgccttctcactcctgctcacattctttttctcactttcgtttatttgttcacttcgcagtactaatttaaatgtccttggattctgtcttcccaacatgaatccttctttttcctcctcaaaatactgcccaagggcctctgacttataaaaacacatttctaaatctatattgcaaacaagtacatttaattattcagtcttcaataattatcaaatgaaagttctatttttcacaaatagcataacaaatgagggcaatcaatcaactgctttttggtacttaaaaaaactgggtgaccatctaaacctcagttcatggttgtgatgttggacaagaaagaccttggtgagtctgagacttgaaggaaggcctgtgcggctgccctggagagcatgaagtgagagggtggtggtctgaggggtggttaagggaggcgggactcagggatggtcagggttctgtgtactcacacgggcatctgcctttcatgtaaccagtaagactcattctagggctgcatggtttggtggctagagcatggactttagtgtgatggcaactgtaatttaaaatctattcttccccttctggggggtgatcttggggaaactcattaaacttcctctgggatagaattacaccctttagagttattgtaagtattagagataatatgtgtaaaatacctaattcaacagatacttatcaataattattagagattacttttagtaaattaaatcagaagtacaaaccttttatttcattgatttatatactatgagtaagggttgaataggtagggcgagagaaaaagtatatacccattttataactttctaataaatgaggccagatttgttttttaatgaaaacaaattgtgcttcctgtaaattcactttaaaaagtacatatgtttctgtagtaagaagtattaaagcatattgtgcaataaaattactgtttttcttttaaaacaacctagaaacaatattgtctttggaacattacctaaagcaagaaagcaagaaaaatatatttgaaagccaaaaatcagtgaggtattcatctgagctttgacttttcactatctttgatgctttttgttttgaattcaaacaacagtttttattcttctgttcagaaaatcttaacatgagctagaatattcccagcatactaataagccaacaaatactggctgtggtcctgtggaaaactttttattgaaaagataatgttcttctttatgcgaaaaacaagaatattttacagctctctttttcctttgctagccttggcattgtgttggacagtgtgactttgaacagtctttttagaattctgctgtcagcagatgaaatttttttttttttaatacttacctcaaaggagtagtaaattatgtttgtctctagtattgcagttaccactccacaacagagaagggcattaacattataatggaggcagcggattgattaatatattgattagatctggaagattgtgttctgtgaaatttgaggctggttgagttctcaaattggtagggcatttccatctaaatagctaaaaaattttctgatgttaacaatattcacaagtaaaacaacactttacgtgacttttgttaaaagatgagatgaaagaaactacacattaagagaaaagtgtctggaaattatttactatttattctctgtctacaagcaggaagcagaagaaagtcatgaattataaaggccaaacaggatccatcaggagtttactaaaaattcctagtcatgatataaattgtgtccaaattaaagtaatacatcaaatgaaagtttagaattggtgggacaaaaataaatcagagtgttatataggaattatttttagtccactttggttgtaactgaaaataaaagattcagtcacattaaaatgatcttttttctctgtgctttccgagcctagctaatggcaggaaggcatcacccctggacttgtattgagttcacagtaattgcttcctgaatagttaggccaatggataaatgtttgcttcttgatcagttaggtggaactgattgacaagtgtggcaaaggctaataaggcagccgtgtctagatagccagctaaataaaagatttgaagattgctcagttcttaacccaaagcagtttgtgttattctctcaggctttgtcagaagagcaagaattagaaaaatttacttcagaggtggtaattccttaaagtctataacatccaataatttaaaaaatatgatatgctgaactgcaaaatggaaaattattcaatagtcaaatagagagatgggcatagaatacaactctcacattcagtacaacaagggcaggtaaacatttactacgcccagaatctctttggcttgctttttgaaggaactgaggggttttgtgtgtgtgtgtgtgttttgtttgttttgagacttgagttttgctctgtcaaccaggttgaagtgtaagtggcacaatcacagctcactgcagcctcgacctcctgcactcaagccatcctctcacctcagcttcccaggtagctgggactacaggcacacgccaccatgcctggctaatttttaaattttttgtagagacagggactcattatgttgcctaggctggtcttgaactcctgggctcaagcaatcctcaggcctccccctcacagaatgctaggattacaagcatgagccaccacacctagctgggactaatttggtttcaaggtactgtttataggcagagaggacataaacataaaaatataaggcaggatgtcataatatgctctgttaacatttaaaagtgctgtgggaactcagggaaggagagacaaactttcaattataaagggactgatttcccaacaatttactatgtaattacctgctttttgattaccgtattttgattgcctacataacagagggtggctggaaagtaatagaaattttctttgctatttgtctctagatagaggtgtagctagtagagtttaagcaggaaataggaactaagattgggtttgtatttttatatttacatgttcagcatagtaatgaattcttccacttctattttgtttttatttttaaatctttaagatttcaaacatagaaacaaagtcgatatgtaatgggtacccatgtgctcaccactgagattaatcaaatattagctttttgctctgtttgcttcacatttgtctctccctctttttaaaatcagaagtttatatttaaattgttttttagagatagtctcgatctgtctctcaggttggagggctcactgcagcctcaaactcctgggatcaagggatcttcccacctcagcatcctcagtagctgggactataggtgtgcaccaccacacccagctgatttttaaattgttttgtagagatagggtctcactgtattgcccaggctggtcttgaactcctggctttaagtgatcatcctgcctcagcctcccaaagcactgggattacaggtgtaagccaccttgcctggcctctctctcttttaagaaataaaaatcagagatagaatcaagcctcattttcatcccttttccttccttacccagaattaatcactgtcttgaattggtgtcagtcattttctgtttaaaatactgtaatagatgtatatacatattatacatatcctattgcagttttcttcacttaacatcatgtttgaaggactttccttattgatatatttgcatctcattaacttactatgattactgcataatattgcattgtatatataagccacactgattgtcaggtaggctttatctttggctttgtagtatgctgggtgcaatgatctgtttagtaggtatgtcgttttagaggcatataacaatttatatagggttcagacaaagaaatggaattgctgaattatatggtatgtacattttcaacatttctaggtctgtttaagttcccctcaaaagcagttgtacagtttgcattttcatagttaatagtgcaatatttttcatgtttttcctcttctatttttcttttctgggagtttgtggttgttgttgtacttactgtagtaatacttcaggaccagttactgttctaagcacattgagtatattattttatgcaatcctctgataaccctgtgaggtatatctgttaggcaggtgctgtcattgtcctcatttcatagaatgaaattcaggcagacaggtagtgtaacttgccacgatgatgtgggtagtgagaaatggagccgggattagaaccctgtctgtttggctcttaaaatagactatacagcctctctgggaaaagggcccatccttactcatgaagtcagagcacatttttgaaaatagcagtggtaactgaaacaattactcttcttttaaaaaatgtgaagaagagagcatgattaaaaataaataaaataaaagtaaatatttaaaaccttagtttatgggaatctctgagcccaaagaaattgcatgaagaatttttgtgtatttatgagtgcatgcttttctttgttgggggcgcagttgagatgggagtgaggagagatccatacataaataagattctcaaagggattaaagaattactgttctggtattaagaggagagatcttttacatggagttgcatcactgaatcaccaagatggactgactttaaaagttcatttatgtttccttccaggaggacggtagatgagtctactgtaatggatgcttctgatcagatgcccctcccacttctctgtctccttctctcttgtattccatgctctagtcaggctttcctctctgcagtttctgccagctgctaccttaggcctcagtattttttctctctctgcctggaagtctcttctctctggacagcttctgcttgctaaggtgaagagagactttctggtgtcacctttcacttctatcaggaatctttctggactttcccagtctgggctttgtgtcttgctgtgtgtttccaaagcacatgacttattaatgcaagctttcttcatgcttagttgtaatgacatacggatttgtctgcaacctcctgctagactttccagtcctatggagtatggtccattgctattttgctgtttggctgatggtcagtgcctatcaccttgattgacaattattaggtgctcaataaatgttattataaataaatgaatattatttatgtttacctggttattgaaactcaaaaatctcagtatcatttaaaaatttccccatctcaatattgtgtcatttgccagatccgaaatgcttttgcttctgatcctcctttgtcattgcctctgctctaattttggttttcttttcttgctcctaaactatttcaatagctaatccagtttctgactgtctaaggccattttacaaattgctcccagagaggtctttctgtaccaaaaaggtcttgtcacacacggctcaaccttccttacatcagcagcggaatgaaatccagtcatttccattgttcccaggcttttttcttgctacagctgactgtcattcccttaacatggcatttatttttctaaaacttttgtgctttttctcacgctattccttctttctgatgtacccttgactcaactctaggttttcaaatctactctttcaaattcagtctcaattatttcctacttgaaaatatcccatattccctcatttagaattcatatttccctcttctctatccctgtaatactttgtttgtataattttgtatgcctttcccattagattttgaattaattcaggttgaaattggggaatattaaatatacttacatacacatctaacatagctagctactaactcaaagaaggtgttgaataaatagaagctgttatgccgtatactcctactggacctggcattttacttaattcctggtcagtattcatgtttactgaggcaaatttaattgatatcttaatttttaaaaaatattgagatgctacctacggacttttcttttgtacgaaatgtgtattgcacatgtgttgtgtcatatctgctttttcctttaagatatttcaatttaatatttttcttattttgcttaaaacttccaggccttcctggcaatatagttgctgtctgctaatgctgtagactgtgtctcattcatgctctgctattcatgctgtgctattcgtgctgtgctattctttaaggcactcaatgttctcatagcacctgaatttgtatttaccggtcagtattcctttcagatgttaaattacagggaaaaccgtacaatttactaaggtgtcagagaaacattggagaaaatgctccatctaattctgtttaaatctaaccactttccccactctcccagcatggtgtgtctcatctacttaaatgaaatgctgacagaaggtttcaaaccctttctaaaagacatgccgaagcttgtatcttgcagtttctgagttccatttttttcttcattgatctaaacatactttgcgcattgatagaacaaggagagaaaggcttctgtaaaagggaaaaatggatatttcattaagttttccccactttatttcactgtaaataaattatgtgagtttaccaatggaatcccaaaacaacaaaatagtatatggactgttgttgctctctatcaggctattgtttgtgtgtttagttttctttataagaagctctcttaatctatcaagagactgttgtgagaaaaaaacaaataaaacaacaatcttgggaatgaaagctaagttaacggaaaatataattatttcaaagcatactgagcattaatttccctgttaactccctgcggagacaggagcagtcacattgatatattgactacagtaaaataacataggaatactctcctgtttacattataaattggcatcacattctggaaagcattttagcaatgcacatcaagaagctatgaacagttcacagctttgacctattatttctcctccccaggaaacaattgtaaatttagacaaaggtatatgaaaatatattttgattaaagcattgtttccaaatgtgaaaaattaggtctaaacatacagtaataagaaaatagttaataataacccatagaattttcttaaataagaaacaagataattttagaaatatttagtaccatggttgtgtgtttgcagtataatcttaactgaaaaacacagcatataatattcttttttctgttgagacggagtctcgctctgtcgcccaggctggaatgcaatggcgctatctcagctcactgtaacctccacctcctgggttcgagtgattctcctgcctcagcctcctgagtagctgggattacaggcacccaccactatacctggctaatctttgtatttttagaagagatggggtttcaccatgttggccaggctgatctcgaacttctgacctcaggtgatctgcccaccttggcctcccaaagtgctgggattacagacgtgagccaccacacctggccataatattatttattggctaattttctttttcccctcctacttaatacatgctcactgtagttgtcatgtcatacattttggtgagtcacatagtatcccctctccagaatggctcctactgatacagtcaatattaacaatttggtgagtttcttgaatacattaccgtgcttatacaaatgtagacacaagtaatcacagggacacaatatgatctgaattttgtaggtctgcttttttcagtgtgcttttaaaagtgctggatggaaatcaagttaactctgaaaaatgggattaggaaatatttttatttttctctatagttttttgtattttccaaattttctgtgtagatcatgtacaaaaaaaaaaaaaaaagaaaagaaaacaaaacaaaacaaaaactctctaattaaacgtattaaatgtacccaaaccctgagttaaccagacatttctaatacgggaaggacacagaaataaatgagcagaaaattgaagataacagtaatttgtttaaaataataatagtaactatcagcagatctggtagccatcaaaggtcagctttcatttttgtcagtatcttacctctctgattctctggggtgcttgtgcctctaggggtatgcatcaggatttgggagtaagccataaaatatcaatgatattgaagataagcaatttcaattcttactgttttagtaagagaaacagaacaattaaatatgaaccgaagaagatggctttaggtcatatccctatcccttcaggatattacctatttatcattttaggtcagtggttctcaatcttggctgtgcactagaatcatctggaacctttcaaaaatatgcttctctggactccatccatctgcagtgattttgacttaattggggctggggtggggcctgggaatgtggcaaaaggttagtctcctaggtaagtctaatgtgtagccagggttgagaattgctgttctgagccaagagagttaagcattctagagaaggttaacaatagtaacacattatgaaaattgataatcttgaggttatataagattctcattcaacatttcatttattcaagcaatcagtcatgcattcagaaaataaacgtgtatttagaatactaaatgtttttttcaaagaaaacacgttttctagaatgttcttactaagacaataaagtgaacaagcaccttttagatatacactaagagttcataaatgactgatttcttgcttaacattgttagccagaataatttaattatacaattctctaaactctcactttacctgtaattttcttggtactatcactctctccttctgacttgtaaacatattaaaggctactaatttatttgtgtctctctcagtgcctagtacagatcttgcatatagtaggtgcttaataaagtatgtagcattaagactgcacaaaacaaaggctctaaaactttcttggttcacagtcccctcagtgtctcagtagtattttggtaacaagacaacttgatgtctaacttagtagtcatttgaaaaaaaaaaaaaccatatttgctaattgcttaatggggtatgtgtgcacaactttgccaacgttggaataagattgaacatttccaccttcattttctgctcaaatttattttcatgaagtatttactttctatcagagcagttactgaaaacacagctttacaaagaacaatgtcatttaattgaacatagtatgatctaatgctgaaattgtaaactccctggagtttatgatgtctaacagatgttagtattattgtgcttgcatggaaaatttaaaatgtcttctggcacccctgtgagtttgttatatcacctttggtagctttgagcatagtttgggacctgccccaaatctcaggcttttgatgattttctgttctaggtatgacacagagtttatttactaagtttttgtccattatgttgttcattttagatgttcaactgacaagcctgtatacattctaagaaaagattgatcacactgtttcttttcggcattaaagatatggaaccactaaaaataggtacttaaaaaaaagggacttaactagattcaaggcactgtgctcatatgtgctttacagtaccatttttttattctgtgatcaactgtttcacattttaatgtttttgaaacttgaatgcatgatacagtgatcaagttttgaatgcatgaaacaccatgcattcatgtagtaaatgaatgtttatcatgcagtaaagaaaacttctctgctgcaggatagagaggactgggttgtccggtggcatagggcatagatagagatgatggcctttgggctgtactaaacagttctcttggcaggaggtggaggtcactggccatcccagttggtacagacagttaaccctatcttaaagctcattctattgaaaagtgttaacatggactccaatcatgagttcagtcttaccccatttcccctggcttggagttgtgcagctcaaaatagtaatcacactttacaattatttggtgttgaggatattgcatcctttttaggaactttgggggaatatttttttgtgggcattttcagttttggacgataaatccttttcagggtattaattatataaatagtaatagcttgattctccttttggcctggagatgatatagtcgtctccagacttcattcatcaattatactaaattgggaatacttaggggcattgagtcattaagttgcaaaggaggctagggtactctgtatccaattcaagtaattcacacttaattcatccccaagggggtattgtaccctagcaaatggatctaaccagatttccactgttacattcatgagagggaacattcagtaattgttgattccccaaaggtccttttgtctctctcatatagttttatcaataatttgaaacacctggaggatgaacaatactgttaaaagattcccaacaaatgactcttttaaatagtaatttattagaaatagtctgtgtgaaatagatttggtaattctatattcaaaaatttgttttctcaaatgagactttcccccttatgtcttttttttattattattttcaactgtattatttattctcatttttattgccaacttcaaatttggttctagtatttttccaattaattacttaaaattgggtaacagataaatgatgaatttaatcttcatatgtttgtttttctaaggcaaagcaacaatgttggtcctaatcttgcattttaaatccttttttaacctcaaaagaattagtatatttactgaagaagttgctgaaggaagaaatgttaaagaattaaagaatttgtactttgcttaaagtataaaacttacaaatgttctgtgccagaaatgattgcttacccatcttcttgtcccaccctctacttcaaggccgtctacctcatttcacacatttgcatctctccttgcaattattaagtggttttgagccagtagtcccatctattggtataaaagtaaggattaattctttcattaattcaaatattcgttcattcagaaataagtattggtatttgaggatacagtaaataaaatgagaatgtccatgaccttatagagttaacattctagttggggaaacagaaaatgaacctaatgagtaagttatatatgtgttaagaaggtagtatggaaaaatattatggaaaaaatagatcaaagttgagaagtgggttagcacagcaagtttggttgctctatccttgcttgtcatgaagcctggagctatgattgtccttggccggcttctgggaatgtggccctcagagtgttctttattttactgattgatgatgatattttatatatctggagcaacggggtatgctgttccagcttgtcaagacttcttaggatcatttagcaggatcatgatatacacacgatttatgctgggggtcctgtgtttttgctgccctggctagttatgttacaggaatgtgtccacatgaccaatgccttgacagctttggaccctaagactcaattggccttccctatgtagagacactttgcctgtgtccctgcagctcacagctagaagaaatatgtttttcgtgttgttttactcttcatcctttactataataaagcataattgtgagtataacctatcaaaggacatttgattccttttggtgaatcaccaggcttaaggtggtcttgggacccctgaaacacgggaaagtcagattgggaggacaggagtcatgagaagtgtcattttgacaaagacttttagaaagtgagggagtatgccatttggatttcagagagaagacaattctaggaggaaggaattacctatgcaaagacctggaggtgagagcgtgcctggagtgttcaaggaagtgtaagaaggccattgtggatcagaatggatgaagatgaaggaggggaaatgagctcagagatgcagtgggctcagaaaaggacattgagtgcagaggatgatgtcagttagcacatgcttgctgaatgaattgctaaattctcgtctttcctctaaggaggaatatcttcttatgtttcatcagcttatgtatttctatttttggcagagcctttacatattcttcttaacctctttgttctttcctcagtttttaagaatttttgctgagtaggccaggcgcgatggctcacgcctgtaatcccatcactttgggaggccgaggcaggcagatcacgaggtcaggagattgagaccatcttggctaacacggtgaaaccctgtctctactaaaaatacaaaaaattagccgggcgtggtggcaggcacctgtagtcccagctacttgggaggctgaagcaggagaatggtgttaacccgggaggcggagcttgcagtgagccgagaccacgccactgcactccaacctgggcgacagagcgagactctgtctcaaaaaaaaaaaaaaagaattttactttctctgtcttcttttcatctgttacgccaaacatgaccctgatcttaggtgataactcagtttgtgctgtttcgattcaaaggacggggaaatcagtcataccatgcctcagcgcagaggggatatctgagctgagtctcaaggataagtatctgtgattgaattcccaggttcagggagctgtgctattcactccttcccctcacaccccattttcaaaactcaattctgattttgtcttcacagaggagcgctctcacattagtctgagttaggtgctcagtacttacatggcagtggtgaccagtgttttttcaaacacttaaaattatcttgagctttcctcactgggctgaaggctcttctgtctctctctacctagtgccatcacatgaagtatccttaataaatgttgaataagtgtctgagtgagtgaataaatgcttgtgattctaaggaaggatgaaaaattgggaagaaaaaacaagtcaggatgacaaatgcctgtggagtgagcttggacaatctgttttaggagcttgggacagttgattgatttccattgaggaaaatggtcctttaggtaggcaagaaggaccggagtccaaatagtaatggctcagctctctcatttgttctctgttgagttgtctattgtgtgctagttcttaagttgtaaaggctctttttatgttatccatttcattagctttggtgaatcacacttatttaagccttcagtcctaatggataaaaagtatattttatttgctccataacattttatacctttggagatcatgtctttattctctctcattaatttcttcttagaattgacattttctctgtaataaatattagtttactgcaagtaaatttgttttttattcaaacacgcacatatttttttctttttcttttaaacctcaaagccaataagagtttggatccaatctggggcttaagcaatgaaaaggaggcttttctattttactgattttttttaattcagcacccttttgtttctttaaaagaaggaggcttgtgtgtccatatttgaaatgctgcagagagtaaactgattaaaccctttccaccccacttttcagaatgcataataatatggtcctttttctttataacctccttcgttgtcctctactcttttctgaactttcagccctcattccaattaaatagggaaatcgtgctagtaccctgggagaaagactcgtaaaactactttgatgatttttttatagtagtaaaaataaaatttttaatttactctttgccaggatacatttgccttatatttatttaggaagtttttctactccctagtatcattctttagtcaaaactgttttttctagtcaaaatttccaggttaaatattcttatgaaaaaaattagtattaatttgtgaaag

SEQ ID NO: 273 - DNA, 16538 bp, Homo sapiens
  source 1..16538: mol_type = other DNA
agattccatcctatttctccgatgaaagtatcaggtacctcacccctaagtttagatttgatgatagttcccttaaaaatgaatgacgaataatctaccccatccttttctcacagtagcaaccaaattccagccaagggcaaaaaaaaaatttctttttaatgtagcttagtgtttggaacttgatgttgtgtagtcagacaaacctgtattcggcctccgctggatcagtcactagctgtgtaattttacagaactctcatcacctgcaaatctgggggaaatgcaggtgcgcacagagagcgttttgggcaaagacggcctttaagcttttcttcactaagcatgccgctcgctagcggaacagcagccagctctggacgggaccttgcacagttccgatgacatcacttccgggcgccaggttcgggctttctcctgcagcgataagggcagtcgacagtctttagtagggaaaggagacaagtgctagctactgccgcccaagtggaaggtgggtgaaattgctcactcttcaccccactgacgcttttgcgcacctggaaaagcggttccagtttgcgcccgtcgccgccttacagccgacaggagaccagcgctacccaagtcacgtgggttcagcctgcagctttcttggcccgaaagggtagtgcttcgtacaatcctccttgtccagattttgttaatgcaaatctaattcctctaggttgtgtctgtctgggctgcactgcccgcaactgccttctgcaaataggtcgctcatctctaatccctgggatgccgtgtccctttagtgtggtggagaaaggccctgctttaacacccagaaagttttagaacggatgatctgggggcataaaattaggtgcttcgcagtgtgaaaatactagtgtgctttagtgatgggctgctattattttgggggaaaaggatttgggaagatccttgttatgacaaaacctgtagcaaaaagtggagatttaattccaaagattgcaattaaggataaaataggtgttaggttgcagttggcgtgtgtgtgtttatgttaactcttgtttttgaaccaaatgatccagttttattttgaaagatgtttttaggagatggaatacattaacagtatttttatctgttccatctgcctttgttgtttgattctttttagaaaatccacattttgtcttaattttagctgtcaaaaaataaatagcacttttcagaggactctatcaattattgtactttatattagctgtcttaatagtaagtcttttggtaggaacagcatgcaagtaataataatactaaaaaattttatatctgacccctgttttcccccttggagaacattatattcattcataatattatttatattcccatgttgctatagcctttacaaacttttggtgacttttacaaactttcctgtaattctgtaaaactatatattgaaaaataagctggctaatgtcagttgcaaataataagttgtttctgtaattctttttcaggaattatctatagagtaagtatgctaatcttgactaagactgcaggagttttttttaaaccatcaaaaaggaaagtttatgaatttttaagaagttttaattttcatcctggaacactatttcttcataaaatagtattgggaattgaaactagttgtgatgatacagcagctgctgtggtggatgaaactggaaatgtgttgggagaagcaatacattcccaaactgaagttcatttaaagtaagtagacattatcttagtcatttccacttttttggaaaaagtaaaatcattcttttgtatttgtcatatataaaagttttcaggagctactgtcttattcctttttgcaaacacttttaataactgctatagaaaacctcaaacacttcatcctggcttttaagggtcttcacaataaggtcccaaccttaactaatcctgttgccaaaagaaactgagctcattcccagcttccgtatttattgattttccttcagtaatgcattccttcttttctccacttctatgtttcatggtctcagctgaagtcctaggaaaactgttagtcattgaaaaaaaaaatcctattcatatttatacatataacttgtattagtacttaaataataatacactgttgtattaaagcatagaatggtgcaaggattataaactgtgatgtttatagaggactaccaggcaggttacctaaataaatggacaagataaaaagtggaaaatgtctggaggaggtcactactcagctctagccagttgtcatgtgggaatgcaggacctgtgttattagattattataattttcaagggaaaatggaaatccagattttttttttctttttttttggtgagacagagtctcactctgtcaccaggctggagtgcagtggcatgatctcggctcactgcaatctccgcctctcgagttcaaacgattcccctgtctcagcctcccaagtagctgggattacaggcacgtgccaccacgcccagctgattttttgcattttagtagagacggggtttcaccatgttggccaggatggtctcaatctcctgacctcttgatccacctacctcggcctcccaaagtgcagggattacaggcgtgagacaccgcgccgggctggaaatccagattgttaatgtatttgcagattttttacattagtagctaatttagaatatattaaaatactcttgggaggtggggggcgcccccgcccagcagccgccccgtctgggaggtgggggcgcctctgcccggcagccgccccgtcttaggggtgggggcccctccgcctggccgccacctctgggaagtgaggagcccctctgcccggctgccaccccgtctgggaggtgtacccaacagttcattgagaacgggccatgatgacaatggcggttttgtcgaatagaaaagggggaaatgtggggaaaagaaagagagatcagattgttaatatgtctgtgtagaaagaagtagacataggagactccattttgttctatactaagaaaaatccttctgccttgggatgctgttgatctataaccttacccccaaccccgtgctctctgaaacatgtgctgtgtcaactcagggttaaatggattaagggcggtgcaagatgtgctttgttagacagatgcttgaaggcagcatactcgttaagagtcatcaccactccctaatctcaagtacccagggacataaacactgcagaaggccgcagagtcctctgcctaggaaaaccagagacctttgttcacatgtttatctgctgaccttctctccactattgtcctatggccctgccaaatccccctctccgagaaacacccaagaatgatcaataaatactaaaaaaataaataaataaataaataagaataaaatactctacagatgagtatacctttaagctatcaatttacaacatctgaatagtgaaaaagcctggtattttggaatcacagtcctgtatttgaatcctgaattaagcacttggtattggctctgtaactgtaggcaagttccatatcctctctgattctgttttcacatcagtaaaataggaaaattggctgggcgctgtggctcacgcctgtaatcgcatcactttgggaggccgaggcaagtggaccatgaggtcaggagattgagaccatcctggctaacatggtgaaaccccatctctactaaaaatacaaaaaaaattagccaggcgtggtggcggacgcctgtagtcgcagctacttgggaggctgaggcaggagaatggcgtgaacccgggaggcggagcttgcagtgagcagagatcgcgccattggactccagcccgggcgacagagtgagagtctgtctcaaaaaaaaaaaaaggaaaattaacatctgcctcatagaattacgggagggtggcattagaaataatgtatgtaaagaggcagattgagcctcaaacaataactatgtgaaagggactgtgttggatattagtaaggcactgtgaagtactgcaaagtccttggtttaaggaagcttaacttgattatggagacatgatgtctagacctacaaggagaattaatagtgcaaggcagcatagcataaggaaaaacaagtggtgcagacagtaactattattaccgtgcctcagcttcacagtcctttcagtttttcctgagtgcactgaacttttgaacatgtaaaagttaatggcacagaaaggactaccctgaccactttatctaaattaggtactcccatcctatttattctgtatcatcataccctgcatattttctttgtaatactttcacaatttatacatttgcttgtgtatgtataatctctctcagtagagtctaagtgccaaggtgacaggggccatgtctatattaatcactatgctatgcctagtgcctaacacaatgtttgacacatcacaggtgttcagtggcctttcgttaggccttcagtgaatggagatggaaagaatattataacctgtgttagttcattcttgcactgctataacgaaatacctgagactgggtaatttataaagaaaagaggtttaattggttcgtgtttccacaggctgtgtaggaagcgtggcagcatctgcttctggggaggcccagggagcttttactcatggcggaaggcaaattgggagtaggcgtcttacatggcaggagcaggaccgagagagggggggtgaggtgctacacacttttttttttcttttgagatggagttttgctcttgttgcccagaccagagtgcaatggtgcaatcttggctcatcacaacctccgcctcccgggttcaagcgattctcccccctcagccttcagaatagctgggattataggcatgcgccaccatgcccagctaattttgtatttttagtagagatggggtttctccatgttggtcaggctgtctcgaactcccgacctcaagtgatccacccacctcggcctcccaaagtgatgggattacaggcgtgaaccaccactcccggcccacacttttaaacaacaagatctcatgagaactcattgactatcgcgacacagtaccaaggggaaaatacgcccccatgatgtagtcatctcccaccaggccccatcttcaacattgggaattaccattctacatgagatttgggcagggacacagatccaaaccatatcactaagtgagcattgtcagcaaagacaaagaagtgagaaagtactagacattcagtttagctagagcataggtcacttgaggagactactgggcaaacaggcttcagtgataccatccacctggctcatctcagcattttttgaatacctatagctgccaggcaatacttagggcatttgggatacaaatataaatgagacatatgactcttgcctttgaacagctcaccatataagtgggttagagtgtaggcttatattctggttcagccatttactaggcttatattctggttcaaccatttactacatttgatactgtgcacagttttttgtgcctcagtttccttatctgtaaaatgataataatgaccactaactcaaattaatgttgtgaatattaagtgtgaattcctttaaagcttttagggcattcttcttgaatagcaagggctgaatacaagctagctcttagtaacaatagtagttctactactaccatcagtaaaaatgaagaagacagtaagcagatcattgtgaaacagcatggaaaatgcaataatagaggattacttggcaggaggagtcccttcttccaagccagaaacctgaaggacacccttgacttctccctcaccattccacatccaaatcagtcatccattcatagtaaatccatctcccaaatattttttgcaactttcctctcccttctcactgactgagttcaatcccttattgtcttttgcacagactcttggctatagcttcaagcctcagtggtttccctgcctctttgttagctttgttccataatccacactccatactgtctacaaatcatagacaaaaatacattgttattattaattctttgagaataaagccatgttcttatttggccctagtgtttagcataatccctggaagataaaatacacagaaaaggcatagaaaggaaaggagggaggcaagacagagaaggaagaaatgagttgcagggagagaatttggatttgatgtctcccaaattccatgaaactaaaggttttgagtaggggaataactggtagcatgtgctttagagtattctctggcagcaatataggatgggctctaaggatcaaaggacagagttaggaaagtacaattagaagactgttgaacagactgagatgagggcttttgagacttggcagtgggagtggtgataaacttaaatgcggagagtgagggagagaaaggaagtaaagatgaactttgaaacccaagggttatttgatgccactaacaaagatgaggaatataagagaaaaagtagctttgaagaattaaggaaaattatattacaatgtggatgtgttgaaatcagatcatttcatttatatccccctcattgcctgaaacaatattttaattactcagcaaatattcattgaatgcacttactgaggattttcatttctacacatagaactagtagatcttgcaacatcaaatattggaagatgatttttttttgaaactagcagtgcgttttgcagactctattttattgctccagttctcatattgtaaatcaatcacatggtagcaaatttgttgctagcaaatttgtctcttagttctttacacttgatatttggagtggccatccaccatcctacatggaccaaaaatccaaattacaaactctgagcaccagattcccaaactgtatttcaggattgcaagctatctgctatcctgctgtgacctcaagtggaatgtgttttaaaataaactcgtcgtctttataaaactgtcttcatgtttctcttttagaatttcttttctcccggtcattccagctgaatagctgaacaaactttgatgccttagtccccctgtccctttatattcagttagttattatagttcttaaggttctctgtccctttctttccattcccacaatcgcccagtttaagatataatcattttacacaaatactttcgcagtaatctctcttaaaatcttctgtcagcaaggaaattaattttccttaaatacaattttttcctgtccttcccatgctcaaaacttgtatggaatgctttacaagattattttggtgatttcatttgtcaacaaacaaatccatgggagtctgttgtgcataaactgaaaaagtcagaaacattatccccttaattactgcttactgagttttaaccatagtgtgctatgttagaaggcacacaattagaaaatacttgacttactcagctatataatgattaacttgaagacatgcttttagctgtaatatcatttttcttcatttttacaatcttaaaactacaaaatgctgtctttctttctttcagaacaggtgggattgttcctccagcagctcaacagcttcacagagaaaatattcaacgaatagtacaagaagctctttctgccagtggagtctctccaagtgacctctcagcaattgcaactaccataaaaccaggacttgctttaagcctgggagtgggcttatcatttagcttacagctggtaggacagttaaaaaagccattcattcccattcatcatatggaggctcatgcacttactattaggttgaccaataaagtagaatttccttttttagttcttttgatttctggaggtcactgtctgttggcattagttcaaggagtttcagattttctgcttcttggaaagtctttggacatagcaccaggtgacatgcttgacaaggtaattaagaattaatttctccattcttttttgttatgttgtccatttcaactaagtagcaatagatgtgctaccaccattcacctaaatatttctgaattttatcttagtaaactgaaaaaaattcacatatggtgagaaaaaatagaaagagtagtacacaattttataattcttagcctttcttaataaaatggtaagaggttcatatctgtacataaaggctgaaatagtttgcagatacagttatgtattttgccaaataatgtatgtgaaagaacgtgcttcgtaaactaacatactgcaaaaaaggtaaaataagagaatatatatagattaacataaggacattaaagatgcaatgcacagaattaaatcacacaattacttacaccacagacagggtccccccccacccccctttgttttagaatactacagaggctactgccatatataggaaaacaaacaaacaaacaaacaaaacactgcttcccacagtgaaataataggaagtataggacaagttcttattattgacgttcatcattaagcagttattgtcaacttcaagcccattttccaaccaatagaagagcaaacatagacaggggcagtgattggcctcttattgttcgggtcatcataaggaacagggttgtctgcttacctgaatatcagctatagtctatatttgccaaagtatagcatgttttattcattcaggggttttttgttttgttagtaattttcaatttatttcctttgcatcttttcgtttcacagtatttaattttatgactctaaaaaatatgtttctttgataggtggcaagaagactttctttaataaaacatccagagtgctccaccatgagtggtgggaaagccatagaacatttggccaaacaaggaaatagatttcattttgacatcaaacctcccttgcatcatgctaaaaattgtgatttttcttttactggacttcaacacgttactgataaaataataatgaaaaaggaaaaagaggaaggtatatttctaattagtaaagttgaacagataaatattcctggattgtgcctaaaaatagctgctcatttctgcaggtattgagaaggggcaaatcctgtcttcagcagcagacattgctgccacagtacagcacacaatggcatgtcatcttgtgaaaagaacacatcgggctattctgttttgtaagcagagagacttgttacctcaaaataatgcagtactggtaagttttatctcattttatagtaatagttacactttgcaatatgttacttttttcccaagaccttgaccttgtgtttaggatgaacagatctttatgccttatgctagccctgacagtatgaaattatgcaggataggaaagactaacagccatttcttgtactagtttggtagctttatgggacagctgtatagcttctatggcacataagtctaattttgcatcttcttgttggatttaaaagagggcttacaataaagaaagtaaatgcagtaactgctatcactatttttagaaaaataggtggatttccttcatcctttgatgaaatccctttgtttgtttgtttttttaataagccagtcaaatttagcagtgggaggtggtataccaactttcgtgacactaatgttgataaagttctgataatccactatattgtaccagccaaaatccctttaattgtgcttaaaagccttgacaaacatcctgtttaactgtatcttaaactttattcatttaaaaattataaactaaagtgggaaaatgtttaaatggtagtaattcatagatggaattttacatggatatcaaagaataattttttcagagttatgtagtaaaatgcacaaaataataaaaatttcagggtctaaaatagtgtactatgattgaaattatattaaataaatatttagatgaaaggttggaagaaaatatacaaaaatgctagtaatgtttgtatgctattagaattattagtaatttttttctttccaaatttttattacatagatatgtcatctgcccattacccatctcaaaatgggatagtttattattgtttaatgctgatatttttctccaggtttaattagcagcttggttcatatccatatatgatagttattttggttttctcaattccttcaggttgcatctggtggtgtcgcaagtaacttctatatccgcagagctctggaaattttaacaaatgcaacacagtgcactttgttgtgtcctcctcccagactatgcactgataatggcattatgattgcatggtaagccacaggatatacgtgcttcactcataactatgtaaatattaattgccattttatcatactaagccttcttccttcagatcttggagctattgattttattttaatgcttcttatttaggaatggtattgaaagactacgtgctggcttgggcattttacatgacatagaaggcatccgctatgaaccaaagtatgtggtatcattcatgatctttatgcaagttacattacttaagacaaagcctggattttgcctttatatatgaggttttcattgacattctggtggtacttgaaggaaagttacataaatttctttcatgaacctagttaaggttgataccatatgagaaatatttttgctacagtatcaaattataaaaatcttggcaagtttaggtgagttagaaacaggtcatgagtaagggtgatgaattccctcctttggaactagaatgtaaactatgtccatgacctggacttttgcaatgtcaagaacatctcagaaccagcaagtatgctgggaaatttaaggaaaacatgcagaaagcattcaggtgtgagagtgggttgtgattatgctcttacacaggcagttgagaattggccgaaagatagctgtttcctgcaagccttatttcctctcccaaatcaaagttccagtgaatagcacagttttttctttactttttttctttttttttttagagtcttagtgtcacccaggctagagtgcagtggcgcattctcggctcactgcaacctctgcttcccatattcaagtgattgtcatgcctcagcctcctgagtagctggaattacaggttcacacagctgtgcccagctcattttttgtatttttagtttttgggttttgccacattggccaggctggtctcgaactccaggcctcaagtgatccacccacctcggcctcccaaaatgctgggatgacaggtgtgagccaccacacctggctggtttttcaaattactatcaaattctgttttaattctggaatagtaaaagacaattattttcataaataattatattttgaacactgtttcatctgatgttttaaaacttgtcagcattggccaggcatggtggctcatgcctgtaatcccagcactttgggaggctgaggtgggcagatcatctgaggttaggagttcgagaccagcctggccaacatggtgaaaccccgtctctactgaaaatacaaaaattagccaggcgtagtggcaggcacctgtaatcgcagctactcgggaggctgaggcaggagaattgcctgaatcctcgaggtggaggttacagtaagccgagatcacgccactgcactccagcccgggtgacagagtgagactccatctcaaaaaaaaaaaaaaaaaacacaacttgtcagcattatattccgtaacttgacagttgtgctatatatgaattacatgtatgctgatgatgaatgaactgaattgagttagtagtaccggaaggcatccctttgataccttgtctcagatagagtatatcctctgattcagttatgcccccttgtggcagtgttgaggctggagataatggctttttccaggttgggattcagtcaaagcaaagccttatcttggacaccatggtagaaaagcagaaatctgaagcaaaaattagttactgaggaggaacagaaaaagacagcaggaactaagacctctttggctagtaatggcaaaggatggtagaaaaggggcaaggcagcttttgaaacttcagagaagaacctatagaaacctaggacatttctaaaatgtgaatggatacaggtttgactttagctgtgtggcaaaaatgtttttacctttttagctttgtagagaattataagatatttttcattatttttatatttcattttatgtttttaacttatttacagtatttgagaacagcaaaactgtttctttcaaaaatatctcaaaatttagatttcttattaatgagactagctttcattatcctgacttgaggtcccagtatatttgtaagtatttaagaatcatcaccacatatgatgaattaaatatttgatatttataccatcagaattctaagcaaatagtctgcagaactagtgatggatcatgaagcaaataaataatacgatttgtctgcttatgatgtagatgtcctcttggagtagacatatcaaaagaagttggagaagcttccataaaagtaccacaattaaaaatggagatatgatttctgctgttcaaaaaagtccctaaaggtagtattaaggttaaaattaagtttttattgttttgtgtatcaaattgtagaagatatataatattaattattcatcaagattttatttttttttttctatttgatgttttacctgctcttctgagatactataatgtgttaaaagtcttacaagggaagatagtttttttcttttaattattaaaaaccaaaataaaacatcttttgagaaaggaatgtattgatgctggcaggtagaaaggaagctttgaaagaagcacagtaattttgctgaattctggccctgtatcatacaggcctaggactttcccccacttcctcaaatcaggataggagaagctattttttaactcctactgaaacaagaacctgactttataatgagagagcagtttaatttttttttatcattattattttttggagataatctccctctgtcacccaggctggattgcagtggcgtgatctcagcttactgcatgcaacctctaccttctgggttcaagcgattctcctgcttcagcctcctgagtagctgggactacaggagcccaccaccacgtctggctaattttttgtttttttagtagagatggggtttcaccatgttgcccagggtggtcttgaactcctgagctcaggcaatctgcctgcctcagcctcccaaaatgctgggattacagatgtgctcaagagagcaattttagatcagtcatgtcaaagcagacatttccaaatcaagacaaaagctgactttctctaacataatatgttattaattttaagagttcgttattaggtatcatctctggagtaaataggatgtctatgcattttttaaaatctatataatttgaggttttacaattttaacatataagtaatccctcaagtatgtattgtacgctttagttgtccacatactttcacatcagttatttgagaaattgtatataatcagatggaaataaatgagggagtttttttggatttttttttaatccaaactttgtactgcaaatattataagcttatcactgtttttctgccttgattaaagtaactaaatgtacaattctttgaatgtaaccctctatatctggaggcctttctcatacataattttttatttcgatttttatagacagcatcttgctatgttgcccaggctggagtagaactcctaggctcatgtaatcctccaacttcagcctccagggcctgacttttcacacattgtttaaaaaaaaaaaaaccgtggagtaataaaaataatctttttttttttttttttttttttagacagagtctcgctctgttgtccagactggagtgcaatggctcgatctcggctcactgcaacctccgtctgccaggttcaagcaattctcctgtctcagcctcccgagtagctgggactacaggcaagcaccaccatgcccagctcattttttgtatttttagtagagatggggtttcaccatgctggctaggctggtctcgaactcctgaccatgtgatccacccgccttggcctcccaaagtgctgggattacaggtgtgagccatcatgcccagccaataaaaataatctttataggggagatttataggagaagtagtataaattttaggagtggtaggatggtctggctaggccaagatactcaggaaatatctggcattgaatgcaaagaaactctgataacctgaaaatagtcctaaagtatagtcttgagcctacctgaaaccagtttcagagctcaaaagttgctctctaaaggcttttaaaaatatctacagaaacttaatatttccattgttataaattcttatccttaatggtgctggataacacaattcatcacttgaatatgtatccctttctagtataaaatagaccatttccctccgcatttcctatatttcagtcaatccaccagaaagttgtgactcagcaccattaagataatttagaagtaaatatgaagattaaagaggtctcttattttttagtggttaagaacacaaactttgcatggtagctcatcctaatgctttgggaggccaagggaggaggatcacttgaggccaggaattcgggaccagcctgggcaacatagcagagacctcagcttcctgagtagctagggctacacgcctgtaccaccacactcagcataacaaagactgagaacctgtagccctagccactcaggaggctgaggtgggatgattgctttgaacccaggagttataggctacagtgagctatgattgcactattgccgtccaacctgggtaacagagcaagaccctgtcttaaacagacaaataaataaataataattcattcacccactcactcacccactgactttggactctagcacatagaaagccctaagtacatatcggggaaaataaccgctaattaatatatactttcaatgcttactgcagcccaggtagagaatggattatagcaagaccctcagactgtatggaggcaattcagcaagtggatggagaaaaggggagctttaaagtacacagtgaagccaggcgcagtggctcatacctgtaatcccagcactttgggaggccaaggtaggcggatcacctgatgtcaggagttcaagaccagcctggccaacatggtgaaacctcatctctactaaaaatacaaaaattagccaggtgtggtggcaggcgcctgtaaccgcagctactcaagaggctgaggcaggagaattgcctgaacccaggaggcggagtgagccaagatcctgccactgcactccagcctgggtgacagagcaagactccatctcgaataaataaataaataagtaagtaagtaaaataaagtacacagtgaagccaggtgtttgtatcatatctatctgcagctataaaataggagaagcagacattgctatttgagcaaagacatcatatggttctaagccacaaagactattaccctttccagttgcaaaccaaagacactataaatatggagaatgagcaacactgttagccacaaaagccatactcatgtacttgatgggcaatgatttcagattttatttttaaataaaactttttttcccttttaaaaaatttttgttttattttcttttttaatttttcttttctgcttcatccactgactctcagactttttttttttttttttttttgagacagggtctcactctctgacctcagctggagtacagtagccagatcacaactcactgcaaccctgacttcctgaactcaagcaatcctcctgccttagcctcttgaatagccgggactacaggtgtgcatgtccatgcccagccaactttatttctattttttgtagagacaggctcttgccatgttgcccgggctggtcctgaactgctgaattcaagtgatcctcccaccttggcctccagaagtgctgggattatgggtgtgagccaccatgcctagccaaaatgtttcttaaggtatacattttgggtcttagaagacttatacatttgtaatatttattactaaatatctcaaagtattacaataaatgttaccatgtgagctactttgaatcaggcttcttgcacaccaatttaaaaatgttaactcttgatatatacactagttataccactcatgtcagtcaataaattttaaggtttaagtgcaggcctttgtttacagaaatcctaattttttgaaaccataactctgacctgacactaaattcctgtagacatgctaaggaaaatctgcttagtatcgagatcaagaactttcattcaaaaagattattcagttatgttatttgcatattaccattattaaaaataaaaaaatttttaaaagat

SEQ ID NO: 274 - DNA, 13690 bp, Homo sapiens
  source 1..13690: mol_type = other DNA
gccccgacgcgcaccgcgattcgccccaagggccctgcgcaggacgctgacgcgaagactcggaggcggaagaaaaaaggagctgtttctaggcttttctaggcgcccagccgaggtgaaagaactaccccttcgtcccctcccggaaatgacgcgatttgacccttgagccgtagggagcgcggcattttctggaaagttctggaaccgagcgaggcccgggaactagactaagccggccggagagggctgagcgcgctagcacaccctgcgcgggtagggaggggcggggctcgcgcgcagggtgtgcagattgcagggcccgggctgacgggaagtgggtgggagctgcctgcacacgcggtgccgcggggcgggagtagaggcggagggaggggacacgggctcattgcggtgtgcgccctgcactctgtccctcactcgccgccgacgacctgtctcgccgagcgcacgccttgccgccgccccgcaggtacgcggccttcccgcaccacctccccccggctcctgcgacccccgagtgggccttcctcctctgcggtccagctggagggtgcgggcggcgacaacctggagttccgcaccgcgccgcaccgcaggcccaggcctgcgggtccaggcctcgcgggtccatgcgggttccatcacgtgcgacgcggatcctggacctcggctgggcgcgggagggacaactcgtggggtttgaatttgggggattgtaaccacttaggcccgctggtgcaacctgcgcctggccgacttcagggaaccggggagggtggtgtacgtgagggaaccgcttttttcccccgcaggcagctgggataccgcgcctccagtcttgaccttgctgggggcgttcggaaagaaggacacgtgggctcgcgccgagtgggccgggccgccgcccccagcatcgcggccttgctggttgctctgatacagtagccttgggtggatccatggagacactttgctgagcggctttttgcaccgtcaggaatacttttaacttccctggtcacttggatttgtaacttgcctctctccggctgacttggtttctcaggggccacagttggagtgggtctgcccacaaggccgttttcgcggtgaaagattaactcgtttttggcggcagggataggtggccgtggggaaggagccgcatgtgctttgtgctggtgctataggtcaggcgccggccggggcggcctctttagcttgcgctagtggctgatgttccgaagctgcggcgccttccgtcattcaggcgtagtggctggcggaggtcagccaggctcagcatctcacgttgcttgctctgttgcacaggtgggcatgtttgttctgcagcgcaccacgggtggtagttctgatgatctttttgcttccatccccagaaatgcttcggttacccacagtctttcgccagatgagaccggtgtccagggtactggctcctcatctcactcgggcttatgccaaagatgtaaaatttggtgcagatgcccgagccttaatgcttcaaggtgtagaccttttagccgatgctgtggccgttacaatggggccaaaggtaccagtatttttattttattgtaattacggtattattaatagcattttactcacaaatagtcgcactgaactattcaacagtactttcatctccatttttgagagaactcagtttacatgtaagaattctgaagtattggttagcctttttttcttagacatgatcttaaagcttaaactgcttcagccagattttcgaaactattttgttcaatgtgtgatgtaatcaggtagtaacttacagctcaaggtggattcttaaactcgaggtagaatttcgctggcttaagttaaaatttggatcctttcccagtagttcatgccaagtgtagagagaagagtttaacttatcttccataattccttaggtatgtgcttgtagatgctaaatttttttttggtttattgtagtaaaatgtacacaacataaaattaccattaagtgtgcactttggggacatcaattacatttatgttgtgcagtcatcaccaccatccatctccaaaactttttatatggaaaaattgtaactttgtactcattagacagtagcttcccattctctcctccaccccaagatgctagttttacccatcggttttctgctgttctcttgttccaaagcatatttaaaataagtctcatttaataggggtaatgttttgaggaggcctttgaaggtggtgtgcagtcaagtggtgcttcatttcagtttgaagacagttcagatatcaagtgatccaacaactgcctaaaatacaacatttgcacacctcacaaatagaaagtagcagctttagttcaaatccaaaggatggccaataattgtgccatggttgaagttttatgttgcgtgaacctggaagagcacgctacttgccttgatggttaatattttagttaaacggattttaaaacaagtcacattactttaaaagataacaggcactaactaaagtataagtgataggaagattgttttattctttgtcttgtgttcttgttcattttataagatgacaagttttagtccctaggattttaatctcctaaattacctagttcaaaattatgctcttggcagagaatcaggtcattttgtctgtagacaaagaatgtcgataaacttgcccttgaggttcatgctgcaagactgataaaaatgacacaacttacgttgagactttgaagtagttgctttattatgaagactgctcatttttaaaaatgtaaatcatccttagggtatgtctgatcctgttacatttttttcttctagggaagaacagtgattattgagcagagttggggaagtcccaaagtaacaaaagatggtgtgactgttgcaaagtcaattgacttaaaagataaatacaaaaacattggagctaaacttgttcaagatgttgccaataacacaaatgaagaagctggggatggcactaccactgctactgtactggcacgctctatagccaaggaaggcttcgagaagattagcaaaggtgctaatccagtggaaatcaggagaggtaggaatgtctgttgtcaccacagtgttctaaacttcagtgtgctttaaggcattgattccttggacctaaggaaagtgttaacttgaggaaattaatccttctctcattcctcctcttggcctggagaaatcttaaactgggttttcctttagcaagcttggctgtatggtgggtaggtactgttaggtaattttgatattttacttagttggtttcttttgtttttagagacagggtcttgctctgtagcccaggctggactgcactggaactcctgggctcaagcaatcctcctgcctcagcctccaagtagctgggactactacaggcactcaccaccattcctggctaatttttagtttagttttgtagaaagtaagactaaatacactggatcattcagaatgtcagaaagtaatgttttcctcagtttattttttcttaatagcacacaccatgttattggtttgtgttttgttagtgcttgtaactagagtgcaacttaattaacaatttgctcctcctcatgaggttcatggcagtatagacttaaattctagtcccatgtttgtcatttattagctgtgtgctaagacttggttttcctatcagcagaattgctatgtatatctagggtatgttagggttcaaaccaggaaccctcttgtaagtgaaggtggggggagctattggtaattttttgtcagaattggcatactaatttattactacattactaatgtatcattacctcatctatttcagtgtttatgggccaagtgaatatacttcactaaaagcagttttactgtaaatcactaacaagtattaattaaggttatgaagaggacttaccagcaccttgcattggattttttttgaagtaacagttctcaaacaagagagctagcactattcccaattgagcaaaatgggactattaagactgatgtaaaacaaaaatattttgttagttcataatacgtactaaattgaggggatttcagataattgacacctgcagaggcatagtcacaacagattcctatcatttaagaactgtacttcttgttgaaaataagggagtgttagccattttggtccttttttgcatcatctaatggacatgagaagtgtcgtggaccctattggaaacagcatgattgggttaggaatttgcataggatgagttcagtggtgagacttttgaaactacacacatctaccttgttttagtcctattttcaaaattttggcattgtgagattttatttactgtgtgaacctaaagttactgtttaagtacatgccacgcaactctgtgttattaagaagcactgtctcagaagctgtgtgtaaatttaatattaaggcactaaagaccaagcataggtacatgcctgtagtcccagctacatgggaagctgaggtgggaggattgcttgagcccaggagttcaagaccaccttgggcaacatagtgagaccttgtctacaaaaataaaagaagctgagcatggtggcttgagcctgtggtctcagctactcccttgagcccaggatgtcagggctgcagtgagccatgatctgtgctactgcactctagcctgggcagcagaacaagaccctgtctcaaaaaaaaaaaaaatttttttttttaagttaaggcattaaaatatttgtcacaaatctcaagatttctacttgacatagaagccatgagagaaataaacattgtaatgacatatatcgttgaactaggtgtgatgttagctgttgatgctgtaattgctgaacttaaaaagcagtctaaacctgtgaccacccctgaagaaattgcacaggtaaggacttaacatgttacacgttttttaaaaaaaatttaatggcatgtgtgattttttttttcccttgatcacaccaatgtcagaataacaatactacccaatcatcaatattagaatcattgtttcttactgctaaaacctttgaaaagaattatgaccataatggttgtcatttagttctacatgtggttgtcattttagttctacatggctgtaaaatggattcatatgattgtgaaaatgttcttagccattgtcaaaggtgcataagttttgtcagtttgtaatgaagtcagcatttttaaactttttgttacaagaatagttttatgtatcatattcttcaaaacaatgtagtcaaataatgaatcggaaaagagcaaagaaccagtacttcatgaaaactaccataacgtaaattccccttctctcccctggatggaagtatcaatttggaagttactaggaaaaggtaagggaactgactgaggacactaggcttaccttttaatttcgaagagtaactggattatttcaggttgctacgatttctgcaaacggagacaaagaaattggcaatatcatctctgatgcaatgaaaaaagttggaagaaagggtgtcatcacagtaaaggcaagtgtgtttgtatttttaaagataattttgagttatcttatgatcaaaagtttgagttatctgatgatcaaaactgaatttttcaaacagaaaaattctgttttaaaaactgctttttttattccttcatatgtagtctcagcacatgtatagaataaagtacttactgtgttttatgtgaattagcctttgctgcatgaaatgaatccatcctaacttaaatgattattcaaataagcacttttgggattttttgcagaagtgtaattggatgtcctgggctgtttcatactctaccctgcatctcttatggccagaggggtctgtttttattaatctggcctgtaattccatgttttgtgttcaatgaaatccatatacctaattctttgacttttcataggatggaaaaacactgaatgatgaattagaaattattgaaggcatgaagtttgatcgaggctatatttctccatactttattaatacatcaaaaggtaagaacaaatcaataactgaattattattatttttattattttagacagagtctcattctctgttgccccggctggagtgcagtggcatgatgtggtggcgcgttgctcactgcaacctccgccttccgggttcaagtgattctcttgcctcagtctcccaagtagctgggattacagtcacacgccaccatgccaggctgatttttgtatttttagtagagatggggtttcaccatgttggccaggctggtctcttaactcctgacctcaggtgatccacccaccttggcctcccaaagtgctgggattataggtatgaggctctgtgcctggccaatttttgaattttttaatagagacaaggtttagccatgttggccaggctggttttgaattcctggcctcaagtcatctgcctgctttggcctcctgaagtttttaaaatatactttctaatatgtgtcaaactataggtattagttggtgtcatcctctaaaaaataaatgtatatattccaaaagttaatgcatatgagaaatgaaggaggaaaaccaactcactggtgaattttaaagtgtattggaaccttggtttcgcttttcatttaaatgtattgcagtcattttttgtatatttttgaaatcttcattatttttacaggtcagaaatgtgaattccaggatgcctatgttctgttgagtgaaaagaaaatttctagtatccagtccattgtacctgctcttgaaattgccaatgctcaccgtaagcctttggtcataatcgctgaagatgttgatggagaagctctaagtacactcgtcttgaataggtaataagcagtggtatttgttgatttatatttctcggtgaaagacagaattatttgtattgctgtttgcagtttccatcatgtgtacctccacatttgatccagttgggtttgtatctagaattgtaattgtgtaaatcaggtgtgctctaatgtatccttatggttgtgtttttgaaggaaccccaaagtctttactattttgatcagctttctcatagaatagactaatttagcacatgggtacctttctgtattttgcaagtgtttacagttgttttgaaggcacatgactgaatcttgtattttttttttttgagacagagtctcactccctggcccaggctggagtgcagtggcataatcttggctcactgcaatctccatctcctaggttcaaacagttctgcctcagcctcccaagcagctgggactacaggtgcgtgccaccacacctgactaatttttgtatttttagtagagacagggtttcaccatattggccaggctggtctcaaactcctgacctcgtgatccgcccgcctcagcctcccaaagtgctgggattacaggtgtgagccactgcgcccggccttgtaatttttttattttttatttttatttttggagacagagtctctgtcacccaggctggagtgcagtagtgcagtggctcaatctcagctcaagcctccggggttcaagtgtcaatcttgttttttgttttgttttgttttgtttttttaaggtttttctggttaaaaatatgtaaattttcagaatattattttgcatagaacagggaagtaaacaactaacttccaaataactcagagccaggcatggtggctcacagctataatcccagcacttggggaggcacaggcgggtggatcacctgagatcaggagttccagaccagcctggccaacatagtgaaaccccgtctctactaaaaatataaaaattagcagagcatggtggcgtgtgcctgtaatcccagctactcagaggctgaggcaggagaatcacttgaatctgggaggcggaagttgcagtgatccgagattgtgctgctgcaccccagcctgggcaacaaagcgagactctgtctctaaataaataactcagatgtaagtgtatttcaccatcgaatatttttatttattttgagagacagactctgtcacccaggctggcctgcggcggcacgatcatagctcactgcagccttgaactcttggggtcaagcaatcctcctgcctcagcctcccaagtagctgggactacacacttgcacaagcacacttggctgatcttttaatttttttgtagagacgaggtctcaatatgttgcctcaatatgttgcctaggctagtcttaaactgttggtgaatcttaagtgattctcccacctcagcctcccaaagtgctgggattacaggcatgagccactacccttggctgtgatcaagtatttagtctgttgttaaatgtttactaaatagtctgaagtagagaaaatagcacccaatctaaaataaggtgaggtctagtcacttatttaaatctacattttaagctatagtttactattagtttaaactttaagacaggtaatgttcatgctgcagacaatctaagggcattattaaaatgtttgttcttccttatctcagaattgaagtatgtcagaagcaagacttttctttccattttgttatagtagaaatgcatacattaacaggtacgttttagacattacacgtgctcatctgacccaaaagctctaatgagctgccttaccctggaatgtttttcttagcttggatttgcttttttggagggattaagaaaagacttggctgggcgtggtgactcatgcctgtaatcccagcagtttgggaagccgaggcgggtggatcatgaggtcaggagatggagaccatcctggctaatacggtgaaaccccgtctctactaaaaatacaaaaaattagctgggcgtggtggcgggctgaggcaggagaatggcgtaaacccaggaggcggaggttgcagtgagccgagatctcgccactgcactccagcctgggcgacagagcaagactctgtctcaaaaaaaaaaaaaaacacacaaaaaaaagacttgaggccagaaaaaaacaagcctacagagttttcattaagccattttactgctagttgaaaagtgggatatccagtttacatagcatatagcttattcctctgatttttatttgggtccttaataaaatagaccagctgtcttgaagtttgaacgttgcttctgtttcacaatctgctctcaaatggacatttgattacacattccaagtattcatttacctggtaaaaatttcaggtgagcttaacaatactgtcagctttttgtataacatttataaaagaagtgaattcagaacattgctcattcaaaactcagcattaatatatggagatgtttattaaatgaccctcaaatgtaatatttagtaattactgtttttctaccattcataatagttatcactgtatcctataacttactgtgatgtgatttttgctgctcggcctcctgagtagtggggattacaggtgcctgctaccacatttggctgatttttgttattttcagtagagacagggtttcaccatcttggccaggctggtctcgaactcctgacctcgtgatccacctgcctgggccttgcaaagtgccgggattacaggcctgagtcaccacgcccggccaggccaacagtttattaagaaggtaaacggatatggacaagtataattaatagaaaatagcctaaactgtctcagatacttcctgtcttaatttgatcaaaaattgctaggaagcaaaaaaaaaacaaaaaaacacaaaaaccaaaccagattacttagggagtcctaagtaatctagtaacagcttgaggggaattaaacagataggcatttttatttcatttaaatcttactatcaactattcttaacaggctaaaggttggtcttcaggttgtggcagtcaaggctccagggtttggtgacaatagaaagaaccagcttaaagatatggctattgctactggtggtgcagtaagtaaaataaatgtgataatggtttgctgaatgtttatacttgtctggaatttatagatagtttaacatttcacaattagatactacaactatctgtttcttttggctctttggaaggtaggggttggattaaattcccgttaatttgccacaagtctggcctaagaatgagcttactgactattctatattgactaaatcttattgactgaataagggggtttccttttttttgttttttttggagacagtgtcttgatctgtcttgactattcttgacttgatctatattgactattcttattgacttaaatctgtggggtttctttttttttttgagacagggtgtcttgatctgtcacccaggctggaatgcagtggcacgatcttggcttactgcaacctccaccttctgggttcaagcaatcctcccgtctcagcctcccaagtagctgggactacaggtgcagtaccatgcccagctaatttttttacttttagtaatgacgggtctcactgtattgcctaggcttctcaaacttctggactcaagcaatatgcctgcctccgcctcccaaagtcctgggattacaggcatgagctaccgagctcagttttgaaaggtagaagtgtatgctacaagggatgtaggacttgagagtcaaggcctatggtcttgtcctggctctaccagtaagtgtgaccttcgatgtttttttctcaagtaaggctggtaataattaccacagttgtgagaattgagaatttggaaatgcagtgaaagagactatactcaagtcttgttctggactaacagtgatcttaaaatctctcatttcaaagaaataaagtattttgatgattctcttgcatggtgtattaataaacttggtataatggcagaaactgtaacctacaacaggtttacgtttaactctttttgtaggtgtttggagaagagggattgaccctgaatcttgaagacgttcagcctcatgacttaggaaaagttggagaggtcattgtgaccaaagacgatgccatgctcttaaaaggaaaaggtgacaaggctcaaattgaaaaacgtattcaagaaatcattgagcagttagatgtcacaactagtgaatatgaaaaggaaaaactgaatgaacggcttgcaaaactttcagatggagtggctgtgctgaaggtaacattcattattatgaataagtttcttgggttctgagtccaagaatgattttgcttctgtagtattccccagtagtaccatagaactaaacgaatacttgaggaattaacttcatagtggaattttgtttgttttgttttgagctcttcgtcacccaggctgggatgcagtggtgcgatctcggcgcactgcaacctccgcctcttgggttcaagcgaatctcctgccttggcctcccgagtagctgggattacaggcacttgccaccatgcctggctaattttgtatttttagtggagacagggcttcaccatgttggtcaggctggtctcaaactcctgacctcaagtgatccactcacctcagcctcccaaagtgctaggattacaggtgtgagccaccacgcccacctcaggattgctttttaagtaaactgcttttaaatgacttggcaattagcatcttgaatgaagaggccatactaactggaattcttttcgtctttaggttggtgggacaagtgatgttgaagtgaatgaaaagaaagacagagttacagatgcccttaatgctacaagagctgctgttgaagaaggcattgttttgggagggggttgtgccctccttcgatgcattccagccttggactcattgactccagctaatgaagatcaaaaaattggtaaaaagttaccttttaaatgagtttgtggcctgattttagtttttcttagaataataatgttgcagtcccctaaatggaatagcacattcatttcctgaataacagaagtagaatagtgctaatgtcagagctaaacatgcatcacatctttttcagaggaaatgatttgatctgtagtaggattgggatttccctacatcaatatcctcacaacttataaatgtgttacaatatttacaaatgaaagtattaaaattttgctgaaatttctctgtaggtatagaaattattaaaagaacactcaaaattccagcaatgaccattgctaagaatgcaggtgttgaaggatctttgatagttgagaaaattatgcaaagttcctcagaagttggttatgatgctatggctggagattttgtgaatatggtggaaaaaggaatcattgacccaacaaaggtaaatggttgaacactttctaaaaattcttttgttgttcattttgttaatgtatcctcacatcccaaatctttgattttgtcaccagaaaaatagtctaatagcagtagcaacagcaatagctcttgtgcccatcaacaattctcatgtacatttccagcacctagatatttaatactccactaaaaggaagcaggatcccttgagtagcagttgagtccatgcctggaggcaggaaaaaatcaggatggatctggaacaccctgttcctgcctggcagtaagaatactttccaagatacgcagaacagggttttgttttgttttgaagacagagtcgctgtgtcgcccaggctggagtgcaggcagtgacaacctccacctcctgggttcaagcgattctcctgcctcaggctcctgagtagctgggattacaggcatgcaccaccatgcctggctaatttttgtatttttagtagagacggggtctcatcatgttggccaggctggtcttgaactcctaacctcaagtcatctacctgcctcagcctcccaaagtgctggattacaggtgtgagccaccatgcccagacagaaattttcaataagtcttgctcatattttactaagggaaaactaattaattaaatttttttctaggttgtgagaactgctttattggatgctgctggtgtggcctctctgttaactacagcagaagttgtagtcacagaaattcctaaagaagagaaggaccctggaatgggtgcaatgggtggaatgggaggtggtatgggaggtggcatgttctaactcctagactagtgctttacctttattaatgaactgtgacaggaagcccaaggcagtgttcctcaccaataacttcagagaagtcagttggagaaaatgaagaaaaaggctggctgaaaatcactataaccatcagttactggtttcagttgacaaaatatataatggtttactgctgtcattgtccatgcctacagataatttattttgtatttttgaataaaaaacatttgtacattcctgatactgggtacaagagccatgtaccagtgtactgctttcaacttaaatcactgaggcatttttactactattctgttaaaatcaggattttagtgcttgccaccaccagatgagaagttaagcagcctttctgtggagagtgagaataattgtgtacaaagtagagaagtatccaattatgtgacaacctttgtgtaataaaaatttgtttaaagtta

SEQ ID NO: 275 - DNA, 32742 bp, Homo sapiens
  source 1..32742: mol_type = other DNA
cagcgtgttctgattctttgcgggacggcgagcgcatttgtgctttgcccgccgcggcctaggaggccttttgaggccgcgtagtcggtgtttttgaactgactctacagcttctggcaggccgtgcggcgccctgacccggcctcaccatgttggtgctgtttgaaacgtctgtgggttacgccatctttaaggtaggtgggagagcgagccgttaaagggggaaggcggatgctggacagacgaggagagggaaagacttaagcacggaactactcagagtagcgtgggtgcctgttatagcccgggctctgggaggagggagaaggcctttacacctgagagccatgttacgtgtaacacgtggccccgccgtttggggagacccgttctgcattagaggattttatttcctcccgttgaaggggtgggcaggaggcgtgttagaatttaacagattatagggaattcggactttattctagatgttttgaggaatgatcgaaagattttttttttttttgagatggagtttcgctcttgttgcccatgctggagtgcagtggcgcaatcttggctcactgcaacctccgtctcccgggttcaagcgattctcctgccttggcctcccgagtagctgggattacaggcctccatccaccaccacgcctggctagttgtttttgtttgtttgtttgcttttagtagagacggggtttcaccatgttggccaggctggtcttgaactcctgacctcaagcgatccacctgcctcggcctcccaaagtgctgggattacaggcgtgagccaccgtgctcggccaatcgaaaggatttaagcagaggaatgacctgctaatttgtcttaatacggttactctgctgtgtggagattagactcgaggagataagaacggcagcaagaatacttttgcattcatttggacaagatgaaattgcctggtatggagagaaacaaatatcgatagaaattgtgaaggtagaacaggaaggactggctaatagattgaatgtggggttttggtttaaataagatgttaagaaagtttcttggggaaggactaaagatttccggtttgggctgtgcgaagcttgcgttgtctattagacctgataatgcagttgtgtagatcgggcagttcagtatttcagatttgaagcttaggggaaaacatctgggctggtgatgtcagtttgaggtttggttgttttcgtggggaaagtttgacaagttcgtcagcactgaaatggttgaatggtaagacattcgtatcgcaagatgctgttgagatgttaggaagaatgagtgagattgagtgccttttcttgtgcggtgcaactcttctgaggtctgtgaatatagcaatgaaaaataaagtttttatgtatattctacatatatatatgttggtagaaagcaaaaacgctaggtaaaaataaatgtaatacaattttagctatgaaccaaaaaaccatttgtggtgtggatgcaagaaagtctggatgggtgcagagttctccatgtttcacttctgacatttgaaaatacgcagtttgcatttgatacgtcaaatgttatttttaagaaaaccaataaaatcattaaaaccgaaaaggcagttttgcttgtttttaccttagttggagttatctgcaattgccgtattagtgttttaaggaacttgtaagtaagctccttagtcccctttagagctacgaaacatgtcaattttacttttctccagctttttggaatcttatctaaattaccatgtagagttctgcatagcttcaaattctcttagccaatgtggtctgtaagtgtctatcgatgaatttcaccgttaattgccgtagtatactgtcctgtaccggatgtgaagaggagcaactctgcacagtgcactggttgtctcccatggtaggaaggaattggcttatcaatggtcggatttctagacctgggtcctaaaatactcaaccgtgtctcgatgaattactgatttctattaatgaaaagtgtcctcctccatgaaaatgtctttgagtattccgttggagtttgcagtgctatttatctgcaagttactgttcaaaatgattaaattgtggtttatgtaacctagtactaaagaaataactagttaagctcgaatatgttgacattgattagtttgtaattattggaattaacattgatcgtttctgagtataaaagacatacaaacgttctggaactagtgatggctgcacatttttgtgaaaatgcactactaaaaagtgaattgtacactttaaaagggcaaatattaagatacatgtaaaattaatatgatatatggtgaattttatctcctaaaaaagtagacatacggttcaaagttattagtttcctttcccataatctttcaaaatgctagggtataaaattatgttggttgccaggcatggtggctcatgcctgtaatcccagcactttgggaggccgaggccggcggatcacaaggtcaggagtttgagaccagcctaaccaacatggtgaaaccccgtctctactaaaaaaatagaaaaattagctgggcgtggtggtgtgcgcctgtaatctcagctacttgggaggctgaggcgggagcattgcttgaacccgggaggcggaggttgtggtgagctgagatcgtgccattgcactccagcctgggcaataagagcacaactccgtctcaaaaaaaaaaattatattggatgcatataattcatgctttgatgagaatgctttaggaagttttttgaagttttttgtttttttgttttttttgagacggagtttcactcttgttgcccaggctggagtgcaatggcgcgatcttggctcaccacaacctctgcctcccaggatcaagcaattctcctgcctcagcctcccgagtagctgggattaccagcatgcaccaccacgcccagctaattttgtatgtttagtagtgacagggtttctccatgttgaggctggtctcgaactcctgacctcaggtgatctgcccgcctcagcctcccaaagtgctgggattacaggcgtgagccactgcacctggccttgaagttttttttaaacttccatttacagtgaggaaaacattttatgtataacccatgtacacatacaaattcatgtttatgtatttaaaatttattttgaggcagggtcttgctctgtcacccaggctggggtgcagtggcaggatcatggctcattgcagccttggcctcctgggtcaagtgatcctcccacctcctcccgagtagctgggactacaggctcaagccaccatgcctggctaattatttatttatttgtatttgtatttatttattttttgagatggagtctcactctgttgcccaggctggagtgcagtggtgtgatctcggctcactgcaacctccgcctcctgggttcaaacgattttcctgcctcagcctcccaagtagctgggattacaggcgtgagccaccatgcctggcctaaatttttttttttttttttaagaggcagagtctcactatgttgcctaggctggtctcaaactcctggcctcaaggtgctgggattacagccatgaggtacggtgttctgcccacttatgtgtttagagcgattcaaaaggaaaacacttccaaaaagttattgctcattaacagggttatatatatataaatgtaaagacattgtgtaaaggaactgttgtgattaattctaggatattataaaaattcagcctgtggccgagagcagtggctcacgcctgtaaccccagctacttggaaggctgaggcaggacaatcagttgaacctaggagcagaggttgcaatgagctgcggtcgcgccactgcagtgcagcctgggcgacagggcaagactccgtctcaaaaaaaagaaaaaaagaaaaaaagaaattccacctgtgtccttgtgtcacgtggcacacagcataagattttagtcttgctcataccagacttccttcagctgctcttccatgtggtagccattagtacgtataaccatttcacatgagatgtaactgataggactgaggaagtgaattttaacttacttgaattttaatggttatattgtacagtgtagctgtgtagcatagcattttgtgtcacttcattttctcaaggtttggagaaagatttttgatgtacataccaaatgtctatataaaacctaagtactgagcaatatattttttctaactttattgggtgtactttacatactgtataactcacctataggttttagttacaatccagttttatagtacactttgttgcaaaaagttctcatgcccattttcaagttagtcctgctctagacaaccactgttcagctttctttttgcataattttttctagaagtttcatgtaagtggagtagtattttagtcttttgtgtttggcttttttcacttagtgtaatgcttctgaagctaaccgaagagctttttcacatttgttgcgtgtatggatttgtttctttttgagcagtgcacattttaaactaattatcagttttatcctgtatttaaacaagtttcataaaatattaacttgctcatattgtctgtggaagtgaaacttaaaagttagcatcaaataatttacacaaaacatagaggttgggtgcagtggctcacgcctgtcaccctaacactttgggagggtgaagcaggaggattgtttgagcccaggagttgcagaccagcctgggcaacatggcggaaaaaaaattagctgggcacagtggtgcttgcctgtagtcccagctgctgcaggaggctgaggtgggagggaggtcacggctgcagtgagctgtgattgagcctctgcactttagcctggacaacagagtgagacctcatctcaaaacaaaacaaaaaccacacaaagtctcaagcaatcaattaaaaatgaaaatgaggaggctggacatggtggctcacacctgtaatcccagcactttggaaggctggggtgggcagatcatgaggtcaggagtttgaaaccagcctggccaacatagtgaaaccccgtctctactaaaaatacaaaaattagccgggcatggtggtgtgtgtcgccaaatctgtagtcccagctgaggcaggaggatcgcttgaaccagggaggtggaggttgcagtgagaagaccgcgcctctgcactccccagcctgcgtgacagggcgagacactgtctcaaaaaaaaacaaaaaaagtgattaaaattcttaattccatataccctcaccaatattctgtatcagctgcccaagtattagataggatgggctcaatcctaaaaggcacaacccccatatttaacatccctaaaattgggatgtcttacaattgatgacaggtcaattgggagtgtaaaagaataacataagctgggtgtggtggctcacgcctgtcatcccagtactttgggaggctgaggcaggtagattgccagacctcaggagttcgagaccagcctgggcaacagggtgcaaccccgactttactaaaatacaaaaaaaaaaaaaaaaattagccaggcatggcagcatgtgcctgtaatcccagctacttgggaggctgaggcaggagagttgctttaaccagggaggtggaggttgtagtgagctgagatcacgccactgcggtccagcctggccgacagagcgcaagactccgtctcaaaaataaaaaaaaaaagaatagcatgttaaattttgtgaaatagagtatgcacagatattatgcatatatttttatttaaaaaaccagctggatcaggcgccatggttccttcctgcactcccagcactttgagaggccaaggcaagaggatcacttgagtccagaagttagagatcagcctgggcaacaaagcaagcccctgtctctacaaaaagatttttaaaagagctagatgtcgcagtgtgcacctatagtcctagctacttgggaggccgaggcagaagaatcgcttgaggccaggagtttgaagctgtagtgacataggaccacaccactccactccagcctggacaacaaagcgagaccctgtctctggaaaaacaacacagctagtaaatttaaaactatactttgctaataagcattatttatcaagtccataatatagcacatctacacattaagacgcagttctagtctggttatatattattttcagtaagagaaacacaatgttgcaagttgtataaaacttagatgagtgacaagatgattttaggggtttgttctgatgtataattttttttttttttttttttttgagacggagtcttgctgtcgcccaggctggagtgcagtggcgcgatctcagctcactgcaggctccgccccctggggttcacgccattctgttgcctcagcctcccgagtagctggaactacaggcgccttccacctcgcccagctaatttttttgtatttttagttagaggcggggtttcaccgtgttagctaggatggtctcgatctcctgacctcgtgattcgcccgcctcagcctcccagagtgctgggattacaggcatgagccaccgtgcccagcctgtataaatttaatcacacatggttgaattagatatgttggtaaaaataacccaaactagaaaaacttagagtcacacaaagcaataaacaactacaaagcctagagttggtattaacaatttataaactaatagctctaactttgtatatcatgaagttttagaatccagagacacctcaccaagtctcatgactatactgaaaacactgattaaaattttttgaaattgttcagagaatgcagctaaccataactgaagttcactatttttaagaggacatgtatcaaataggggatatgactcatgagtaaaattcacattttttctagctgaaaagcaagtatatttgaagataacatttgggtaacaaaattgccatatttaaaagatactttcggcctggcggggtggctcacgcctgtaatcccaacactttgggaggccgaggtgggtgcatcatgaggtcaggagatcgagactatcctggctaacacggtgaaaccccatctctactaaaaatacaaaaaattagccaggtgtggtggcaggcgcctgtagtcctggaggctgaggcaggagaatgacgtgaacccaggaggtggagcttgcagtgagccgagatcctgccattgcactccagcctgggcgacagagcgagactccgtctcaataaataaataaattaattaaaaaatactatcaccattctaaaactgaagttaaaataacaaaggaaatgtgataaaatcagggcaattcatgagcacacaaaggtcttcaaagactatgttatgtcagccaaaaccattactatgacaaataaaaccattgtgttcccaactgcaacatcttgaagaaaacattgctaataaagaccatctaaataagaaagttagagatattgctacattttctgtattacatttgtctcaaagtttttatttgtctcaaatttttaatcatttcttttcagccagggtaatgataaatatttgtatacagaaatccattttaagttttatcattttaagataatttccatttctaagtagaaatagtatacaactattaccattgcaatctttagcattgttgttacaacagtactagttttaaaacaagtctttatattttatagatacaaactgaaatattaacaggtaaaaattaaatgtctaggtcttgcttcaaaacaatacaaggcggctgggtgtgttggctcacgcctgtaatcccaacgctttgggaggccgaggcaggtggatcacctgatgtcaggagttcaagaccagcctggccaacttggtgaaacccagtctctactaaaaatacaaaaactagttgggtgttgtggtgcgtgcctgtaatcccagctattcaggagactgaggcaggagaatcgcttgaacccgggaggcggaggctgcagtgtgccgagattgcgccactgcactccagcctggcgacagagtgagactccatctcagaaaaaaaaaaaaaaagccatttactgtgattcctaaaagtatgcatgaacatgtgttgcacagacattcaaagtcttggagaatatatacctaaatgttgataagtatattgttgattaaagtaccctatgtttcttttgcatttaaaaaatttctcacatctagatgtgtctcacaattgacgatagttttagagaaatccataatactttcatgttaggatgatcatagcagtaaataacgaatataatctattgaaagtagacaaaagttttttttgttttttgttttatttttttgagatggagttttttgctcttgttgcccaggttggagtgcagtcgcgcaatctcggctcactgcaacctctgcctccgggttcaagcaattctcctgcctcagcctcccgagtggcggggattacaggcatgtgccaccacgcccagctaattttgtattttttttttttttttttttttgtagagacggggtttctccatgttgatcaggctggtcttgaactcctgacctcaggtgatccgcctgcctcagcctcccaaagtgctgggattacagatgtgagccaccatgcttggcgcaaattaaagtttttaatgattacaatactttactgtaaagggattaatggctcttttaaaagaaaggttctcggccaggtgcagtggtgcacacctgtaatcccagctactcaggaggccgaggcactagaatctcataaacccaggaggtgaaggttgcagtgagccaggattgctccactgcactccaggctgggctacagagcgagactccatctcaaaaaaataaaaagaaaggttccctgccctaccccctaggaccccatagctccagctacggcccaaggctggggcaggaatatctcttgaggccaggtagattctagactgaatagccactgtactacagctgactggactagatctgaattccatttagctgttaaatgggcaattcgaactagtaatttgaccaaaattacatgcagggtaagaaaactagttcattatcttagtgaaagaaatagcttctacaccttcattttacatgtaaaattgtatttgaagaatgcagctgtatatgcctcacctgtaccatttaaataaaactatttaaacattttattacaggttctaaatgagaagaaacttcaagaggttgatagtttatggaaagaatttgaaactccagagaaagcaaacaaaatgtaagtactcttgaaatcaataatttagcagttaacatttagggcttgttttattttttacatttttccctgatttatataatgttacattcgtagttttctgttttgaaatctgtttcaggaataattttggtatgaacctaattattacaaatgttttacttggaatataggccatctcaattaatttgaaggcagtagtctcccccttacccacagggattatgttccagaagaccctgtggatactttaaacctcggatagtaccaaatgtgattgctgtcagtaggaacacatttgtcttcgtgtcttccacacacaaatgtaataccttttttatcttaactaagcacttaccgcacacaggggttgtaacctgctttttgagttttgcaacatcaaaactagcatgaactactttttctttcatcacaatttcatggaagattcattcttagtgtagatgttaaatctttggtttttttgtttgttttttgagacagagtcttgttctgtcacctaggctggagtacaatggcgcaatctctgctcactgcaacctccgcctcctgggttcaagctattcttctgcctcagtcccccaagtagttgggattacaggtgcccaccaccatgcccagctaatttttgtatttttagtagagacagggtttcgccatgttggtcaggcaggtctcaaactcctgacctcaggcgatccgcctgcctcggcctcacaaagtgctgggagtacaggcgtgagccaccacacctggcctaaatcttcgtatttgtatgtatatttaagggaccacactagtatgttcccttaccagataagaaaaccttgcttaagatgacactgttgcctggtgtggtggctcatgtctgtaatcctagtactttgggataccaaggtgggtggatcatttgaggtcaggagctcgagaccagcctggccaacatggtgaaaccccctctctcctaaaaacacaaaattagccgggcgtggtggcacatgcctgtaatcccagctactgggaggaagctgaggcaggaaaatcccttgagcctgggaggcggaagttgcagtgagccgagattgcgccactgcactccagtctgggtgtcagagtgagaccctgtctccaaaaaaaaaaaaaaagatgacactgttttaggcaactagaagactagttttccttcttaaagggttatatgctttgttgggttaatctgattcgttgttgtcaatgatgtattcttcttggaactgaatctaagtgatctgactcaatattcgtcactaccactgagacaacgatgaatcaactatatgtttctttctggataaaatactaccctgaggctgggcgtgatggctcacacctgtaatcccagcattttgggaggccaaggcaggcggatcagttgagcccaggagttcaagaccagcctgggcaatataggaaaaccccatctctaccaaaaacaaaaattagctgggtgtggtggtgcacacctatagtcctagctgcttgggagactgaggctggaagatcctttgagctcgggaagtcagggctgcagtgagctgtgattgcaccactgcattccagcctgggtgacagagtgaagtgagaccctgtctcaaaaacataaagggggccgggcacggtggctcacgcttgtaatcccagcactttgggaggtcgaggtgggtggatcacaaggtcaggagtttgagaccagcctggccaatatggtgaaacctcttctctactaaaaaatacaaaaaaattagccagccatgggggctgggcacggtggctcacgcctgtaatcccagcactttgggaggccaaggcgggcggatgatgaggtcaggagatggagaccatcctggctaacacggtgaaaccccgtctctacgaaaaatacaaaaaattagccaggtgtggtggcgggtgcctgtagtcccagctacttgggaggctgaggcaggagaatggcatgaggcaggagaatggcatgaacctgggaggtggagtttgcagtgagccgagattgcgccactgcactccagcctgggcgacagagtgagactctgtctcaaaaaaaaaaaacaaaaactagccaggcatggtggcacaggcacatgcctgtaatcccagctacttgggagtctgaggcaggagaattgcttgaatccgggaggcagaggttgcagtgagccgagatcgcaccactgcactccagcgtgggtgacagtgagattctgtctcaaaaaaaaaaacaaaaaaccataaagggttaggatgtaacaagaatgagacctgacaataagctattttttttaatggcatttgtacaggatagacaaatgaatatcatgagattcctaaaaaggactcacgtacgttttcttgagtcaattctatgctgtataataaagtcatctctgtacagctttatgcaacaggggtttgtattaaagcttcaacatctttactcttggccaaaatttcctccaaagcctacaactttcttttaataatccaagcattactagcctaacatttagaaaaactagtaattgtatgaagaatatctaacttcacaccctgatacacaatggtaggcatgttttattggtgtgtgctttggaaacagtcaagcacttctttccaagttatgtggcttttgaatcaacgcactgcccccaataacatgtttatctcttttttttttaattctagagtaaagctaaaacattttgagaaatttcaggatacagcagaagcattagcaggtaaagtaaaaaattagaagcttgcttttttgaaaaaattaagtcttagccgtttgtttttcttgtttaaaaggttgtttgcttcagttgcctgtgttaaccttattcaatgttgtcaatgatgcattcttattggaactgaatttaagtgatctgactcattcgtcactaccactgagacaacattgagttagcttttttcaccatagggctggttttccccatgtgtgaggagaggtgagaagtggttaagttgatctccctgtggaaaccagcaacataatgctgaagcacaattcagtaaaaggtgttctacaagggaccaaggtaatgtggtcaagtatacagctctctcctcattttaatccaagggtagagttgtaatcctgagaacagccaggattcacagttgaaaaataatttaaaaagctcttctgggggtatagatttttagttcaaaaaaacatatcaatattcagagttatacagaaactgacagaggtgttatttttaaaagattcagaagaatggatgactcatactcttcaactagatttcatcacgggacaacagagtgatcgggtttatttactgtaattgactgcagtaggtcttacagttttgtttttttaagtgttagggaaaacaggaagagcagatataaagcccaaatcattaaattttcaactgcctgaattctttatcacaaatcagccaactatttggcggtgtagtttgaaaatgaaggaccgtgaggaagaatatggcttaaagctgggcaagaatatgacagatgcaaaaaattttgttaaataaccacaggagaaaggtacagtttttgtctgaaaatttggaatccaactaaacatgctggaacataacagaccaccctaaccttggcagaggggtaggctgaaggaagacccatagggccagtttctttgttttataaacatagttctagggctgcttcaccaactcttcagtaattagagttatatacagccataaaaaaaactgtggtaatattaacttggagaatttttaaaaagatagcctgttcatcacagcttttaagtatgggtaaacatttggtaagattccaagcaagattgtgttagctgtattcaaactctagggggtgttgttgacatagactgggatatgaacagttcctagtcctgatctcaagtagcctcttctgaattcctttttgcatacgatctttaatctgcttgggatatatctggccagtccttattaaactgtattaaatggacaagccaagcttttgctcaaacaagcaggtttttactattaatacctaatatattgagcacatactgattgtcagatttatgcttatgatttcataattgttatttaattcttgaatcctgtgaggcagataaccatcatctctatgttacagatgataaaacttgaaatttaagcagtatttccagattcatttacctagcttctttgtattatttaaaataatgtacaataaggctgggtgcggtggctcatgccaggaatcccagcactttgggaggccaagacaggcggatcacctgaggtcagttcaagatcagcctggccaacatggtgaaacctcgtctctactgaaattacaaaaattagccgggtgtggtggcacacaccttagtcccagctactcgggaggctgaggcaggagaaacacttgaacctggtaggcagagatagcactgagccaagattgcaccactgcactccagcctgggcaacagagcgagactccttctggaaaataacataaaattaagtagtgtacagtaaatggacaaaatgccatagtagttgagaatttaaagtcaattccccccagtctaagctccatgagggcagagactgttctgtactgtcaaattcctagacgctagcaaagtatacagctatagaaggtttataataaatattttggggaaaatgaatgaaaatagtgaattttatcaggaatgctgtcatagaaacatttacaatgccttttcctatctgttttcaccagaaagttaaatgaacatcagctaattaagaaagcagaatccttcccctgggaattcagttctcactgcctattataaggcagttttgacatgacagaaccacaactaaatggctgtaaatgtcacagtgtacattttaaacctcatagccttagagtttgatgagaccaggcacagtgactaacacctgtaatcccaacactttgaggggctaagatgggcaggaatttaagatcagcctgggcaatatagcaagaccccctctcaaaaaagatttttttttttttggagatggagtttcattttgtcacccaggctggagtgcagtggcatgatctcggctcactgcagtctccacctcctgagttcaagtaattctcccaggaggctgggttcagcctccaaagtagctgagattacaggtgataccaccatgtccagctaatttttgtattttttagtagagacggggttttgcctgttggccaggctgctctggaactcctgacctcaggtgatccacccgccttggcctcccaaagtgctgggattacaagcatgagccaccgtgcctggccatcattttttttttttaaataaagaaatagggtctgttggggtgtgatgttgaatttgtattggtctcagacattcatatatgctatttgcatgaagtggtttatttttattcttgattgtgttttcaacttgcaagtctttttttttttttttttgatactgatcttcggctggagtacaggggcgcgatcccagctcactgtagtctctgcctcctgagtagctgggattacaggctcatgccaccacgctcacctaatttttgtatttttagcagagatggggtttcaccatgttgcctaggatggtcgcatctcctgacctcgtgacccgctcacctcagcctcctgaagtgctgggattatccatttgatcataattcgaatggatatacgatcaggagggaagagcaagacctgacttattaagcacaaactgcctgaccttggaaattgttgatagaccttcattcctgccaagcatttttcttttctttttctttttctttttttttttttagatggagttttgctcttgtcacttaggctggagtgcaatgtcacggtatcactttaacctccacctctgggttcaagcgattctcctacctcagcctcccgagtagctaggattacaggcgtgagccaccagggccagctaatttttgtatttttagtagagtgtttcgtcatgttagccaggctggtctctcgaactcctgaccttaggtgatctgccagcctcagcctcccaaagtgctgggattacagacttgagccaccacgcgcagcccaagcatactttttatgttttttgtttttgttttgttgagacagggtctgtcaccaggctgctggagtacagcggcatgatcatgactcactgcagccttgaactccctgggctcaggtgattgtcccagctcagcctccccagtagctggactacaggcacatgccaccacacccagctaatttttgtatttttagtagagacagggtttcgccgtgttggccaggctggtggtacacaccaccatgcctgggtaacccaagcatacttttacctcagtcaaatgtcagataaatttcagaagaggtattagttcgtgtgggtccagaaaaagggaatataggtctaaggaagggtgagaaatataaagcagctgatttagaacttgccagaaataccagcggtctcaaaatagaataggcagcctttgctactaagttttacattgctggaggtgtacaagtggagatacaagcaaagctaaggccttcactcaaacatgtttatattatggcagaactttgaaaatgattacactcatttttactagttttgatgtgattttaggatatttcaggacagtctatttgaaatgacaaaggaaagtgagtctgttttgtcttcccaaaaagattgtttctaagatttcatgattctcccttgagttcatgagaagattcttgtgagaaggaaagaaaccctggacctgattttacccctggctctgtagcaaaaatgagggtgggaagatcaaatgaaattgtgaaacatgtaacttataaaacatatatcatttcatttcagaagtaacattaaattcaagccctttgaaaggcctattttatttttttaagtgtcaactagggcaaggtctcaaagttaaaaatttgagagttaatgcttttgtttttctttttcttgaaaagcattcacagctctgatggagggcaaaatcaataagcagctgaaaaaagttctgaagaaaatagtaaaagaagcccatgaaccgctggcagtagctgatgctaaactaggaggggtcataaaggtaaagtcacgatatttttggtcatgcctgctagtcagatctcacagcataccaactacaaagcctagcctttgcaataagttgcttatcataaattctcaatacatttttttcttttctctaagctacatgataatggatttcccctaacatcagctgaactgagcaaataagtaatacctatttgttctagaagatatagaagaacaaaaaatgataaaaattgactttaacaaatctgctacccatatataatgttaatgttctatgtatatcatgccatatttttgtctagccacatttttttccaacgaaaatggggtccttatattttttagaaatatatttattagaaaacttttagtaggggtgtattgctggagatgaaataaaatgtgagagtggaaagaaagactaggaaaatagcctcccaaatacagaaagcagaacaattcgggcggggcgcggtggctcacacctataataatcccagcattttgggaggccaaggtaggagtatcacgaggtcagcagatcgagaccatcctggctaacacagtgaaaccctgtctctactgaaaatacagaaaattaaccgggtgtggtggcaggcgcctgtagtcccagctaattgggagtgcagtggcgcagtctcacagctcactgcagacttgacctcctgttctcaagcaatcctccctcttcagtagctgggactacaggcacatgccaccatgctggctaattattttattttattttatttcatttatttgagacagagtctcactctgttgccctggctagagtgcagtggcatgatctcggctcactgcaacctctgcctcccgggttcaagggattcccctgccttagccttccaagtagctgggattacagacgcccgccaacacgccctggcctcccaaagtgctaggattacaggcatgtgccaccacgcccaacctgtaatttttttttttttttaagacggagtctcactctgtcgctaggctgaagtgcattggctcagtcttggctcactgcaacctccgcctcctgggttgaagtgattctcctgcctcagcctcccgagtagctgggactataggcacctgccaccacacccggctaatttttgtatttttagtagagacggggtttcatcatgttggccaagatggtctcgatctattgaccttgtgatccacccgcctcggcctcccaaagtgctgggattacaggcgtgagccaccgcgcctggcataacctgtaattttaaaaagaagctaaataacaggtagtaaaagatctccttaaaccaactacttggtcaaattatattaatctttttatagcttttaatttatatagccaagctgtcttctggaagcttgtatcagtttttacttccaccagtgatacagtcaagtattctacaaacacactggaaattatgcttcttgtccaactgagaaatgcgtatatttaaattagtgccactttaatatttaggaaataatttcaggctgggcgcggtggctcatgcctgtaatcccagcactttgggaagatgaggcgggcggatcacttgaggtcaggagtttgagaccagcctgtacaacatggtgaaaccccgtctctactaaaaatacaaaattagctgggcatggtggctcatgcctgcaataatcccaggccgagacaggagaatctcttgaacccaggaggcggaggttgtagtgagccaagattgcgccactgcactccagcctgggcgacagagtgatactgtgtctcaaaaaataataataacaacttcaggaaagtctttttttttttaatttaatatagatgttcatgttcttgtaggaaaagctgaatctcagttgtatccatagtcctgttgttaatgaacttatgagaggaattcgttcacaaatggatggattaatccctggggtagaaccacgtgaaatggcagctatgtgtcttggattggctcacaggtgagaattactggaaaataaagtcaacttacttttatttgataagcgcttaacatagatctgttctaagaatgttacaaatgctcatttgaaccacatcagaaccttatgaagaagatgatagtaatatcctcatttacagatgaaactgaagcccaaggtcaatacagctggtaagtggtaaagccaggatttgaacccaggcagtctggctctattgtctggattcttaaaaccttaaaacctcatcaaaggaattctctactactctgatcttggatgccctgtttcttgggctttccctcctttatctctgctaagtcatgccactcctccatctacttagtattcccccaaattctctcatctgctatggtcttatgggataggtgtgtatttgtgttttcattgctttactctgatttttaataaggcaaagaggactaggtgcagtggctcacccctgtaatcccaactctttgggagaccaggagtttgagactagcctgagcaacatagcaagaaatatgtctctctctgtgtttttttgtttgttttgtttttgttttgttttttttgaggcagattctcactctgtcgcccagactggagtgcagtggcgtgatctctgctcactgcagcccctgcctcccaggctcaagtgattttcttgcctcagcctccgagtagctaggattacaagcgtgcaccactactgcccaactaatttttgtatttttagtagagacgggctttcaccatgttggcctggctgatcttgaactcctgacctcaaatgatccatccgccttggccttccaaagtgctgggattataggcatgagccaccacacccggcatttttttttttttttttttttttttgagtcagggtctcactctgttgctcaggctggggtgcagtggtgcgatcttggctcactgcaacctggacatcctggactcaaacaatgccacctcagcctcccaagtagctgggactgcaagtgtgcgccaccatccctggctgattttttaactttttgtagagacggggttttgccatgctgcccaggctggaactcccaggctcaagtgatccacttgccttagcctcccaaagtgccgcgactgcaggggtgagccaccatgcccagtcttctccctatttttaattgcatgttaaccctatcatatttcattagaagtcccttagaataggcattattgctatgttgtgatacatctgttcatgaaaagcttaatactttggaattgcactacagttaacagggttgtgaagaaaataatggtaggtagttgctcaaaacctgtgcaactttgtaatcagtactgtcaaatagtaatcctaataaaattattaccacagttcaaaagacattttaagctaatattaaaagaaacactacaggctgggcacggtggctcacgcctgtaatcccaacactttgggaggccaaggcaggcagatcacaaggtcaggagatcgagaccacggtgaaacctcgtctctactaaaaatacaaaaaattagccgggcacagtggcgggcgcctgtagtcccagctacttgggaggctgaggcaggagaatggcgtgaacccgggaggcagagcttgcagtgagtggagatcgctccactgcagtccagcctgggtgacagagtgagactccatctcaaaaaaaaaaaaaaaaaagggagaaagaaacactataggccaggcgcagtggctcacgcctgtaatacatcccagcactttgcgaggctgaggcaggtgaatcatgaggtcaggagatcgagaccatcctggttaacacagtgaaaccccgtctctactaaaaatacaaaaaaattagccaggcatggtggcgggcgcctgtagtcccagctactcgggaggctgaggcaggagaatggcgtgaacccgggaggtggagcttgcagtgagtggagattgctccactgcactccagcctgggtgacagagtaagactccgtctcaaaacaaaacaaaaaagaaacactacaatttaaaaaggtctattttaaaattaaaaggtgggcatagattgaaagggttgaagctgctaagctagagttaagagcaaaaatgcacaaaggttagggagagctttgtaataagcatttctaagagagaacaaatagtgaaactgagtcaaaaatccaaacctgggtaaatctgcattgtgtatagcagtggttccctatcaagggcaatcagatgtccccccagtaggcatttgtctatgtccatagacatttttggttgtcacaattggaggtgggttggggtctgccatgagtatctggtggataaaagttagggatactgctaaaggtcctataatgcacagggcagcctgtacaacaaggaattaggcccaaaatattaattgtgctgagatgaaaaaacatttttatacagacaatattgttactccacagctttctgttttcagatgttaagagtcctgcaaagttcctaactggtagtataaagcttaatatgtgctattaaaaattgcatgaaccaatatggctttttttttttttttttttttgaggcggagtcttgctttgttgcccaggctggagtacagtggcacgtgatctcggctcactgcaacctctgcctccccggttcaagcgattctcctgcctcagcctccagagtagctgagattcaggcgtgccccaccatgcctggctaatttttatatttttagtagagacagggtttcgccatgttggccaggttggtctcgaactcctaacaggtgatctgcccacctcggcctcccaaagtgctaggattacaagcgtgagccaccacgcccagtccaatatgacttttgtattacacagcttatcctatttgtcattcatacataaactcattcatgttacagaaataaaggtcgtagcagcacatatagtttttttttttaatgtgtattttctgttctcgtatggtgcatttctacttagctgatttttcttcttagaaaaaccaattacagctctgactacaggctgatttgagtaaaaacaaaaacaaaaaaaaactttaaggtgttaatttaaatgcttttcctagatgctatcttgctaatttattttcccctttcttcccagcctgtctcgatatagattgaagtttagcgctgataaagtagacacaatgattgttcaggcaatttgtaagtatagtacatgcaaagtccgatttgttgctctgtccttcatgcgttttcatactgttgaaactatcttttatgattctgtctgttgagaaagagaaaggaggccaggtgtggtggctcaagcctttaatcccagcacttgggaggctgaggcaggcggatcacctgaggtcaggagttcaagaccagcttggccaacatgacaaaactctgtctttactaaaaatacaaaaaaaattaaatgtgcatggtggcgtgtacctataatcccagctactcaggaggctgaggcaggataattgcttgaacccaggaggcggaggttgactatttggagattatatgaatcacagaattaacattacgttaattaattcatttgtatttttccatgaaaatgttaaaaacataagtgcaatctttgtagttgtgtattctgctgtgtcattaaatggtttttagaaagctcaaaagctgccaggcacagtggctcatgcctgtaatcccagcactttgagaggctgaggcgggaggatcacctgaggtcgggaatttgagaccagcctgaccaacatggagaaatcccgtctctactaaaaatacaaaattaaccaggcatggtggtgcatgcctgtaatctcagctactcgggaggctgaggcaggagaatcacttgaaccctggaggcagaggttgtagtgagttgatcgtgccattgcactccagcctgggcaacaagagcaaatctccatctcactaaaaaaaaaaaaaaaaaatcaaaatcttaatcgtttttctattttagaaatgcattcggccgtggctcacgcctgtaatcccaacactttgggaggcagaggctggtggatcacctgaggtcaggagttcgagatcaggccaacatggtgaaacccgatctttagtaaaaaataaaaaaattatctgagcatgatggtaggcgcctgtaatctcagctattcaggaggctgaggcaggagaatcacttgaacctgagaggcggaggttgcagtgggccgagatcgcaccatttcactctagcttggacaacatgagcaacactccgtctcaaaaaaaaaaacaaagtattcggctgggcgcagtggctcacacctgtaatcctagcacattgggaggccaaggcgggtgaattgcctgagctcgggagtttgagagcagcctggctaacatggcgaaaccctgtctttactaaaaatacaaaaaagtagccagtcgaggtggcgtgtgcctatagtcccagccacttaggaggctgaggaaggagaatcacttgaacccaggaagcagaggttgcagtgagctgagatcgcaccactgcactccatcctgggtgatggagttagactctgtctccaaaaaaagaaaaaaaaaagcgctcaaccagcgattcctttcctagatttatacccaaaagaattaaaaacagaactgagttgcttgtacacctatgttcataacagtgttatttacaaaaccaaacagtggaaacaacccagataccttttaacagatgaatggataaactgcattgtggatgcagcttgaatgtccctaatctgaaattcaaaatgctctgaaatctaaaactttttgtggtaccacacaaatccacaagtggaaaactccacacctgaccacacgtcaaaactttgttttatgcacaaaattatttaaaatattgtgtaaaattaccttcaaggttttgtatataaggtatatgtgaaatgtagatgcatttcctatttagacttcgagttccatcctcagcctcatacgtgtttgcaaatactctgaaatacttctggtcccaagcattttgggtaacgtacacccagccacttcacacagtggaatgttagtcagccttaaaaagaaatgaaattctgatacatatttcaacatgataaaccttgaaaatatgctaagtgaaatagtcacaaaatactgcatgattctgcttatatgaagtacctaaaataggtgaactcagagacagaagtataaagataactagaggttggggggaaggtgggaatgagttactgtttaatgggtacagaatttttcagtttctgatgataaaattgctctggcaatagatcctggtaatggttgcataacatcataagaatacttaatgctactgaatagtacacttgaaaatggttgaagtgttattttttattcttttttttttaaattttttgcgacggaatcttgctctgtcacccaggctggaatgcagtagcacgatctcggctcactacaacctccacctcctgtgttcaagtgattcttctgcctcagccctccagagtagctgggactacaggtgtgcaccaccatgcctggctaatttttgtatttttaatagagatggggtttcaccatgttggccaggctggtcttgaacttctgacttcgtgatatgcctgtctgctgggattacagacatgagccaccgtgcccagcctgaagtgttaaattttatgttgtgtatgttttaccacaataaatccctttaagttttgtttgtttgtttttaatctactacagccttgttagatgacttggataaagaactaaacaactacattatgcgatgtagagaatggtatggctggcatttccctgaattaggaaaaattatttcagataatttaacatactgcaagtgtttacagaaagttggtgagtaatttgttcatcctttaaggcattgaaagtaaatgaatttgattgcatcctaaaacatgacgtatagcattttgttaagcaagattcccagggtttttgcaatttctgtgtatttgggaagtgtagcagtttagtgtcttaaatttaagaaacaaaatgaattttaacttagattttgatggcctataacatgatattagtacctaatgctaaatagcagtattgccgtctgtactgttaatatacagaggaacttgattgttgattgtcgttaacgtacagaggaacttgattgattgatggtttacttgccttacgaattactggccccagcttcagtataaaattgtctgtgacattattattagtcctgtcttttttaaatttttgccacttatattctgtaataagtgttgtggcatattttgtcctctttttactctgattattttttggaagaaggtggtggggagacatttaatgtctaaacttaaacccttaaatgaggaaaactgttatactaggtcaaacttcttcattttttttgttttgtttaggcatccttttcattggctttctactttttcttttgactatttgctggattttatataatttgttgaagagtgattctccctcatcctctgcaaacattccataggcgataggaagaactatgcctctgccaagctttctgagttgctgccagaagaagttgaagcagaagtgaaagcagctgcagagatatcaatgggaacagaggtttcagaagaagatatttgcaatattctgcatctttgcacccaggtaaattttactcctggagaatctagttgtggtgttaccagctctatagtactaatttttctgatggcaatgatgatttttacacttattgttgttcacctgataacataaatatgagggtgttcagtcactacctcatctgatgccatcatgatttgtatacttaaaagggggaaatacatattaaaaggaagtaatttacaatcatcgtctgaataatgaattaaccaaaaatcaattaagatggcagagaaggccaggcgcgttggctcacgcctgtaatccccgcactttggaaggccgagtcagggattgacctgaggtcaggagttcgagaccagcctgaccaatatgatgaaacccccatctctactaaaaatgcaaaaattagctgcgcgtggtggcgtacacctgtaatcccagctactcgggaggctgagacaggagaatcgcttgaaccagggagggggaggttgcagtgagccgagatggcaccattgcatccagcctgggcaacaagagcaaaactccatctcaaaaaaaaaaaaaaaaaaaaaaaggatggcagacaattatggattgagccttttaattctgagtcttatgtctatatcttgtgatttttttttctttcagatttgaaggtagccatataggaattaaaaagagcatgatacaaatgtttattgctcagaatcttttttttttttttttttttttttttttttttttttgagacagagtctcaccctgtagcccaggctggagtgcagtggcacgttctcaggctcactgctacctctgcctcccaggtcccagttcaagcggttctcctgcctcagcctcccgagtagctgggattacaagcacgtgccaccatgcccagctaatttttgtatttttcatagagacggggtttcaccatgttggccaggatggtcttgaactcctgacctcatgatccacctgcctcgacctcccaaagtgctggaattacaggtgtgagtcactgtgcctgggctgcttagaatcttttaaaaatacagttacgctgactaagattttcaggcagtggaccaagtagtttacatacattatataacgaagtcctcattacagccatcttatagaaaactgatgttaggatcatgaggtcaagagatagagaccatactggccaacatggtgaaaccctgtctctactaaaaatacaaaaaattagctgggcgtggtggcgggcccctgtagtcccagctactccagaggctgaggcaggagaatcacttgagcccgggaggcggagattgctgtgagctgagattgcgccactgcgctccagcctgggaaaaaaaaaaaagaaaactgatgttaggcataggtgatgtacccagtacccagggttgtgtagctgctctttcataattgagggctccagtgttttagacaggaatttttactgtttttactcatatgatatttgtgacttaactttattccttatactaggtgattgaaatctctgaatatcgaacccagctctatgaatatctacaaaatcgaatgatggccattgcacccaatgttacagtcatggttggggaattagttggagcacggcttattgctcatgcaggtgatggttttaatgtaatttgtaaatatgagtgtttgaagtattttctggttaggattttgtttacatctttaaactacagctgttaaagaaattttagctgataacacaaaagtagatgatatgtgggagatcactaagggccaagtgttcaatgatgatttctatttgtttgcctgatttccttttggataatgaaggcatctttagtcactacctcttctgagacacttgtggtccattgttagaagtttgttagggttaattagaacaatcggatgaatgcaggaggataaaacagttaacattttcataataaaaactcactagacctagatttgaatacagttttaagaaatcactgtagagaaagaaaaaaaaaagaaatcactgtagaggatttgtgcccttgattgattaccttagtttcactattgagtgtgaggatgtaatatatttgactttcaaaaatattttcaacaactgatttataataaaactttgtatatgtgtatggcagtattataaggatgatatgctataattaaaatgctatgtaattgaatacctacaaatacaatgaagtactgattcatcatttttatgttacttggagacattgttataattcatcaaaaaagattatatcatctgcatcagagtgtttaaaatggcataactcctttttttttgtttgagacagagtttcactctgttgcactggctggagtgcagtggctcactgcaacctctgcctcccaggttcaagcaattctcctgcctcaggctcccaagttgctgggattacaggcatgtgctgccaccatgcctggctaatttttatatttttagttgagacagggtttttgccatgttggccaggctggtctcaaactcctgacctcaggtgatctgcgcacctcagcctcccaaagtgttgggattacaggcgtgagccactgcgcccggcctggcgtaactcctttagctgcatcattaatcaaaggtttcattcaaatgccctcagctataagatcagatgatttcattgtctctacccattttcataggtatagctaaacttgtagcagtaagcaatggcaggggttaatagaagtatgtatttgttggccaggcgtggtggctcacgcctgtaatcccagcactttgagaagctgaggtgggtgggtcacctgaggtcaggagttcgagaccagcctggccaacatggtaaataaaaccccatctctattaacaacacaaaaattacccaaccttggtggcatgagcctgtaatcccagctactcgggatgctgaggcaggagaattgcttgaacccgggaggtggaggttgcagtgagccaagattgtgacattgcacacagcagtggtgacattgcttgcctgggtgacaagagtgaaactccatctcaaaaaaaaaaaaaaaaaaagaactatgtatttgttacacttttaaaactatgtctagtgcttaagttcatagtattaatagagtctgttttctgacaggaaatattctatacagcatatccaactaagcagcatgttgataacaatagtccccagctatttatggagatgtattctaagctcccccctccaagaatgtttgaaacagaggatagtactgaatcctatactgtatatgctgttttttcctaaacatacatatctataataaagcttagcttataaattaggtacagtaggatatcaacaacagtcataatataacagttataacactatgccagcagggccgggtgtggtggcttacgcctgtaatcccagcactttgggaagctgaggagggtggatcacgaggtcaggagttcaagatcagcctggccaagatggtgaaaccccatctctactaaaaatacaaaaaaaaattagctgggtgtagtggtgggtgcctgtaatcccagctactcggaggctgaggcagagaattgcttaaacccgggaggcggaggatgcagtgagccaagatcgcgccactgcactccagcctgcgcaacagagcgaaactctatctcaaaaaaaaaaaaaaatgcaagcataactatttttgtgcattggttacttgaatataagcactgcagtactgcacaacggagagggctacgaaagtgactaatgggtagatagagatgattcatgtcctggggggagctgagtgggatagcaagagatttaaaacttaggaactatttatttctggaatttcctttttaatattttcagactgcagttaaccacaggtaatttaccacacaaagtgaaagcacaggtaggggactattaatagatacttgtaggaatatctcttcctaataaatgtgtttatttgtaggctttttcatatctaaagcaatagaatatttgatacaatctcagaaagcagggaccagattagtgttcgtgtgtgtgacatttatgtcactcctgtagtatactaatggaatttagaatagtactgccatctctcaggtgaatagaaacattgaacttaataagcttagccttcagtttgtcctaggcattcattgcaaacctgcttgtgctaatgaaggaattacaaatgaaacatcaagatttttagggaattctggattatagaattctatattatatgtgatttttatttattatggtggctgtaataattctataggtcttttgtttcagtacgtggaacattcatatatttggaggtgcattctttgtaacttttttcttttgtaggttctcttttaaatttggccaagcatgcagcttctaccgttcagattcttggagctgaaaaggcacttttcagagccctcaaatctagacgggatacccctaagtatggtctcatttatcatgcttcactcgtgggccagacaagtcccaaacacaaaggaaaggtgtgttatagggttttgctttgtttttgaggttagactttttcattttttacaacccatttttcttctactctgtagtacacattaaatcttctattgtctctttcttgttaaatagggaatggtgagttatttaaataaaaagtgctttgtgtacactgaaggataaggttagaagaaactgttattggttggattaaagccagtttcttccattgtgttagtatttttttcccccctagaatctccctgtggttggcacactgaaaatactatctctggcagcaaaaaaaaaatctaacatttacgaatcataaaaaatagcatatgcattatgctaaaacactttgagagaagtcactaaactttttttttttgagatggagtcccgctctgtcgccaggctagagtgcagtggcttgatctcggctcactgcaacctccagctccctggttcaaacgattctcctgcctccctgcctcagccttctgagtagctgggattacatgcacgtgccaccacgcccggctaatttttgtattttaagtaaagaccagtttcaccatgttggccaggctggtctcaaactcctgacctcctgatccacccacctcggcttcccagagtgctgggattacaggtgtgagcacctgtgcctgtcctaaatcttcagtagccttatgagatgtaggtatctctatcttgcagatgatgaaactgaggcttagacaagttaagtactttcaatgtttttgaaagatgtgtcgtttaacagatctaaactgaaaattgataaaatttagagcagagtggtggaggaaaataaagcgttcaataaaataaaatgttaattagattgaaaaagaacccacgcttttttttgtttgtttgtttgtttgtttgtttgttttttgagatggagtctcactctgtcgcccagactggagtgcagtggtgccatcccggctcactgcaagctctgcctcccaggttcacgccattctcctgcctcagcctccagtgtagctgggactacaggcgcccggcaccacacctggctaattttttgtatttttagtagagacagggtttcaccgtgttagccaggatggtctcgatctcctgacctcgtgatccactcgcctcggcctcccaaagtgctgggattacaggcgtgagccaccgcgctcggccagaacccgcacatatttaagattgttacgaggaaaaagatgcacttcttttcagtgacctcatagcacagaactaatgtcactgagtagaaactaaagtttaaaaatattttttaaaaaaacctagtttgagctaatatttgacatgaattgctgtaaaatcttttcagccacagaagtgttggtggtgatatatggccattagattgtggcaaaggttgaaatacgatggatgatttgaattgtatgattcataatagttttataactcctgattttaaaacatccaagttattgaggattttacatctgaacatggaatatagttcttcatgtttttctattagatttctcgaatgctggcagccaaaaccgttttggctatccgttatgatgcttttggtgaggattcaagttctgcaatgggagttgagaacagagccaaattagaggccaggttgagaactttggaagacagaggggtaagaactacatcatgcctattccagaagtattacttgtcaaaagttaataaactgagtaaatttattaacttcatctgctaaacagttttatgatacttattagtatgtctaaagtattctttttgtgcctactgttaacaattgctattatttaccaagaattgatgtatccaactgcatttgccattaggatatgctattcaaaataacaaaacaaaaaatagcagaaattgctgtttgctggcccactgattcactagactgtatagtgtattataaagagattatgacttagaagtgtatttgtaatttttcgttttcttcttagataagaaaaataagtggaacaggaaaagcattagcaaaaacagaaaaatatgaacacaaaaggtgagtacatttaagtgaggatggggtgaatagtttttttaaatgttaattattgacagtaattttttattgtaaacttcaccttgatgtgcccatagttttttcaaatttatttatttgaccaaaattgtgtatgtttattgtgtgtatgttgttttggaaaatgtgcacattgaggaatgattaagtcaagctcattaacatgcattgtcttatgtactttttttgtggtgaggacaccttaaaatctacttagcaattttcaagaatataatacattgttagctgtagttaaccatgttgtgcacccctaatttttttccatgccatttagttttccgcattaacttctactagttttcattcatatacatatttaatttattcatttccagatattgatagtaaatttttttaatctaaagttcctctataatatgttctttatcaaaaagttcactcagccgggcacagtggctcatgcctgtaatcccagcactttgggaggctgaggcaggcagatcacctgaggtcaggagttcaacacaggcctggccaacatggtgaaaccccatctctactaaaaatacaaaaaattaactgggtgtggtggcgggcacctggctga

SEQ ID NO: 276 - DNA, 18916 bp, Homo sapiens
  source 1..18916: mol_type = other DNA
gggctgaggaggcggggcctgggaggggacaaagccgggaagaggaaaagctcggacctaccctgtggtcccgggtttctgcagagtctacttcagaagcggaggcactgggagtccggtttgggattgccaggctgtggttgtgagtctgagcttgtgagcggctgtggcgccccaactcttcgccagcatatcatcccggcaggtaacctcaggctccaaggggcggccccggtccctggctgtggaggggtggctctaattccgcagaaggcaggaatggggtaaaggaaaaaagcgcagatcttgggtgtggagggagtcaaggcctgcgtgcaaagaagggaacaaatccaggtattgagaatgggaaaagaaaagggaaggaggggatgctggatgcttggatatgcagaaggtctgcttttgggcctgggagggagaaactgggcggtgaggaagttggatgcaacgacaaggggaaaatcaggtctgcacttgggttggaaaatcgaggggtggaagttgcaagaatgcatgtagaagactaagcctggagtgtaggaggaagaaaacgtgcagcagctgggggctggatgcaaagaaggctgtaagccgcagacgggcgtctgcaggcaactcaggcggcgaggaatagccttgaagccgatccctcgcgtccgccagggggcgtggaggggcggagctccagcggccttcagaggggtcgctaggccacacggggcgagagggggctgggggaaacacccccgccagttccgggtgcctggagtttaaaaggtcccagcaccagcgaggggaggggaggggaggggcgggcgtggagacctggaaggaggtaccgatccagccttgattgcagccctcttgcacaacggccataaggacgggtgcaggccaagagcaaggacatgcaaaccccaagacctgctaacgggcggcgaagcgggggcacgccctcgcacacgcagagataaattgtgctcccatgacctttatttggaaagtgcctgcgggcctaaaattggcctttgtcccaccgagtacactcagcactgtactttaaaccggataaactgggctgtctggcaggtactaaaaacagctaaattctcctgtgagtgttctgtatgttaacacttttattccttgttttgttttaggcgataaactacattcagttgagtctgcaagactgggaggaactggggtgataagaaatctattcactgtcaaggtgagaattagcaaattttcccccttcttctgtactttctttgatgtggcagtacagtgtttaactggtcttgggggcaggccgaggcactgcaagggaatgagtgaggaatatttccaacaacgaattccaacagcttccttgtttcttttaatacagtgtcttatctgcaagagatcctttttgcccagaaattattgtagttcatgaactcggcaaaaaacaatctggccaaaaacttgaggttgatgaaaataatattaaatggctcttttttttcattaaactactctgtattgttattccaggtttattttctggaattgcacaattatgttaggagataggattcagctacttcatatgagctggtgcctgctggtcttggaacagcccttccttctgaagttgggattgggttggagacaaaatctgaggggcaacaaaggtggagaagtcagtccagtggggcctcaagcccatcccatggaaatcagatccagaagaaatacaattatgttccacatggtagtaacaataaagcttcactgttttagttaaaagatggtaaaaatttcatggctaagtaatgtgaggaaaacctgaagcgtctgaagtatgcattatgagataaagaaagattactgcagagagtacagttgctttaactgagaaggaaatagtgaactaaaaagatatcagtcttcacattttaggtacaatatttgacctctattaactgtatttgccatcaagaataaattgccatgtcatgactgttgcatcatactatatagggacatggccatggaagtgtattatcaggaaccagataagttcactgcctccttttttgctttgttttaaaacaaggataggtgtgacagtggaatcaaacatgaactgaatcatatgctttcagctgtactacaaattatacttgacattacaaatgggaagtaattgactcatccacaccattctgttcatttcttttagtctagttcagttccagaaggttcccccaaaggaatctcctaaacactagtaagaagaattctagaattgcgaatttgggaagtgaaaatgggcctggggattggaaatacatccaggcttgtcaagaaacagacgcttactgtctactaatcattacatttttatttaaagaccaaattactttagctcaatttttcaagaaagactattttaggcttcttatctaataattctttaaagtcaattctcttgacttttttagtccttaagagaataaaagcaatttgcagctgtgttgttggattaaaaaagagtttcgattagagcatcattagaaggaatagataacttttagcaggctcagagcttcttctgcctctagggacaagctgggacagtttcatttcttccaaagcgtccaaccttgcactttctgagaatcagattgatttgtatatgctacccccacaccctatccttaaagtgctgtcttcctaggacaatgcacagtttgtcctatcccactcactagcagcttacccttgcctgtgaacagccagaagaagatgacagggacatgcttgggtcctgggcagtggccctactgtatagagattcttctaattgagaaatcactttgttgtatttagccccacatctccaatgtctgtgttatctctaggaaaacagttccaccaggaattcttcgtctcgcttttagacttaaagtttccctgaatatgggtcacaggaaccagctgaatctcctcatggctagttatttttattaaataacaaaaacagcctcttaaaggaggagaaatgctagcactcaccattctggacatcttgagagcccagtaaaatgatgagttggactgaagtgttcaataaacatgagattgtggaaataatctcatttcttaagacaaaccagtagttgagaataatgattgcattatgaagggcacgttatagggtcaggctctgccacgctctagctaggtggccttgggaaagctcttttttttttaacaaagtaaaatggggaaatgatggccatttttttggattgttatgagggctagctcagaaaccgcgtgtgaaacataacacaatactttgttcagagaagatactcaattctaatggtaaatagaattgctgttactagctttttattcaactacacataaattgaattgcatgaattgttcttttagtagtcactacgttgtttatataaacactacgttgtttatatatttcactttataatgaaataaatgacaaggcatgtattttttttttctttttaggtttattgaagtcaaaatgtccaaaaaaatcagtggcggttctgtggtagagatgcaaggagatgaaatgacacgaatcatttgggaattgattaaagagaaactcatttttccctacgtggaattggatctacataggtaaatgagttacccctccgtgtagcaaactcagaaaggataatctggctgggcatggtggtgcacacgtgaagtcccagctacttaggaggcagaggcaggaggatccctcaagaccaggaattcaagtccagcctgggcaacagagtgagaccccatcactttaaaaaaaaaaggaaaaaaaagggaaggagaaacaggaaaaaaaaaaagaatataatctgaattattttgaggtgaagttagctttttttatatagatatagctgtgttttgtgaataaagtttgttttaagcctaaatatattcagatgaatcttctaattttaacatactgctagaaaaactggatttatcatctaaaagtcaagaattataagggaaagaatgattttcagattcttctaaccttctgtttcctgtgaaggttttatttgtaataaaacagtggctaagaatagtacaatgtattgagaaaagggaaataagagaggatgtaagaaacagtaaactaaatgcagttaacacaattttgtcatttcaaactcaattttctatcactttacttagtcaatggacctgtttccttttcatgcctcaccttttgcccttttcatacaattgtagtgcagaaagaattcatgatgtttcttagttgaacccctcctttccagcaaaattcccttaaatcctgtgtccctttgccctgtgtgtaaagtgcctggggacagatgcaaaagtctatgtaattctctcatttttttcgctgtgtttttcataaacttgcttctgttctttgtacctttaggtagagatagaatttttaaaagggtaaagtggctgaagactggcatagaaaaatattgagcaacacgtttcagccaaactattggcaactctaagtgtgtttgcctcagcccagaattagtcatcaaaatttgtcctaaggacctgtttgagtggagacatttaattcacataatgtcattaaacatactttttaattgttctaaacctaagctgctgatgtctatattgaaatcatgataagatataaatacttgcagaagtcaaccaaacataagaaattaggcataaaaacatcttccaactaggttaaaaaaaaaaagcatcttaggaactcctgtttcaggactttacatgacagtaggtgaactggcagggttcttttccttataatggctgcaactaaagatgctttgagcctctttagtgtggaatcatgaggagttttaaaggggagtcactatgactaggaggaaaaaatttggtggctgcagactagataatttttggaggctcaaacaagttttaaatttttccaaaattcctattattatcactgactggttctttttcaggagaatggagcaggtagtttgttttatgtaggctggacagtggtctgggcaatttgttccttcctttcttatcttcttagaaatgttaagaagacaagcaaaaaatctaataatttgctgatagattctccttatgagaaatggttcctaggaacttgaaaactactgatcatacttcctgttggagttgggattggatcaacatttcctatgcaagaagataacaaaggacatgactttgttagatttatatgaattatctaaagtcgaagcagttggaagttatttttatttggaaatatgtcaagattactatctctttgtttgcatcatgagttgggtaggagatctaagaaaggaagataagggaaccaaaaagaaatctagaggcaggttttaagagctgaaaaaccttttaaatccttggagaacagaataaacaaaacattattttgttttcttgctttttaacaaactattgcatgcttcaaataaagctttgcagtcattttctatgctccctggacaactaacattctttcagctctgaatgacctgcaatctttgtgttggtgtatattaagctattactctctggtatgtagaaaaccattgatggattcctttacttacccaataaattgtaggcttgtttccagagcaaacacttgctcaagaattacagaaggaattagctgggcatggtggtgcatgcctgtagtccccgctactggggaggctgaggcgggggaatcacttgaacccaggaaggcagaggttgagtgagccaagatcgtgccactgcactccagcctgggcaacaaaacgagactcatctaaaaaaaaaaaaaaaagggaaaggctcattttatgactaactggcattaatgaagtagtcattcgcatttttggcatcaactgtcacatctttacctcccaccacttcaacgtcaaaatacaaaaaatcctttaacccctcccacccccttttatttttaaagagcaatatttactaagggaaaaaggtggtccttagacttacacttattatactaattatatggagagaaaccaggccattattgcctctatctggtgaaaaacaggaggcaaagggcagagtttgatggtttccattcattttcctgatagacagcttcccattacaagaggaggggcagcccagcagtctagcctctcttagttctctttgtagttggcacccatcttctgtgtttagggtgtgccagtgctaaaacttggcagattttggtgtactcagagccttcgctttctgcataatgagctctatatgccatcactgcagttgtaggttataactatccatttgtctgaaaaactttgcttctaatttttctctttcaagctatgatttaggcatagagaatcgtgatgccaccaacgaccaagtcaccaaggatgctgcagaagctataaagaagcataatgttggcgtcaaatgtgccactatcactcctgatgagaagagggttgaggagttcaagttgaaacaaatgtggaaatcaccaaatggcaccatacgaaatattctgggtggcacggtcttcagagaagccattatctgcaaaaatatcccccggcttgtgagtggatgggtaaaacctatcatcataggtcgtcatgcttatggggatcaagtaagtcatgttggcaataatgtgattttgcatgttttttttttcatggcccagaaatttccaacttgtatgtgttttattcttatcttttggtatctacacccattaagcaaggtatgaaattgagaaatgcatatatgtataactgtatatttacacacatttagctaaaggcaaatacaaataaacttacaaataggcgtccatctcaacacattttttttcaaacatgctgttttttttcctttatccttttattcagttataccatatgatattgccatttttatgttggtaatttcatatggttcaaccagatctgtggttttcaacactggctgcacaataggatccccttacaagtttttttggtggttttgttttgctttgcttgatttgtttctttgttttagtttcaatgcttgagtaccaccctacacaaattaaaatctgaattccatggggttcaggcattttaaagctccccaggtgaatctaatgtgcaaacttgagaaccaccaaagattgtattaaacatgatcccatcatgcataaaagaaaaaactggctgggtactatggttcacacctgtaatcctagcactttggaggccaatttggaagcactgcttgaggccaggagtttgagactagcctggacaacatagcagaaccctgtctctacaaaaatgaaaagtatttcaataattatgtcaattgttcatggaagagccagttttgtttattcatatacaaagtgagtaggcgaagctgagtggggtggcatgtgcctatagtcccagctacttggaaggctgaggcctgaggatcccttaagcctaggagttcaaggttacagctatgagctatgatcacaccactgcctacgcaacagagcaagaccctgtctcgaaaaagaaaaagaaaaaaaaaactgactcggtagttgaaagcagccttactaaagcattccttcctgcctggaaaaaaagtattgcttctttacttctgtaccagtacacttgttgccaaattaagcaaaaaaactgccaagtaaacaaaatcaaagttcagtgttgaaactgaggtttcagactttcacagaaagtagtttatgtcttaaaaggaccttaaaaacaggaatctctcatgctgaaatccagaggttttaatgtagccatcattgaaaacagtgtgttgagggtaaacagtttagtccttgaggggtcagttaactttgttccactctgtggctaaaactatcctttcatcctggccaaagccttcagaaatagctcccaggggcccaagcaagggaaggtagatggcagtggtgcaaactcgctaatcttgtaaaaatcaccctagattctttccagttcagtcgtgccttttttctgcgtatatcctttttgttttttgtttttgagacagagtctcgctctgtcgcccaggctggagtgcagtggtgtgatcttggctcactgcaacctctgcctcccgggttcaagcaattctcctgcctcagcctcttgagtagctgggattacaggcacatgctaccatgcccggctaatttttgtgtttttagtagagacggggtttcaccatgttggtcaggctggtctcaaactcctgaccttgtgatccgcccgcctccgcctccgcctcccaaagtgctgggattacaggcatgccaccatgcccggccttcctctttttttttttttttttaattattttggcatcagtcatttgtaaaaatggccattctatttattaaagtccagaaagagaatttcaaacctcaggttgattcatggactgtttaaatatacataaacctatacaaagcatttatggtgctttggtacctcagtttctcccttttcagaaatagtaataaattaccacccatatttactttatggattttatatgtcaaaaatgttctgtgtaaagtaggtgtttaatctttattgttacttactgctcttttaccagttgttattagtatttctctacacttatagatgtggccggcacctgctggtacctaactctgcaagtatctgattcaattcattgaagaagatacaatgcagcaaagacttatggatgtctagtatatgccaggcatattattccactgagtagctgaggcccatgagggaggtgcctgtccttgaacagccctttcctaaaaatcatcatcatcccattgtagctgctcccagaatgatttgattgctccatatgaacaagtcctataacactagtaacaatgataccatgagagaccgagccccgatggcctaagtaaggacgagacctcaagtcctttgaccctggatgcattatttctactatatcatagttccctccttgtaagactgatgtaagaatcaaatgagattatgcaagttaagcatttaaagcatctggcatagagtaaggacaaagcattagctacctcagtactacaattagtattgttatcatcaccctctagggagacttccctgacttccttccatggtcacctcttttcctctgtcatcctatagtttttttttttttggggggggggtctaataccctcttttggcatttgaaagctcttatattgcttttcacttatatatgtctttatagggttgtaaacttcctaaaggaaagtggcttatgttattctctgtcctcttcaaatcagtgctcagaaaactttcctatacctcgtataggcacctaataaatatttactgatttaggggaatgtctggacctcttcatccccatctcctaaaaaaaaaaaaaaaaaaagaagtttgacatactgccctatttgtctaggtgtcttctaggtctatattatatgaatattctccttacaattcctgctagggtattttttttttctttatacctttttcccctctacacagtacagagcaactgattttgttgttcctgggcctggaaaagtagagataacctacacaccaagtgacggaacccaaaaggtgacatacctggtacataactttgaaggtatgtatgactgtagcataagcttcttttttttttaaacaaatgatttagataatatttttattgctttttttgttagttatgtgactgcctaaaaatataatctgaatctacagtgtttttgcaaaacccgaaacttgacataaagaagtaatttgcttccataccttcctgtggcatgaataaaggcacaaaagggttacccacttaattggaaatgcctttaggcaaagacaaggagatgattatgcatttatcttaaagcacagagagaaggttggcagaaatctgctgtgcatgaattatatacattaaatattaatattctcaaatcacccagcatataatcctgccctttgctctggtagggctcttgtatctggaagaggtttccttatatatttgctgaagttttcttcttgcccttctgggtatttatcctgtgaaaaagtagaacatttgctttttgccttttctttcccagctaccctgctacctttgatggcaaatcccacccaaaagttgttgaaataattagtgggcccttttccttcactattgaagttgttgaaagcactcacacaaacaaaaatacccaacactcacctaccttttgtttttcttgcctcttccaaataatatctgttggaatctggttctgcaggcttcagcacctttcaccctgaacccaagttaaccctgagcattggcatggattcaagttctatctttaagtaataacaaagttcaataatagttgtaaaacacagtgattacatgtagcataattatttctacttatttctaccaactacagtaggagtgctcagtatcctccaggagattataagaattttcattcagtatttgaaatttaagtttttctcaataactgaggattgagtacacccctaaagtttaaaatagatgttgggaattgtaaaggtagggtgtttgtccattcttgcgttgctataaagaaatacctgaggctgcgtaagttataaagaaaagaggtttaattggctcatggttctgcaggctgtacaagcctggctccaacacctgttcctggtgagggcctcaggaagcttccaatcttggcagaaggcaaacagacaataggtgtatcacatggcaagagcgggaacaagagaaagagaagggggaggtcccagactcttaaacaaccagatttcaagtgaattaactgagcgagaactcacgtaatcaccaaaggggatggtcctaagccattcataagggatccaaccccatgttccaatctcctcccactgggccccacctccaacactgggaatcacatttcaacatgagatttggaagggacaaatatccaaaccatatcagtatgtaaaagaagtttcaaaattatttgccttttcttaaatgtatttctggttcatatcagtttttggcatttctgcatcttcaggattttaaagactgtatgttttttcatttctgctgtccttccaaaacaagttagaatgtccttatctagaactggcttttctctcattatgtgcctcagaaatttgttggaaacctgtctgggacttctgaaatctagtctcagatgtgagagctgagaagtaggtcatttggttgtggtgggtgattttagccttattacaactacattacatttattcttctcccttttttcctctcactggcttctcctctacagaaggtggtggtgttgccatggggatgtataatcaagataagtcaattgaagattttgcacacagttccttccaaatggctctgtctaagggttggcctttgtatctgagcaccaaaaacactattctgaagaaatatgatgggcgttttaaagacatctttcaggagatatatgacaagtaactatagttcttttttaactttttctttattctcaagtaagctgacatttgcatatagagtatgtatctccctatccctatgattctgggtaaattgagtgaaaatcatcactgtctcttaaagataagggcaaaactgaggtttagcaggagtgaaacaaaaccactctgacttgcttttataagataaacatgttcttaaataaggtccccacatgaattgttttcagagccaggttctttaatgtttaaataaacgtacgctgttagtgataagttctaatttttcatgtgtgagtttctaagtcagacccatttccattctttctgaagcccattgttagaatttaaaattctgttggccaggcacggtggctcatgcctgtaatcccagcactttgggaggccgaggcgggcggatcacgaggtcaggagatcgagaccatcctggctaacacggtgaaaccctgactctactaaaaataccaaaaattagccgggcgtggtggcgggcgcctctagtcccagttactggggaggctgaggcaggagaatggcgtgaacccgggaggcggaggttgcagtgagccgaaatcacgccactgcactgcagcctgggcgacagagcgagactccgtctcaaaaaaaaaaaaagaaaagaaaagaaaaaaaagaatttaaaattctgttttagtggagtcatttgaacttaagtctaagtttataacaacactggcttccacagcacaggaggtgagcatgtgttaatatttaagattggcataactccctttaggtgcaagtgttcaggccaaaatgttcctgaggcattttgattcctcctcctgctgcccatctataccaagcccagaaactgtctggaatatattttagtttcctgaatgacaccaagaagtagaacagtcttttcaaaaatgtattttaaaaataagctgaatctcaagaatctgatctatagtataatgaaaactgaaaagtgaagtagtcattgggatactctactgtctcacttaattctcacggcttccctgcaaggtgggtaaaattgttcctacagatagtcaaattgagttttacagttagaaaatgattgggctaggatttgagccaatgtctgtcagattcctgagtttctgctacttctactaaaatatgctgcttcttgtgtgtccggtcttctgtttgggacaagcagatgatatccctaacaaaatcaattttctttattattattctcttttaccttttgtttcccaggcagtacaagtcccagtttgaagctcaaaagatctggtatgagcataggctcatcgacgacatggtggcccaagctatgaaatcagagggaggcttcatctgggcctgtaaaaactatgatggtgacgtgcagtcggactctgtggcccaaggtacagaggtggagcctggcctgtaggaacagggtcattccagggtagttctctaatttgggaaggggagttttgtagtcctttgttgtaaaatcttggaatgttaaacctccaggtccaccgtcttacctgacagctaaggaaattaagctcagactagagaaatgatttactcaagaccacatgggaagtaaattagtggattgacactcctggctccagtgtcactccttgaagttttaaagcctacctgatctgaaaatcactccctttccctgccctccttgtcctttggtgaaaatgtaaaaaaccagggcactcaggcaaggagggataaagtgaggagcttgatcatgtcataaccaagctttggtgcctgcaaagctcatttattgggcagcaggacctactcatgtccctctgccagctgctgttctggtagaatataaaacaaatgtgtttggctgggcacagtggctcacgcctgtaatcctagcactttgagaggccaaggcagtggatcacttgaggccaggagttcaagaccagcctggccaacatagcaaaaccccatctctacttcaaaaaaaaaaaaaaaaaaaaattagccaggtgtggtcgcatgcctatagtccctggcactcaggaggctaaagcatgagaatttcttgagcctgggaagcggaggttgcagtgagctgagatcacgccactatactccagcctgggcaacagagcaagactcttgtctcaacaacaacaaagaaaaagtgtttttgtttactgcttagcttacacacaaatcaattgagcaaagaaccctaggggctgtttacagaaattccaggagaagtttcatgcatggggtaagggccaaatcaacagaaacacagcgcctggtttcctcagcaccaagttgcccttcagtttcagttgcccttggtagctgtatgaacttgaatctccccagatgaatgtttgttaactttaattatgtttgtttttcccaagaagtactactttttctgtctcttatcagtgttaaacatctcctctcagtttgaaaatcagtagatcaacctggttaaagataactttttgccagataaatgagttacacaactctccttaccatccttctgtttctctacatcctcacaatcatttgtactgaatgcaacagaggaaggagtgttattgctttgtgatgactccgtggttgattattaacttcacaggtgatgttgggaggtagcaaaaatggagaaaagaagaaaatcaattatatagatataagagttgtaatgtggttctttcaataagaaaccacagaagagaactgttgtactgagggtatgaaagagagcgaggaagggcaactgggatgttcttagatccaaccgatcctgtgtttacctgccttctcttcccagtcccagcaagtgtatgagcagcttgagggttcttaagagacagctctcgtccatctttatttccccagaacagcagagcattgcacataagaataacaataatagattgagctctgtgtccagtactattctaaggaatataaatatatattcatatatatttatgaatatatgtatatttatctaatcccacagcaacctagtgaagtaggtgctgttattactcccattttacagataagaaaactgagccgcagtagctatgaagtcatagaactagagtggaatgtaggcagttggaccctgaaccctccatcaaggagtaggtatccctgaaataagtgaggggaaaatgcagcctttccagacccattggctctgatatctggagcggggatcctgccttctgaaaggcagaattattggtgattccatgtgctcttgtttactttgcttaccaagacctatcaagattgagtcatttatgctctcatctctgagagactcagtgctcttcatgcagttggacccaacgcttcatgctccactacttacagggtatggctctctcggcatgatgaccagcgtgctggtttgtccagatggcaagacagtagaagcagaggctgcccacgggactgtaacccgtcactaccgcatgtaccagaaaggacaggagacgtccaccaatcccattggtaagatggtgtttacattgatttctcaccagagagtgctctccaaagcagcccagatgtgttcccttggctgctcagtgttttgtgtgcaaagtcatcaccaagtagctgatttgttctactagtaagatctatttgaatatgcttcttaaaatatacaatatttgcttttctgttttgtgggagaacataggttacagagaggaatgttatcaacaagcattttcctttacctctggtgcagtgaaatgtcacataaggctacaaatctaaaagtcacatggatagatccttttaacaagtttcaaagatagcacttcaaaaagagattacagcctggaaaaaggagaccaatatagacaagagatagaagagattgtgacctttttcaaattagaaaatgccttaagtttcaaacactagtaccatgccatgaaaatgtgtttttttaaagtttctgtttggtaaaatatttctaactctcctaaaacttctagcccatgtggttagtatctaaagaagtctgtcacctaaacaaaaaactattctgttttggggaactatgagacatttggaaacctctataactaggatgattggagtgttgtgttttttttcccctcttttagcttccatttttgcctggaccagagggttagcccacagagcaaagcttgataacaataaagagcttgccttctttgcaaatgctttggaagaagtctctattgagacaattgaggctggcttcatgaccaaggacttggctgcttgcattaaaggtttacccaagtaagtataagatgccctagtttctatggtcaaattaacacttatcctcactgggctcagagcatcggtgctttctggaattatataaattgttattcatcatctagttcaggagtcagcagatatctgtaaattgtcagatagtgaacattttaggctttgtggaacatatagtctttttgcaactacacaactattcaactttgcctctgccattgtagcaggaaagcagtcatagacaatacagaatcaaatggtgtggctggtaccaatcaaacttttatgttcaaaaccagcctcgatttggttcatgtgctgggctgtaatttgctgacatcccatctagttgataatcattgaacgaaaaggttctatttaattttaagaagcagattatagacaaatagaaacaaagatacttcagaggctattttattctactcctttattttctttaacttactgatgagaaaagtgagcagcacaagtttaaggtgtgcaattgattacagtcccttaagtatctgtaaccaatatttgggcaaatatttgacagcccatatgtttactgagaatttttctgagaacatagtagccagtatcctggggggattgtctccatatctcaaccagtgcatctgcagaggtcccaggtagggtcagtataccccataatggggatatacttggtcactgcatgtttcttaatttaaatttccaacaagattgcagtgttcgctgggtgctgtggctcatgcctgtaatcctagcactttgggaggccgaggtgggtggatcacgaggtcaggagatcaagaccatcctggctaacacagtgaaaccccatctccactaaaaatacaaaaaattaaccaggcgtggtggcgggcacctgtagtcccagctactcgggaggctgaggcaggagaatggcgtgaacctgggaggcggagcttgcagtgagccgagatggtgccactgcactccagcctgcgtgacagagcgagactccatctcaaaaaaaaaaaaaagattgcagtgttcaaaatggtcttatcagtggaatacctttgtagcctatttaacaggcacctgtcagcaggattatgttatcctgtcttttgtttttctttttttttctttttattgagacagagtctcgctttgcccaggctggagtgcagtggcgtgatcttcgctcactgcaacctccgcctcctgggttcaagtgattcttctgcctcagcctcccaagtagctgggacttgtgccacaacacccggctaatttttttttttttttttttgtatttttagtagagacggggtttcactttgttagccaggatggtctccatctcctgacctcatgatccacccgccttggccccccaaagtgctgggattataggcgtgagccaccaggcccggcctgtcttttgtttttcttaagacactgatagaaataacaacattataactttttttaaggacatgtaacggtttgtgggaaggtgggtaaaggtttggctatgccctgaataagttttgttatgtttaagaatgaggaagaagtgtgatgattttggtctcagcagcattagtctgaaccgaaactcaatgataatttcacccccaaagctacatagcaagaaacctaactgagtatgtatggctgtctctactgccggttgcctagagagcctgagtactgagcctgggtcagccccaggaaccctgaacatagtcattgtctatagattttgtagcttactaacatgaatgcgttttcttccagaaacaaatagaatactattttaagtagcatttctaggactttaccactacctgctaccatatcagagaccaactaaattttcttttttttttccttcccgttagtgtgcaacgttctgactacttgaatacatttgagttcatggataaacttggagaaaacttgaagatcaaactagctcaggccaaactttaagttcatacctgagctaagaaggataattgtcttttggtaactaggtctacaggtttacatttttctgtgttacactcaaggataaaggcaaaatcaattttgtaatttgtttagaagccagagtttatcttttctataagtttacagcctttttcttatatatacagttattgccacctttgtgaacatggcaagggacttttttacaatttttattttattttctagtaccagcctaggaattcggttagtactcatttgtattcactgtcactttttctcatgttctaattataaatgaccaaaatcaagattgctcaaaagggtaaatgatagccacagtattgctccctaaaatatgcataaagtagaaattcactgccttcccctcctgtccatgaccttgggcacagggaagttctggtgtcatagatatcccgttttgtgaggtagagctgtgcattaaacttgcacatgactggaacgaagtaggagtgcaactcaaatgtgttgaagatactgcagtcatttttgtaaagaccttgctgaatgtttccaatagactaaatactgtttaggccgcaggagagtttggaatccggaataaatactacctggaggtttgtcctctccatttttctctttctcctcctggcctggcctgaatattatactactctaaatagcatatttcatccaagtgcaataatgtaagctgaatcttttttggacttctgctggcctgttttatttcttttatataaatgtgatttctcagaaattgatattaaacactatcttatcttctcctgaactgttgattttaattaaaattaagtgctaattaccat

SEQ ID NO: 277 - DNA, 32742 bp, Homo sapiens
  source 1..32742: mol_type = other DNA
tcattcttacttttggaagcgaaactgcggccgcgttgcctgctgggaaatgtagttcagcggtggcctagcccttcaggcctggccgctacaataaggctggcgaactcgcagcgcttgaatacccgtggcctaaccgtccactcggaagaccggtcccgctcgggaggctctgcagtcgcgcctggggtcagggccgggggcgaatgtggctcgcgttctaggcctccctgggtgagaaagtggtagactggcaggaaggcggcggaggcggacgagaccaatgccagcctggaggaggaagtgggccaatgggaagggtgaatccaagtggagatcgtaggggtgggagtggggcgtggcgcccgcttaccttgaggctgggtgaggctcgccccgaaatgcggggcgtggggggcggggggcagaggtccctgcctagaggggaagaggggcgtccatgtggcggaatggatttatggtttggggctgatcagtgggtcttatggccgagtctctctggttagtggagacagcttaccaggcctgggatctggggagtttggaggtgcaggagatccctggttggaaacttaggcaggagtgtgttacccagagagactgagggcttctgctgtgcacctccaaaaccttttcctaacctcttcaccccttcctaactgctaatggttggagaaggtggaagttctctggggatagatacttcgtggtgggggaggggggaggggggttgggttctggccaaagggagccccagcagggaaggaaggctttgaaccctatagctgcccagaggcctaagcaatgctactggagtacccctacatcatcattgtaaccgttacacagcattacattagatgcagcctatttagtctgaaccaagccagacaaattggtgtgtcctgcccgctgcttctaaaatattgtaaacatgtctcagctcataggaaaataaatgttccgggtaaattcatggaaaaaaataatcagggtgcaatatggaatgtttacaatgatcctactttataataaattcttatatctcctaaatatgtgccattttgttatggatgaaaaaaaatccgaactatatactctaaattattaatttcaactgtggttattgatggctggtaagattacagagtaattttattcttttttgtttacatctttatgtagcatcttaatttgcacagtgaacacataatttttttttttctgctccttattttcccaggagagtcagtcagttgctccgtgtgttgtgttggaagtcaggtcctaaggccagctgctctggcttgcactgagccacaggcagactgatttgccaggaatgataaaaaggggtgaatgtgaggggagaattcagtgtgcaggctatgggaggctaatgcttttttccttcttctaggttggaaaaagactatgttagcaagtgtcacgccatggtatgtggttggttggtctatttcagtctaatctattatgctttctggttaaaaatgtcacctttctcattatctgatggatttacgttgcaatgcataactttcttaggttctgataactcaccttggctgggccatgtgagttatcagaagagttactcaccattttggcagtgcttcgaaccattgagttaccatgtgagttaccatgtgagaaggagagaaatattgcctctgaaatgcctttttagctttggatttgctttttgcttttttttttttctttgagagttttgttcttgttgcccaggctggagtgcggtggcacgatcttggcttactgcaacctctgcctcccaggttcaagcaattctcctgcctcagcctcccaagtagctgggattacaggcgtgcaccaccacgcctggctaattttgtatttttagtagagatggggtttcaccatgttggccaggctggtctcaaactcctgacctcaagtgatccacctgcctcagcttcccaaagtgctgggattacacccgacctgctttttgctttttgatcagggtctttatttcagcatatgctgcctactatttcagtgtgtgtgcaattataaaagaaactttaatacatcctttagttgtgctcattatgcattttctgggacaaaagcttgttaaaatcatggttggagtatgacaattaatacatgtaatgttcatttcattcttcttactttcttccacagcttttgccaactttccaattaaaggttgacattcctgcataagcatttctctgtgaaaatgtccttgcctcttacagaggagcagaggaaaaagattgaagagaatcgacaaaaggctctggcccgcagagctgagaagttattggcagaacagcatcagaggactagctcgggcacctccattgctggcaacccattccaggccaagcaaggcccatcccaaaatttcccaagggagtcttgtaagccagtgagccatggtgtcattttcaagcaacagaatctcagtagctcatctaatgctgaccaaagacctcatgattcccacagttttcaggcaaagggaatatggaaaaagccagaagaaatgcccacagcctgcccaggccacagtccacgtagtcaaatggctctcactggaatctctcctcccttggcacaaagtcctccagaggtccctaaacaacagctcttgagttatgagttaggtcaaggtcatgctcaggcttcacctgagatcaggttcacaccctttgctaacccaactcataagcctctggccaaaccaaagagttcccaagagacaccagctcattcctctggacagcctcccagggatgctaagttagaggccaagacagcaaaagcctccccttcggggcagaacatttcttacatccattctagctcagagagtgtaacgcccaggacagaaggaagactccagcagaagtcagggtcctcagtccaaaaaggagtgaactctcagaagggaaagtgcgtaaggaacggcgatcgtttccaggtgttgattgggtacaatgcggaactcattgcagtgtttaagaccctgcccagcaagaattatggtaatgtcttcatttttcagctgtttttttttttttttcttatttttggagtctcttttaatctaacagtttctcataaatattaagagagtgcattggcacatgctgtccatccagttgttaaaaatttttcaattttagcttgtttcccttcataatagtcattcccttaaacagctgccaaacttgatggttgtcacgtggccatctggagaacagttgaatgttactgagaagacgcttcctctgccaggtgctttatatgcattgtagcacttaagctgaacagcagtttttttgaaataagtagatgttattttagtttttaaggtgatggaactggcccagcaagattaagtgacaggcccagtttcattggtctggaaaggcagcgtcaggatgtgactagctcaattacaggccagagccattactcctcatactgctttgcctgaccacactacgacctggagaacttggattctagtcctaactctgccctcagtcctcttaggtgaagttcataacttcccagggcctgagttggattccactacatggaataaaagaattatctatatttactatttgtcctctacagagatttttatagatcagtgggggcttgctggtcagctgttttgaacttggcgtccttcattcattcatttagaagacaagcttgtgttgagtgcctaagtacaaattgtcaacagtcatcagtcctctgttttgtttcagatcctgacaccaagacgtggaacttcagcatgaatgactatagtgccctgagtaagtagacacatggttgtctcatggagggtggcactggtgctgaaaatctttagagtatcacatgtagtccagcttatggagtgcatggctttacaggtggtgaaagctttcagggcaccccccccaacactccttcccactctgtctagcctaatgaggcagctctgtgggtgaaggccgttagtagtattaacaaaagctagcattaaatgatgcttgctttgcattaggctattctaagccccttatgctaacttttattccttataatgacttttttacagatggggaaactgaggcccagggacgatgagtcagtaacacagggtcacatagccaataagttgtacaactgggattcaaaccctgacagtctgacttcagactacacgttcccaccagactatgctggccccagcagtgacaggcagctcaggcagcctgccagcccctgctcccaggaaggtaacagttcagcaaacagcacagatcctcagagtactctctgtgcagctaactactcaaaaatgcaaggagggggcattggccaggcaagttccagctaatgcagtgtctggtcatagtcagcacctggttacgtccctctgtcttctgagaaaactgtcatacactaaagtttttgtcacttgatcctggtacatggagcttgcacacctgtgtcaaagcgtcagccctgtgtgttttcatcttccatttattttactcttctcccccagctgccatttctacaccgtctcttcctccccctagcttaagaaaggaaaagataaggatgtatgcttaggtcactttgcagatttggggtatgaggtaggattatctggaggcaccagtacagtttctgggaaaggtggtttgggccagtgatgggacagctccctgcagaatttcctggttttctccttggcctccaattcttgaaatgtgtacattaggcgatatctttctttggtagctgctagtgttgttagtttgcgagggctgccgtgacaaagtaccactgactgggtggcttaaacaatacaaatttattttttacagtcctggaggctggaagcctgagattggtagggttggtttcttcagaggcctctctccatgccctgcaggtggctgtcttctctctgtgtccttgtttggattttcctttgtgtgtgcaaatccctagggtctctcccttttcttagaagaacaccagtcattggattatcgcccaccttggtgacctcatttaacttattaacctctttaaaggccctatctccatatacaatcacattctgaggtcctgggctgtgtgtttaacatgaattttggagggacacaattcaacccataacgctgctgctgctagctccgtctagtgagggctcattttttaatcgatttatttggtgttggaacggggagacccaaggctctggataaagattgcagattttgacacctggtattctcattgctggtgatcttaaaccagtggtttcccctgttgcggttgttttgtctttttactcttgttctgaccacggtgcatggtgacttagatgacttctgcttttgcagattcatttaggttttttgtgtgatatcgttactttttttttgagacagagtctcactctgtcgcccaggctggagtgcagtggtgcgatcttggctccctgcaacctctggcttccgggttcaagtgattctcctgcctcagcctcctgagtagctgggatttcaggcgtgtaccatgcctggctaatttttatatttttagtagagatggggcttcctccatgttggccaggctggtcttgaacccctgacctcaggtgatctacctgcctcagcctctaaaactgttgggattatagatgtgagacactgtgcccgactatcattgctttgtgtaatgctccacatgttttgaaaaccatgtttattggatacaaaattctccatatatacttctcaatgaagctcatagaagagaaaaaaaattctccatatagctttcagatgaatttttctaattgtttggctcctctgcatctttaccaatgtgttacacacttgagcttttgcctgctgagataaaccttgaaattccttgccataattatggatttgtgaatttctccttgtatttctaagtttcagataggttcatgattgtgtctcatgattggctttttattggtataacatataaaattgtctctgtgtcagtctttctgtcattttgctttaggtatatctctggatttggcttcattaaccctaccacatactcactgtagaacatattttgacgtgtgaagaagaaaaaccatcccccgtaatctccccactcaactaaccattattaacattttggtttcattccctccagccttttttctatgcgttaaaatataaagttttatatatgcatataatttgtattttgcccttttaatttaatactccagcataaagcatatttactttactgaatgttaacagttaattctaagtgatgaaaatgtgtccattatcataatgggccattttgaccttcaagaaatggtttcgtgttgttgaactacttttgtcttttccagaatttttaatacaaaataaattttgatagctgtataacattctgtcttatgaatgtgtcatacattgcttaaattgttgttgtttattttttcctgcttgattttaattggctgccagtttttccagttttaaagctgtagaggaacaccttcgtacctaagtttttgtctgtattttcaactggtagttgggatagattcccagaagttgaatcattattcttagagctcttgctataattgccaaattgttttccagcaggttttattcccaactagcaatatggatatctaattgtttctcatcctgcaagtttgagaagtaaaaaagtatcttatttttctgattatttgtgaaggtgaacatttcttcaaatgtttcttagtctttttcctcctgttttgaattggctacactaccctcttcttttgtggtcttagtacttttttaaagcatgggttctttttatatttctttactcagggtttttttcctttcactccagtgtgtgtctgttgacagcttagtgttacacagctgaatttgttcattataaaatgcatctgtagtagatgaaataatgttcagaactgtgtgtttgtgacctggtgatcctggtcctcactcctttgttctctgagcagtagacagagtagcgacctaggagtgggcttaactgggtgatttgtggtgtgctgacttcagtggcttctccgacaccgtgccagaaattatctaataagtttattcatcctggcgagcttcctcttccccttgttaatttctgaattttaaatgttttgatgtgaaaaatgtagggaggccaggtatggtgcctgatgcctgtaataccagcacttcgggaggctaaggtgcgtagatggtttgagcttagggatttgataccagcctgggcaacatagcgaaaccctgactctacaaaaaatacgaaaactaaccgcatgtggtggtgcacgcctgtagtcccagctactggggagtctgaggtggaggataacttgagccagggaggttgaggctgcagtgagccatgatcacggcactgcactccagcctaggtgacagagcaagaccccgtctcaaaaaaaaaaaaaaaaaaagaaaaaaaaaaaagaaaaacttacggagatggaaagttacattcagcaaatattgaaattcccaaagccccaactaaaaaacactttcaagtcttcctaatctaacagtgccttttcttgccttcctgccaaacctagtgcctcttgaccatgtcccttccccactttctccctcttcccttgcctgtatttcaaagccacatcatagtcccctgctttatcacttctgttcgattcttcttctttggcagtgaaagcagcccagagcctccccacggtcaacctgcagcctctggaatgggcctatggcagcagcgagtcaccctccaccagcagtgagggacaggccggccttccatcagctccatccctttcatttgtcaaagggcgatgcatgctcatctccagggcctacttcgaggcagacatcagttattcacaggaccttattgcgctttttaaacagatggattccagaagatatggcaagtaattggtctttgtctgattcccagaatgtgtagtggtctgtgatctcaacatagggtgtttttctctacctcgaatattcaaaaattactttcttgggaaagacttcctgttctgctcctcttcctatagaaagatgacacgttaattgttccagatagtaaacatacagtggtggctgttttgtcataaggcctcccaaagagaagacctcataatatccccctggtcaatatcttcttggtagaagcaggtaaattcctgcttcagccatttaaaacccatctgtttttattttggcctttgcagagcagaaaaacaggtggttgccataaaaataaatgcttttccatatgcaaacttagtagttttcaaacttgagcctgcagggaactgcctgcaggggttgttaaaacgcagctagctgggccccactactggagtttctgattctggaacttgagcatggagccaaacttttgcgtttctcacaagttccctgagctggtgctgctgctggtgatggtgccacagtttgaaaatgctggtggttctgctctcggcctgcccatcagcatcacagggccacttcaaaagcaccgatgcctggttcttacccagagatgtttattttgtcggaggtggggcttggacattgtcggggtgttttttgtttgttttggtttttttaatcttccgataagcctaattataagccagtcttgaaatctactggccacaacagaatagttttgctgtattttattttatttatttttgagatgaagtttcactctgttgcccaggctggagtgcagtggcgcaatcttggctcaccgcaacctctgcctcccgggttcaagtgattttcctgcctcagcctcccgagtagcagggactacaggcacctgccaccacactgggctaatttttgtatttttagtagaagtaaggtttcatcatgttggccaggcttgtctcgaacttcttcgcccaccttggcctcccaaaatgctgggattaattacaggcatgagccaccgtgcctggccgttttgctttagtttttcatgaggttcttcataagctcccccttcagaataggggagaagcagctatagattctggactcctgggtgtcattctcagcttgggccacattgttttttaaaaacgatgtagtttttatggatcagtgtttccccattcttgaattggtttaatcttgttcttaatcaagtagaactcaaatacttaaaacctcatgcctttgagacctcacattcaagcattgtcctggaagaagcctctagaattgcttgcttaacaagagctttcatcagggtttgggttccggaggaggctgatgctggttgctacgtcatcatccttagatggatgcagtttggactgatgagggcagacgggtgagcagggcacaggggagttgtgcgaggcccaggcaggtcgtgagatgagctgctccacgacagtctagatcctttgcctttcctgccccctcaggtgtttggcttcagcttggggtggcccttaaaaggcaactacgggccgggtgttgtggcctgtaatcccagcagtttgggaggccaaggtgggtggatcacctgaggtcacaggagttcgagaccagcctggccaacatggtgaaaccctgtctactaaaaatacaaaaactagccaggcgtggtggtgccatcctgtaatcccaactactcaggaggctgaggcaggagaatcccttgagcctgggatgcagaggttgcagtgagcctagatcgcaccactgcactccagcctgggtgacaatctcaaaaataaaaaaggcaaatacagtgatatgtgtctatcaccagcctgtgagatcacactcctgacatggtctgcattctgggagtgggtaccatgaaggtatggatactgatcctgctcacacccaggtgtccaaaaaccgtgattggttcctttgccttagctgttgttcacatcttttcctgtttgctgctgtgccactgtgagaatcaagttgtcagaaagggccttccccttctagttctgcatttacgattagtctgtctgctttgttccttccatcaggttgtacctggacgacctcgctttttcctgaaactgactctgtgtccatgatgcctttttctgaccaccttgcttttgaaggaatcatacagtgaagaatgaacttttgctgcccagatagcatttactgagaccaagctttcttgatttttcaaaagatagattagtagagaaattcctctatttaaagaatcagccaccattgggtagaaagatgctcacctttcttagttgatattgtgtgtaatttatactacacgatgctgattagcagatgatgtaataatcccactaacaataattcataataactggctttggggtgctcattgttttccagtcatacttttataagcattttcctttaatttcatgtaaacagtaacctgtgaggtaggggttgtaatatctttatttttcagatgtggaaactgagggagaggtgttacagtgacttgcccaaggtgacatagctagcaagaggcagagccaaaattgaaactttggcagtttgaccactgaccacatgcaacttgtttcccatgtgtaaaatggagttaacaacagcccaccttacagacttgggaggggcagatgagagggtgccactgagtgttggcacagtgccgggctgaatgcgaatgctgcataggtgtgagctacagttaccatccctgtcactcagggcatttctgacctgctagaccctccccagccatgtatcctgtggcaccttttatcacaacccttacaacccagtgttgtcagcatctctgcctctttttcctcccagtatactggggaagcctccagggaaagtactctcctaatttctgtatccgcagtgctaggtacaggaccagctgccacattgtctaagctgaatggaagtttatgaaaccaaggaataaatgagtaagtgtgatcacgtagcagaagggcagggtgtcctatttgcttatttatttcttgtcattgcagatgtcaagaccaggaagtggagctttctcttggaagagcacagtaaactaagtgagaagccttccttacttgttttatatcatgctattgttaagctttaataattcaccttaaatttgatgtatttttgaagaatcttctcctccctttgctgtggtgggatgcttgagtacagggtaagtaaaggtgaggatgcagccttgtccacatccactgagatggtggctttatgacagcccagacaaatgccgggcctcttctatcataagggtgaggtggcagtagtgaaatttcccaggcctgtgaaatcttcctgctgtcatagaagtgctagaagcatgggtacatagactttaggaatcagaagtgagctaggattgcttagcttaggtggaagtgaccatagattacttctaagaataggctctcagtgtacttctagaactggatgggatgatcaagaaagataggagagtatcactgggaatggacttcataatagagttctgtttggggcagaagtcaaggccagggacttaggcattttaacaagcactttacagactgaccaaggaaaagggatatgtgtacagatagcataagtgcaagaagaggaagccattttgggtttatcatttttcttctctgtgttttgcttagatggggcaataaattctaatatgcctggaaaaaggaaatatggtcatatctcagactgtaccagaataccagtcccttatctatctggctgtaacaattctgcattgggtttgcagctagcatggcttatgttcctctgcttttctcctaatcctgatggcctgttgggcctcccaaaccaaggaaggagtcatttgtgggtaccaatcaggccaggacagacacgagccaaccctgggagctctgagtcattggccatcttccctggcaggctagggcttcaatgtgagggaaaaactgggttccttccttttgtctccttcttatgtgacttactatgtgacattgggtaaataattaaacattctgggtcccattgtccctttagtaaaaaaagcggtggtctttaatctctatctgctctcctgacataggaattaaatataaaggaagagcctttggttccttgagcaaaacttgctgtgaactacatgattacgtttgaatatgagatggtaacttaataaatgctggctgaagcagaaagaatggctcacggtgatcttgagactctctggctgctactatttggaacttgtgatttagagggaattatttggcaaaatctgaatttttttttctttttgaggcagggtctcgctgtcacccaggctggagtgcagtggcatgatctcagctcactgcaacctctgcctcccaggctcaagcgattgtcctgtttcagcctcccaagtagctgtacacagaatccttttggtgccactttgccagctgggcttgccactgggcttgctttgcccactcgacctggcaggctgcgctcggctcacgctaccagtccagattccacacccactgagggcgagctaggcatggagcagcagagggtttgtgagcaagtgagtgtagagtctggccacagcacatagccaggtgcgccagctgctgcagcagagcgggcagctccagactgtggcacaggcaccagctctgtatgaggctgcagctggactaggcataccacaagcagcttctgccttgggcaccagcggctggatgatgggaatgtgctggtgcctgaaaacttgaagacaccagcaaccatggagccctaagggggtgttacagcatgttacagctctggccgagggagtcccaaggtctgggctcccagaaaggttgccactcttcactcctgtggttcggcagacaggagcatgtcactgcctgcagcttggcgagcagaccaagaatgtgttatagcccttttctcacctgccattcagcgggtcccagattcttgtcctgcgtccaagaagaatgaggttacatgaacaactggagagtgagcaaggcagagaagggttttattgagcaacagaacagctcttagtggagaggggacccaaagtgggtagtcccaacatgtggctgagtccagggtttttatgggctcagaatgggggtgtgtgtgctgattggtccataggcaggcctggaaaaagcaccattcgattggctaaaaggcattgaggaagttcttattctgggttgtggactccacctggaactgacagcctggttttcaggtttcagtctgtctttggcttaaaggttgggtttcactgtggacccacccctgtctgcctaggaagttgtctgcctcctgctgttatcagctggaattataggcgcatatccccatggccggctaatttttgtatttttagtagagatggggttttgccatgttggccaggctggtcttgaactcctggcctcaagtgatcctcccaccttggcctcccaaagtgctgggattacaggcgtgagccaccgtgcccagccacaaaagctgaattttttaagaaaaatagaagtgagttctttccttctcgcttttgtctttcaaccaggaaacacacacatgttagctataaagtctttgacttttatggaatgacaaaaagcaggacatttacagcattagtagataaatgtagtgttgaaaaaccatgacttgtgactcacatagcattgtagagtggttcctgatcttttgcagacaacagactccttgaaatatctgatgaaaagaatggattcttcacccagaaaaaaatgcacataatggccacaaataagattttgcacttgataaagatgattccatagatcctgagtgaagattctagatttagagtttttacctgctatctcatcatgacagtgtctcacggaagataagactgagaaaaggttgggcccagagaagggaaacagtggctttccttactgggagcattgcaaggttacagtaaagtcagtgacagaaataagagtaaaattgccatctgcctttgtaaaatgacccattatggaatttagaagccagctaaactaagaagctgggagtggaagcagtgagaatagagcccagttccaatttagttctgatttctccgccagtactgtgaacctggggaatgcgcacctccttcctcaccccatgctgtccttcctcatgagtgaaattagatcgatgaccctgagttagtgaacgtgtgcataggaaactgatgaagaaatgacaataagacctgagtacgtgaatgctcattggtgaagcagtgggagttattttctttagtaaggagaatctaagctttcctcctctctcttttctaagtgactcaggccttttgcccccagtgaaattggcataagtccttttgttttccccttgctgtcagtccagaagggttctcaacaatcttgtcttgttagctgctatttgaaaacattagcatctctgctatgtggctagtagcattctggcaaagagctattttacagaaatgacttctagatgactcacgaagccgacaacacgtctgtcatctcctagtaccagggaaaggacagtagagacagtcgttgtcagggaatggtgtctttctcaggaacactgagatggctgaactagcagcataggattttggagacagtagttggtaggagacagagtagatgttggttttattcctcttaaatggccgaaggaacataacgcttacaaagccctgccttttctaccagccagttcatcagccctttcttagctttcatcaggtatttgagttctgaagatcactagaattaaaatgaaaatggtttctgaaagcacaaggagtgctcagcctcctgaagtgtgtagaaatcaacatactcagatttaatttggaggtataaaatgtatttctgcatcaatatggacagtctgttttgtattaatgccatcaaccttccctaatttcttctcatggtgattatttttgtggaaactatttccagaaataactggtacttatatttagtggaggagagaaatggacttaaatatattgaaaatacaaagcaattggaggtagcagtagatggctcagccctgcacgttcacatcagtatttacagtggtaaccaattgatggttgtggcaaaagacttttggaatcacttgtgagggtattcagaaaacatatgatcacacatgttttatgtacgtgtatgaaatagagaaccagccttaggatttcaaataatattggatagaagtaaaataatacccagtttctctttgtagtttcctttactggataccggaggacgattagccttttggtgggttactctgactcccagagtgcccttgaaaaggtaaaggataaagagcaattgatgatctgtaaataatggctactcttctaattagatttttcaaaggaaaattataaaagggaagaacatcctgaaagtgatagcctgcaggacagcaggctatggttagtgatttaactgtagttccactgccagaggtctctaggtctgtcattttttctctgcatttttaatttgtaattcagcctccttctcccaagaattatgtgttttatttatctctccggtttattctttttctgtttctctattgaataaaggggttttttcccctcttttttgaagtttaaaatcaggtgagactacattctttcaaaaagcaaggtcagtgcaattcatttgctttcatttccatgtagatcccaagtaatttatttttcccatttgggttaatggtcctgactagaagagatttctccacccattatatagggacctaggaccagcatcactggaaggaaatatatatatcccaaagctcctctttctccaaatcttttgggcatgaacactccagctcatatgcttctgttcttcttttcagttgcaaaggtgcgctgcctcccacaagttcagctggaccctctgcccacgactctcaccctggcgtttgcttctcagctcaagaagacatctctcagtctcacgccagatgtcccagaggcagacctttctgaagtggaccccaagctcgtgtctaatctgatgccctttcagagagctggagtcaagtaggttcttgatcttcctctctcttcctctgttgctcaaatttcattactcaccacagactgcattcagatgcttcctgttttatgaacttttatttaccatggatagatgaaaatttagaagagtctaggcattaaacagccaggtgtgctgttaccaaagctttattgtaaccattgatttcaaattccatgggttaatcaagactctgaattgcagctatgcagaaacccaattcaaattagcttaaggaaagagatttctcagtgcctgtaagagaaaatccagcatctctaaagatctcatcaggctgctctcctctctcagatctgctttctgtttgtttgctctgttcccaagcaggtgttactcaagtgtggcagctcgggccgccaggggcttccagcttgcattctcagcttagcaacacacagaagcaccatttttctaatggggctaacactgcaatggcttaagtctggtaccaatgttggagccagtctttgtggccttggaggcttgaggtcttgttgattagacttggtgataggcctgtccctagaaccagagggtaaggcctgcccacctaaattactgggattgaaagtgggaggtggcagttctccaaaagaaagtcaaggtgctcttattagaggaagaaaaaagataaacctacatcctgatctttcctttttttccagagtttcttgggagaagcaaaatgccgtatttgaactagccttctcttaaaaatatgggagttcaaggagaagaaagaggaagtcttgatagtctgtctagaaataagaagctgttattagacagtgtagttgaacatagagccctgtgcaagggaaggaacctaaattaacaatggcactgacaaaccacaacagcctgcctgctcgaagcctgattgtggtattttggtgaaagcttggctaccgtctctggcaggatttgggtctcggtgtgccgtttgggcacagtgcactttattatgttacctggccccagcccttccccctaattcttttcttcatttccttccatctctcttacatagcacactctgcaaaacctcctctggcattgccattccaatgctccagctggtgagatgtcctttgggccttgttttaaccaggctcagggtggttttttcctttcatctttctttctctgggcctctttattaaagctgcagtagaggttgcccagccccaccccctgggcagcccctgccttcagcatccaagttcttcgtggcactgttagccatccttgggcccacgtgttgggtgctggttttaccagttaccccattacccctgagagaggctctgtgtgtgaggcgccccagggcagatctgtttctctctctgtggctctaaagtacttgtaatctttcttcagaattttctaaataaactcagattttaactttcatagtctgaagaggtgggggtttggcattgggggaggagggctgtcaattctatgttttgttttgttttctttaatgcaagaactacaattgaacacacccattaatttataaagcaaaatctcttagaaatatcagcatcttctaatatccaagtcaccctcttcagcaggtgaatgaattgaggcttagaaaggcagtcagttgcctaaagttattcagcagtcagaagtggagttggggcttaaatctgtgttttctgattgattaatttctgagtatgacatttttttctattgtattcaactgccctgtggaggatgacatttacttatgttattgttcctctgttatccaggctttttctgtctttgttgtcattttttggccactttgttccttagttgggctccctctaggcaggggaaaaaggagagaatgtgaaattcagggggtccattctgctctaaggatgcggatagaccaaacttctggaaattatagatggtaaagctgagaaggctgaaacaaaagacgctcaaagggcgtggggctctccatggattccgttgcttaggtactgcctgtcctcgctggccaccaattttgtaaatcagaaagtgaggtaaaaaatacatcttttcacacctgccctccccccatctgtctgtgttgtgggttgatcccagaaatggtccagaagatttcatagaggtgggtgtacagggaggaggctgcgcctgttctggagaggtgaggcagcccactgctcggctccgttcctccccagtggagggtgaggccgccaaagctgggctttgggaagggctgccccctctcctaggcaggcccccgcccaggctgcagggagaacagaagggtgccacgccatgatgcctgttgtccccacactctactggcttcgggctgcctggggatttgctgcccagttttccatctttggaaacggtgtttccaggcaattcagaaagggcaagtgcagcctagacttcttgtccgccctgctagctgctgattagaagaggtgacattctctgttttcactgtgtgagaaggaaagagaaagaactatcccagcggcttattatcaggattctgagcaaatgatctatttttcagagattagatgaaagaagactagtatttggcacagaggaccagacatctggcacttgggatccttttagcttttcactgtttcatcatgcgacacgagcaagtcatttttactgtttgtgttttgattctttttctttttgtggaatagtagttatgatagaagcacttccttagcacttatgatgttgccaaccactgttttcagtattagctttattaaccctcccacagctccatgagataggtactgttattactcccttcttactgctgagggggctgaggcatagggaggttaaatcatgtgcatgaaggtgtacagctgctgagtgatggaattgggactccaaccccagccaatctggctctgaaatagtggaatacacctttattcatgaactattagcaagggatgctgcacttaagggctttagggtcctggaggctgccatagtgaaaaactcagtgctgaggttggtgcttcctgttggacaagcacccttcctcccatccttttctcgcctctgtcctcattagcagcatcttctgtctttgccagcccctttctctgcctttatgcatactgagtactctctgatcttcagaaagccttcttttcaccctaccagctcttctttccttccttcctttctttttttcttttttttcagatggagtttcgcttttgttgcccaggctggagtgcaatggtgtgatctcggttcattgcaacctctgcctcccgggttcaagcgattctcctgcctcagcctcccaagtagctgggactacgggcatgtgcctgtagagatggggtttcaccatgttggtcaggctggtgtcaaactcctgacctcaggtgatccgccccactcagcctctcaaagtgctgggattacaggcatgagccaccgcgcccgaccctttccttcctttcaaggcagactctggagtgagtaagcatgccctcctcagtgctagtcctggactcccaccaccctcctccatgtacgtcccctgtgccctgcctacagtgggccgaggcaactcctctcactggaaacttccttctttggcctccacgacctaatcatcttccagatcttctcccttttgaccacattccacatttttcctttttgggctttctctctctctctctctcttttttattctgctccctatttggcctatgtacctttccttctggggagcaagtctggtggtgggctgggcccgggctggccagtgaagtggccttcacccagcagtgctgacccaccggacatgagggcagatgaactcatgccccgggaaatgtgccatcctcaccttgtctgccttcagttttgccatagccaaaggaggccgcctgctgctcgctgacgacatgggcctggggaagaccatccaagccatctgcatcgcagccttttaccggaaggagtggccgctcctggtggtggtgccatcctccgtgcgcttcacctgggagcaggttaatggtcttcaaattgcagttttcacagagaaggttttcttcagtgttagagtcataaaataatggtttgcagacagggcctagggatctttaaggatcctgtctcaagtaaaggcaaaggcaggaagagagatgagatgccacctgagggcaggctgggggttttctggattagaatcaggttacaccttgagggaagaaagccaaggagaaaccggcttagagacttgtgttcatctgtcagcaggcacttctgggacctctgtgccctgctaataatacttttcatctgtaccacacttaatttttttttatttttcttttttattgttttttaaaatttttatttattttgaaactggattatgagactggctagtttttgtactttttgtaaagatgaggttttgccatgttgcccaggctggtcccaaactcctgggttcaagtgatccacctgtcttggcctcccaaagtgctgggattacaggagccactgtgcccggcccacacttaatttttaaaatatttttacctcctgtattttcctcaatcccatgacagtcctgtgcagtaggtacaatagatagtaaccccatttatagatgagaaaatggaatctcagaggttaagctccatgcttcctcttaatgaggagccctggcggatcttgatgtggcatcttctgacttcccaactcaggggttttgcactctgtagaggggggagtgagtgggatgttcactgtctgccaggtagctttatggatccagagcctgacaagaaaactgtatcactcacccttgagctttttttgctgtaaatccaggaatcagagtgcttttgtgaaatgaataaaaagcccatgaacaaactcagtgaagaaggaagacctggtccatcgtccacagctttttctagctttatgccactgacgtcagcctgggacttcttcctgaggcctccatgagccattcatgcagaagaggcagctcctcctactgccggtcagtccaaggcccagatgtgctattctgaccgaagagatggcaaaaaaaaaaaacactaaaaaatgtgcaccttgttttttttctgtcctggtgatctgagttctttttttttttaattttaattttttattttattttttaatgagacagggtctcattatgttgcccaggctggtcttgaactcctgaggtcaagtgatccttctgccttggcctcccaagtcttgtgaattctgccagtgcctgtagaaagtaatcttcagaacatattttgtgtgcgttaggttcccacagcaccctcagaaattctaggaagagtcagccagacggtgaccagcctgaggttagagaaaaggccagccctccctgtattgaacagtgtcaccccatgtgaggcaggtgagcacccagatgcctgggtgggtttggctagagatgctcagattgccagagagagaaggtagatttgtagaaatatcgacataagtagtctcgtcatcatcaataaatgtttatgatttgccttcagtgtaccaggctctgctacatcgttcataaaattcctcttaaaaagagtcgcattctttccctgcagaaacttaccatctagttagagatcacagaaatgaaacccagacactgtgaagtgactgttgacaaaggcagggagatagcgaggcatggtggttcaggcctgtagtctcagcaacttgggaagctgtggcaggaggattgcttgaggccagtacttcaagaccagtctgaacaacatactgagacccatctctttgaaaaaaaaaaagaaagaaagaaattagccaagtatggtggtgtgcacctgtagtcccagcaacttgggaggctgaggcgggaggatcacttgagcctaggagtttgaggctgcagtaagctgtgatggtgccactgtactccagcctgggcaacaaagtgagaccaacacaactctctattttttttttttttttttttctgagacccgaggtttctctcttgttgcccaggccggagtgcaatggcgcgatctcgtctcaccacaacctccacttcccgggttcaagcgattctcctgcctcagccttccgagtagctgggattacaggcatgcaccaccatgcccagctaattttgtatttttagtagagatgggatttctccgtgttggtcagcctggtctcaaactcccgatctcaggtgatccgccctcctcagcctcccaaagtgctgggattacaggtgtgagcgaccgcacccgtctcccccaactcttaaaaaaacaaaaaagggagtgtcctgttagtggcaagtgaaggggcacaggtaggtgagaggaaggtagaggtgatggctgttgatgggcatgagactgctgctgtcacaaccaacagctgctgtgctgggtggtcattgtagctttgttccctcctgtcatccacaggccttccttcggtggctgccatctctgagcccagattgcatcaacgtcgtggtgactgggaaggaccgcctgacagctggcctgatcaacattgtcagctttgaccttcttagcaagttggaaaaacagctaaaaaccccttttaaagttgtcatcattgtaagaaacttggcaaagtctttaagtactttatctctctggaaactttctttgtaaaagctctgagaactttcatgtctgtaatctccttgagccccatttagtttctagaagaatagaaatcactgtctttattttgtggggaactggaaattcattcccctcaaatagccattctcaactctggctacgtactagaatctcttagggagctttttttgaaattgtgatttaattagtctttgctggggatttctagctcatctctttcccagcgtgactcatggatggaggccagcatgtggaccccaggccacctgggggctctgggtactacaacctggacggcaagggggtgtgcctacatctggtgccatcttactcaaacaattgagttttcttccagccaatgtgaagatacacccccaccccacaaaagcactttttactctaactgttttttggaggtttttctgtgttgttttttttgagacagagtttcactcttgtcacccaggctggagtgcagtggcgtgatctcggctcactgcaacctctgcctcccgggttcaagcaattctcttgcctcagctccccaagtagctgggattacaggcacttgccaccacgcccagctaagttttgtatttttagtagagacggggtttcaccatgttggccaagctagtctcgaactcctgacctcaggtgatccacccaccttggcctcccaaagtgctgggattacaggcatgagccaccttgcccggcctctaattgttttttaaagaaggtctgactggacctgcttccagatttgacaacatatctttcaattgcaggctttcctacttttaactcctcacatacttcctaaggaaagtctagacagacttggtacccagccatctctgtcagtactgagtatatttacataactcacacaaatattgtgggagcttagagaaaggaaggagaagataccgttactgacctcaggggatctattattctgttttggacatgagaaccacactgtgttcttagcataagcaaacttgagtgttgatagttttgcaaagtgatataggtaatgagtctttgggggagtcatttttggttcggcacaaattcaagtgtggctttgaaaagatgtcagcatacatgtgaaatgaaaacattccaagaagtttcccaggatgatggggatggctctacagtgtgtgggaagaataatgctttcaattcttgagtgttgccttgtgttaggtactgacatataatcatctattttcccagtggcccctgagtaggctttatcttttatccttgtgaattatccatttcacagctgatgaaactggcagtgagagtgggtacataaatttgcccataggcacaaagctagcaagttggaggttattgaataaagctgggttgcgtctgccttcagaattcatgttcttctctttctggcccatcacttaacctgctgtatgatttttggcaagccacttaccaccattgttggtttgttcttcagttaagtaagagctctgtcctctttctttcagagaaatgttgtaagaaagaatagagtgatggctctgaagtgtcacacttttcagaagaggcttcagtttaaaccattctttgagatttgttccagtattggcacatttttacccattggttgaaagggcccattctcttccatatcctctgtactttctgtgttttttctccataaatacattttacttgactgtaatgaggtctcatgatcagaaaggcatatgaccgtaacactccagctttctggacaggatactttcttgatattttgagggttatttcacactcccctctgctgtgcttttgtggccctttttgctcatgatagctgaaatggaataggggatttcttatagatcatctttaaggacagcgttgggatctcactggtatcccagctataggaaggctgataccattgagtgcttactgagtaacagggctgtgctaaggacttcacatgtgttagctcatttcagactcacagcaacctaatacataaggaattatgatacccattttacagacagcaaaactggcattacagagaggtggttgctcagagtcacacagcaaggaatttgactctgtaccaaactagaaaatttccacttaaatactcatgtattagttactcatttggctttagaaaatatgatcaactctatatttgcttatgcaacaaaaagaaaaaaagaataaagaaaaacaaactatatatatatatatgtatgtatttgcttatgcacagatacagagtggttaatcagacttcatgttctaaacatagcagttccttgagaataggaatcatatcgtcttctttccgtctctcagtttccccagcactttgtttacactcgcctcagtgacagtactgataatacagcctgatcggttgtcagtgtgtctggcatccttcctgcaccctgagcccctgagggcaggggctggacaccccagagctttgcaccagtgcagggcccattatggggcacttggtctagtgctccacaggtgggaggtgcctcttacaaagcagcaaaccaccttctagtggtttctttgagcagcctctgaggtgggcggagcagggattcatgaatcccactttatagatggaaaattgtccccagagagctgaagcaacttgctcagaatgcagtagagaagctgccaccagacccctgggtcctgacctaggcccagtgagccatctccttgaatgagaaagtgctaagggagcatccaccttgcacttgccatgccagggtcaagcctaaagtgacccatatttctgtccactcaggattggatcttgtacacttatgtggctacttcttttcaggatgaatctcacttcctcaaaaacagtaggactgcccgctgtcgagcagctatgccggtcctaaaggtgagtacttctgagaactgagcccactgagcattggcatcccataatattttgctcaggcttgcatgtcgtcctagtccagcaggggttgcaagtatagacctgtgggccatggtcatgacttggcattgacttagggcatctgtctctctccttagggctgtggtaccaatttcatctttcttcctaacatcctgctaaggaactagtaggcagtactagtagtcagtagtgctgcctttgtctctcgaaggtcaagactgttgaggctgggtgggcattggactccagaatcctcctctggcttcctacttagataagagagagcctctagcagcttgtccactaattagcttagaaaaaactgcctgtcttctaagtcacttgtagtggcaaagctgcctagatgctggaaatcagggaagacgagttgtattaatgaaagtaatggcaaaaaaacgcaattacttttgcatcaacctaatacaaacagaactgagcaagggctggcggggtcagcgagatacactggcaaagctaagatgggccttaaaagctgatactgttttctgtggctaccctgagcctctttggttgacagaaggggcagccatcccccttcctccctgtggtggcctaaactcatttctgagtgctttggcgggtgtgagttctggcttcacagcaagcaggcgtgggtatgtgatgcagattctagtctttaagcatgttctgatgtgcaatataggctctgtatttcatctgtctctctcttctgtgtttggtttcttagtcccccatcccaacagagggtagtcctccaaatttccttccattatgggggggggggatgatttttttcctattattgtaagagggaaggagaagtacaattagaaaagtagccttttctcttgtaacaagttagaagtttctcacagattactttggaggtatccactttggtttgtgtagactgagcaaaccaaagtgtgtgtttttcttgtgctcaaagcaacctttgtgttgtaccagcattttaaaactatggcttttattgattaaaagaagctttaacttttacctaaactagggaaaacaaatacgctgaatgttaatgaagcttagcatttgaacattaatcttaacatttcctcacaaaacacacgtaagtgtccactcatttcaagttttcatgtgtttaggaataacggaatatgatacatcttccaaggcagggtcatgtcatgtgccaaaccaaagaataaaagtcttttactgcaaaagcttggttttgctggggtggtggctcacgcctgtaatcccagcactttgggaggccgaggcatgtgggtcacttgagaccaggagtttgagaccagtctgagcaacatgacgaaatcccgtctgtactaaaaatacaaaaatgagccaggcatggtggtgcacaccaagctgaggcaggagaatcgcttgaacctgggaggcagagattgcagtgagccgagattgtgccactgcactccagcctgggtgacagagtgagactctgtctcaaaaaaagaaaaaaaaaaaaaaagcttgattctctgccagtattacctataaatatttatatgtcaatagccattgatggacacatttaaataaaatgtttttcctaggttgatgacccttcttttgggaggccttaatatgctttccataggaaaacaatagggttaggtattttggtttcagtatttcagccataactaaattaaatctttactcctgattgtttagacaaaagaaaatgcacaatagatagattctatcattaaagatacaatgtgaaagcttctagcaaccacttgttaatgtagtcattgcctggctgggcaagctgagccagatagtggtttctgaaatgtgtgcctctcagccagacctttggaagcagcatatacctctttaatatcttgagtgtgtttcaaagtgacatgtttaaaagaaatctctaaactgctaactaatatgtactactctgcatttgctgtagaacttggatgaattaatattttaaaataagcctcatgaacatggcctgtgtttatgaaggtgtcttggggccacgctcttccgcaacgttgacttcatataatgctggactgtggcaggattgggctgaaggagtgggatggagcattctgtgctattctgttaaccgaacctttcatctctgtcttattgtattttcgtctagattggagtctctcaaccatggtactgttgacattttgggctggatgactctgttgttggggggctgttgtgtgcattttaggatgtttagcagcatccgtggcctctacccactagatgccagcagttcctccccagtcatgacaaccaaaattgtctccagatgccaccgaatgtcctctgagggaggacaaatcactctctactcaccttgcccttctccaaccccatggagaaccaccaatctaaataaggaaatgaatctaaatgtttttggaataataagatagttgggaaaaagtaaagtatgtctttgaaaagccatataaggacctaatttaataccacttgattgttcctctaatatgaacatctcttagaactatattctgataattaatattacaagcatattttcagcaaataggcataatgaggtatttagattaaatcatacagttcgttggatagcagggccagatcgtgtccagaaaaatgtggattttgtaaatagcaatagcagtcagcagagagaaggtgtgttagattgtaagaaattggtgtcactgtcccctgggaaacgtgacatttttcttcccccacagcactattggctggggctactaatcctaaatgaggtaaatctatttttatatataaatatatgaaagtagaccagatagaagctaaaaagaacaaagttaaaattacctttaatccctccaacagaaaaagccactgttaacagcttatttttccagcatgtcaattattgagcaagatcatcatttttcaataactatggagcatttacatagtggagacacatcccataatttaatcctcagtatcagacatgcggttgttttccatttttgctattataaataattctgcaagtgaacatcatctatatgtaccttgcatatttatcctattaggacaaattcctacaatcagaattgccaggtcagttttcatttgacctttttaggggaggcctctgaagtccagtctggccaggcataacaatcttcactcccattcagtcttcaatcagaggcttttttttcccacatgactccgccctcaggattactggcactcttttaaacagtgaggtgtgtgtttggggttttttggtttagtttagttgtcttttgtctacactggcttttattgttaaactagtgtaataacaaaattaaaaatttttcaaagggaaaggcccctagagtcctaccattctttcctaagaagcagctgtttctctttttctgtaagtagagagtactttttatatctctgttgattggctggatgagatagtggctaaaaggtataaggtttttttctttttcctttgttattaaagtagtttaaatagatgataaattcaaatggggccgggcgcagtggctcatgcctgtaatcctaacactttgggaggcctgaagcaggaggatcacccgaggtcaggagtttgagaccagcctggccaaaatggcgaaaccccatctctactaaaaatacaaaaattagccaggcatggtggcacacacctgtaatcccagctacttgggaggctgaggtgggagaatcacttgaacctgagaggcggaggttgccctgagcggagatcgcaccactgcactccagcctgagcaacacagctagactctgtctcaaaaaaaaaaaaaaaaaaaaattcaaacaatacaaaaggatggacagtgaaaaataagtctttcaacccctctaggttccctagtccccagtctctttcctcaaaggcagctatagttaccagttttcaggtttacttccataaaataacctgcacctatggaagtacgagtgtgtgtgtttcctttctgcctccttagagtgttttacaaccattgttttacacttgcctttatccccttaataatgtatcttgaaaatcattccatgttgttccaaatgacttctaccgcattcttgcaaatagcattctattggataaatttatcataatatgtattatctgttctcttttgatggatttgtaaccaaattgcagctattacatgcaacactgcaatgaccattttttcatatgttagagaagtggggagtagaaaatgcaatccctgtgtgtctgagatggctttttgcctatcaggccagaggggagagcagtgtcagctggcagattctgttttcttccctagtgtgatgaggctatagaagtcccctgaggtccggccattctcatttatttcctcactttcattacataatcagacttaaaaaggaaattattagagtttgaaacctatagtaaaatggattgtcttttccagagtaaaaaaatctaccttaggccgggcgcagtggctcatgtctgtaatcctaccactttgggaagctgaggtgggcagatcacttgaggtcaagagttgcagactggctggccaacatggtgaaacccacctctacaaaattaactgggattggtggtctgcgcctataatcccagctatatgggagactgagggaggagggtcacttaaacctgggaggtggaggttgcagtgagccgagatcatgtcactgcactccaacctgggtgacagagtgacactctgtctcaaaaaaaaaaaaaaaaaaaagcttggaatggcatagctttaatcagctataattataccatttgatatattctcattataatattttggtatttttggtccaatatacatgcagtcactgtcttcattctgtctgttcttacccaagaactgccttatatgtggcatgataatttcatttatgttacagcagcaatgctcacttagcttgaaggcattatggttatcatagcaaatcagtttagttaaggttagtactattcagatttgtgactggaactttgttttttttggaacataggctagaacctagagggaaccatttatgtgaaataagctgacctaaccagagattcagaggccatgtataaagtatcactgagtggtaggtggccttctgccaatacttagggcagcctctggtcagcagtggccataattatgctgctttcttggtttgtcctggtttgttttggggggcaccactcaggagcagagtaaagaatacacccgtggtctccctccccgactccaagcactggctttcttctgaatgtcaagcttttctttttgcccttaggctttcgatttaactacaggtgtctcttttgtagctccttgtatagtgactgtgatcccacatttattcttgatctgtgtacttttggtcacttgtcctcaagctatgcttgccactatccttatttctgaagattgtatcatgacctctgaactaattaaaacacagcttcaatgtccctgccacatcagggttactgagtatggagactttccagcggtgtggacttgaccttctctttgatattacctgccttcttcatgtcttatttctaaattgaatatatggtattgtataaatttatttagagtaccattaggaataattctgggtataagactggactgagctttggagaacatgatttttttcctagtctagggttttggcaaaatatgttacagcccatcagaataattcagtaaagcaagttactggctcaattggaaaaaaaaaagagatcacataaagtgatgaagaatttctggactgcttcttatataaacttaagacttcagctcttttttctacagtagaacattctcttggctcttaattttattttttatttaattttatttttttgagacagagtttcactcttgtcacccaggctggagtgcaatggtatgatcatgatctcagctcactgcaacctctgcctcccctgttcaagtgattccctgcgtcagcctcctgagtagtgggattacaggtgtgcagcactgcacctggctaattttgtatttttagtagaggcagggtttcaccatgttggccaggttggtctcgaactcctgacctcaggtgatccgcctgcctcagcctcccaaaatgctgagattgcaggcgtgagccatcatgcccggtcaactcttaattttaaaactatgtatagattatccactttcaattacgacattgaattctctgtggcgaattatgtatacacgaactcagcctattctgcagggttttcccacccccaacccacgaagaaactaagcctatctttgagggtcatctgatcccaacagtgtctgcacatgtgaatcatgttatctttctaacaccacacagaaagtatttttttacattgttctatcttcgatttcttgggtgttgcttttctcccttaggtgggggagttcactgtaaactgttcaatttggtgttgatttatgtagttttatagatttctgttttcctag

SEQ ID NO: 278 - DNA, 30691 bp, Homo sapiens
  source 1..30691: mol_type = other DNA
aaactaagaggggtgggcagctagcgtcgtttctaggcaaccgcagactccgggtccttagccgggcctgatggccctgaggcagttcggatgtgtcccaggaagtgcccatgtgtggtccgccgtccattccacacctctgagcgcctttgtcctctgaacttctcaccagttctagcgagtaaaattgtaagaaagggagccgaaagagaccggagggagaggcgggtggagaagaattataagtcaggcaacgtatgcaggcagccagaagagatggggctaaacgccagggaatccgtcccttggcctgaggagcttggagctcctaggctgggggtgagagaggggctctggcctgcgaagcgcacgggccagggggtctgagagcgggtgctgaggagtctgggagtggcaggaacttgggggagactcaaaggagcagggttggttgggcgaggctaggttgaaagagtagggtcgagtgagccaggctgggtgagggagaaggggaaccaggtgttagttgggcatggggccgggttggggacaggaggatgaaagtggggaggaactacaaagagaagctctgtttgttccaagagcgcatcatctttgcatgcattccaccctcccatgttttttgaggctttattgtgaaaaagaggaaaaggcaaggtggctaacatttttcctttcccgtgccccaactaggcgtcccagatgttgtggaactgtccctggatctatagctcttcaccgtctctactttcttccttctaagagatcctgaaacctctgtcatggaaaagtaccacgtgttggagatgattggagaaggctcttttgggagggtgtacaagggtcgaagaaaatacagtgctcaggtgttgcacaaagagggataccttttgggtgggatttggtacccccaactccagtggaaaatggatctagaaggaatgtatttataccagtttgtattcctaaggtactgactccctcatacttcttatggagtataagctttgaagttggattatttgggtgcaaattccatctccaccgctttctagccctagaattatggacaaattacttaacttccctatgtctcaatttccttatctctagaatggggataagaacagcaactgattgatggagtttgaggattaaatatgttttcacattaaatcacttagtacagtgcctggctgttagtaaacaacaaatattattagtctctagcacaccatgtaataagaggtaaaccacttgaactctattatttcctcttcattttttttttcctttcctttctcctaaatctcatcttgagtgctggtcaaatcagaacacttcttccagaaggggaaatgttttgcagatgctgtttcctcctgggatgaggaatggggaaagcctggataaggccagggtaccatggagaaaatggaagcgggagactaacagaaataataagagttactcaaacactctaaaatctgacttctggagctctgagattaaggctgaaattctagatcttttcagtagtgtgattaggcgttaacttttcaccttaccactgacaggtcgtggccctgaagttcatcccaaaattggggcgctcagagaaggagctgaggaatttgcaacgagagattgaaataatgcggggtctgcggcatcccaacattgtgcatatgcttgacagctttgaaactgataaagaggtgtgctttgacagttttgggccctgtctccccaagcacaagggttccaggaatttcccaacctcagaatgcatgaatctggagccatcagtgccactgccttctctctgtaggtggtggtggtgacagactatgctgagggagagctctttcagatcctagaagatgacggaaaacttcctgaagaccaggtatgctttctgccttcaacttctccccacctccgacctctctccaggttagagaactggtagagcaagctaaggacactgagagtctccatttcaaagacttctgagaagaatataagagtctaggtatatagaggcagtgtagtgtgggagtaaattatgtaaacgttggagtcaaaatatctgagcaggaagcttggctctgctccttcctagctgggtctcattggacaagttactttaatttctttgtgcttagtttcctaatttgtaaaatggagataataatcatgtttgcctgataagtctatgatgaagagtgttaagtcatgtaatgtgtttgaatagttagctattattaacattattgttattagatacctttagggaagaagggccagtgtaatggtaccagaaagagggcagtaagaataaaggttgtggggagtcaggatttggcaccaggacgtagtggttagcagtgggattttgttgcacatatcctccagccacatttattctaggcgtttgtctgtacccaagcaagtaggccccccctgggattcattattgcagcattctctttccttctgagcactcaccactatttgtaagtaatcatatttttgaaattattttatttttaattgaattttattttttgagacagagtctcgctttgttgcccaggctggagtgcagtggcacaatcttggctcacagcaaactccgccttccaggttcaagcaattctcgtgcctcagcctccccagtaaccaggattatagcatgcgccaccatgcctagctaattttgtacttttagtagagatggggtttcaccatgctggccaggctggtctcgaactgctggcctcaggtgatctgcccgcctcagcctcccaaagtgctggtattacaggtgtgagccaccacgcccgaccaccatatttgttttatctgtcttgtttgtttgtctgactacttttcttgaaaaaaggcattttgtcttatttaataacaggtaatgtgtattgaatatttactatgtgccaggcaccattctgagtattattttgcatgctttaactcagtcctcacaataatcctccatgtagatggtgttattatatagattgtcaccttagtttgcccatggtcaagcagatagtaaatgagattcaataaatttttcttgaatgaatgaatgagcaaatgaaagagtgattaaacaaggggaacaataactaagaaagaatagtgtgaagctctgcaagaaagggaaggaagaaaagattagcagtaatattaagagaaatttttgggcttgtcagccagctgctgtttctaaccttttttttctttcttccacctctttaatttctaggttcaggccattgctgcccagttggtgtcagccctgtactatctgcattcccaccgcatcctacaccgagatatgaagcctcagaacatcctcctcgccaagggtggtggcatcaagctctgtgactttgggtaaagattctgagcatccatctaagcttccagttccacacggaatctttttttttttttttttttttgagatggagtttcactcttgttacccaggctgaagtgcaatggtgcgatctccactcaccacaacctctgcctcccggattcaagcaattctactgcctcagcctccagagtagctgggattacaggcatgtgccaccatgcctggctaattttatatttttagtagagatggggtttctccatgttggtcaggctggtctcgaactcctgacctcaggtgatctgcccacctcggcctcccaaagtgctgggattacaggcatgagccactgagcctggccccacagggaatcttagaccatactcttgacttatttgggcctcattttagaaccggagctagaggctgggactgctgctgggtcttctggaacctaatcaaaggtgctccctctgctccggtttgggatatctctatgttaggtagtagtgaccaggtttagaatatcttttccctttccatttccatcccattatcttctgcagatttgcccgggctatgagcaccaatacaatggtgctgacatccatcaaaggcacaccactctatatgtctccagagctggtggaggagcgaccatacgaccacacagcggacctctggtctgttggctgcatactatatgaactggcagtaggcacccctcccttctatgctacaagcatctttcagctggtcagcctcattctcaaggaccctgtgcgctggccctcaaccatcagtccctgctttaaggtaatgaatattgaaagggagatgacttttacattagaaatctgtctccctctatctctgttcctttttccaaatccttttccagagctgaggcgggactttgcagttactgaattaatggctgtgttattctgttctcgcattgctatacagaaccacctgagactgggtattttataaagaaaagaggtttaattggctcacagctccatagcctgtacaggaaggatggctggggaagcctcaggaaacttacaatcatgacggaaagcaaaggggaaacaggcatgtcttacgtggtggaccaggaggaagatagagaaaggaaaggtgctacacgctttttttttttttttgagacacagtttttttttctttttttttttttgagacagagtctcgctctgtcacccaggctggagtgtagtggcgtgatcttggctcactgcaagctctgccttgcaggttcacaccattctcctgcctcagcctcctgagtagctgggattacaggtgcccaccacgacacccggctaatttttttgtattttttagtagagacggggtttcaccgtgttagccagcatggtcttgatctcctgacctcgtgactcgcctgcctcagcctcccaaagtgctgggattacaggcatgagccactgctcccagcctgagacagagttttgcttttgttgtccaggctggactgcaatggcgcgatctcggctgaccgcaacctctgcttcccaggttcaagcaattcttctgcctcagcctcccgagtagctgggattacaggcatgcaccaccatgcctggctaattttgtatttttagtagagatgaggtttctccatgttggtcaggctggtctcgaactcccaacctcaggtgatccgcctgccttggcctcccaaagtgctgggatcataggcttgagccactgcacccggccagggctacacacttttaaacagccagatctcgtgaaaattcattcactatcatgagaacagcaagggggaagtcctcccccatgatccagtcacctcctaccagacccctcctccaacattgggtattacaattcgacatgagatttggacggggacacaaatccaaaccatatcaatgccagagctgggccaggcagccttgcttttctactgcagggtcttaattctgggagggtgttctaaagtttgccaaacctgagaatggtaactccagtttgagccaggctatgctttatcacaatgaaaaggtaattggaagatactagagatcgatactggtcctcttacatgccatctattccacttacttcctgtcagatgctatgtccacattctagatgttatctacatagctttcagtccaaagctatcagaatggtgagagctggtggagctggttcagtgattaggggcagatgatagaggtggtgcctactcattgtgactaagtcagtagtctggaggagggaagagtagaagaggagttggacttcttttctatttcttttttctttgagatggagtcttactctgtcacccaggctggagtgcagtggcacgatctcggctcactgcaagctccgccctccagattcacaccattctcctgcctcagcctcctgagtagctgggactacaggtgcccaccaccacacctggctaattttttgtaatttttagtagagacggggtttcaccgtgttagccaggatggtctcaatctcccaacctcgcgatctgcccaccttggcctcccaaagtgctgggattacaggcgtgagccactgctcctggcctctatttcttttttaattaattaaattttttttaaaattttttagagacagggtctcactgtgttgcccaggcttgtctcaaactcctggcctcaagcaatcttcctgtctcaactcctaaagagttaggattacaagcatgagccactgcacccaaccttcttttattttttatgtagggcaagattatggattttcaatagaatttaaatgcagtcttctcccagagtgaaaccttattgtagctttgctttatctgagatgaaaagggacaacaaattcctcccctgtttagttgagggggcccgaataattgtcaagaataatctaaatgaaggaatcttaagtggaagcggtgcacataggatattcattctccctatgggcagatactcaggtatctccagcaagatccatagttatacagctcactttgttttagaacagtggtcataatctactaatacctctgttcctatttgaggcccaattgaggatttccccaaagattcctgataaggataaggtgtatccttttcagagactgtctccctatctctccacctctgaagacttgcagaaagatttctgtttttgagtactcccaaacacaccttcatgcaattacttgtgcgtgtgaattacttgtaaccaaaaatgcatctgttcctacccagccacaaacaaaccatagtcaaagggagggcagcgtgaatagtttgggagttctttgaatgtttgctgtctgaagatcattaagaaggtgacatctgtttctcccagtgttttttctcccttctttacaaagttggtgcattaaaatttgtttttacatttgggaatacaaaatgtctgtgaacaggatttggggtcctctccctaggaggtaagatagtggtctgtccatgatttcagccaggaaaatgggacctgaacaaagtttttagagggcatgatcaagagcagctcatctgctgtgaggatggatgtgggattcttggtttgctagttctgctgatagagagagacttaagggaagggaaagaatgactgatggaatattttttctctctgtagaacttcctgcagggactgctcaccaaagacccacggcagcgactgtcctggccagacctcttatatcacccctttattgctggtcatgtcaccagtgagtcatcagggttcccagggctcttggacttcccagtacttcctctaaactacttccctttcacttccccgaccatctagatataacatgtcgtctttcctccagcagcttgaactttcttcctagcccttcacttaacctttgccacttcccttacaacccactctctctctgtcactttttcaaaatgatcttcttccacagaagcctggagacactgaagttgtccctggccaagtggacacagggactatggcccccatgatcatgtcttcctcctcttccctccctgcagtaataactgagccagcaggcccagatttggggaccccattcaccagccgcctacccccagaacttcaggtcctaaaggacgaacaggcccatcggttggcccccaagggtaatcagtctcgcatcttgactcaggcctataaacgcatggctgaggaggccatgcagaaggtgtgtggggcagaggaaaatatgtgaaatgaccaggctagtgactggggagttagaggaggagggtgactttctagggttggagaagggccgtgaatagcattcatattgtcctatagcaatcaaatagctctgattcagtgttgccccctacctcccacagaaacatcagaacacaggacctgcccttgagcaagaggacaagaccagcaaggtggctcctggcacagcccctctgcccagactcggggccactcctcaggaatcaagcctcctggccgggatcttagcctcagaattgaagagcagctgggctaaatcagggactggagaggtgccctctgcacctcggtgagaagggtatagttagggatttgtagggtgaggtatcttgcacatctttaactctagccaaagcaaatacagaatggtccctgtcactagccactgcctaaacatggatagagcctcgagagtctgagtcctggattcttggattctaattatagatgtttttctgattcatcaggaaacttggggactttctcttctttatgtacattgactgaaaggttggctgaaagggaaaggatcatctccatccaaaagggaagattgttttgagttgaaagccataggtgaaaactgcaaagtagaataagctctaaagtgagaagacagttaaggatatttgtgtagtcgtcaacatatcctgtactggtcatatcccacatcccagaaagaagtctcctctagtcaatcctatatggcttctttctcattcttatcctgggtctacagagagggacaagttaacgaaccctaagagtcataggtttggaacccgttctaccccttggcttcctccggcagggaaaaccggaccaccccagattgtgaacgagcattcccagaggagaggccagaggtgctgggccagcggagcactgatgtagtggacctggaaaatgaggtgagccctagggtctcttactgactttgtctctttcatgggatgttaagtctaggtagatgtttttctagaacagtgattcccaactccctaagtatgagctccctttgtgttaaaaagtattgctttattattatagattttaattgtacagtatctgaacatataattatttaaaatggaaacacataggtaaaaatgaaagtcctcattgaatcagtctccaaggtgaccagtgttattaatttagtccgtctcctcccaaactttctgtaatttcacacacatgcataagcaaacataggcatttatagtttgctgtttttacattactgagttttattatatgtattgttttacatcatacctccttcactgtataatctgggatctttctacaccagagcatgtagttttaccacaatcgtttttttttttttttcgagacagagtctcaccctgtcgcccaggctggattgcagtggtgcaatcttggctcactgcaacctctcccttctgggttcaagcaattctcctgcctcagcctcttgagtagtgggattacaggtgcccaccaccacacgtggctaattttggtatttttaatagagatggggttttaccatgttggccaggctaatcacaaactcctgacctcaggtgatctgcctgcctcagcctcccaaagtgctgggattacaggcatgagccactgtgcctggtctacaacattttattaatatgttttttttgagttttgccttttttttaaaataatttcaaacttaaagaataattgtgagaataccacaaataattcctgtgtatacccttgtcttagtctgttttgtgccactataacagaatagctaagacggtaatttataaagaacagaaatttatttctcacagttctggagtctggaaagttcaagatcaaggtgccagcagattgggtcatagtctccaggagggtgcctcaaatgcccagtccttgagaggggaagaatgcagtgtcctcactttgcagaagtgcagaagagaatgaactcactcctgcaaggccttcttatagcatcagtccattcttgaaggcagagcccttgtgacctaaacacttctgattaggcgctgcctcctaacactggtgcaatggggattaagtttctaacacgtgagttttggagaggacagaacattcaaaccatagcaacactttttatttattttttttatttttttgagatggagttttgctcttgttgcccaggctggagtgcaacggcacgatcttggctcactgcaacctctgcctcctgggttcaagcgattctcctgcctcagcctcccaagtagctggaattacaggcatgtgccatcatgcccagctaattttgtattttgagtagagatggggtttcaccatgttggctaggctggtctcaaactcctgaccttaggtgatctgcctgcctcggcctcccaaagtgctgggattacaagctggagccaccacacccagcctataacaacacttttaccccaaattcatcagttgtaaaacttttgtctcatttgctttaccatcctctctctctctctccccctatggacatagcatctttctgaatcattttagggtaagttgtacacatgcccctttacccctaaatactttagcgcatatttcctaaaacaagatccttcacttacactaacacagtacaattatgaaagtcagaaatttaacattgatataatactgttataatagattaattaaactaatctgtaatccttattcaaattttgctaattgcttcagtaatgtgcgttatgaaaattttttttctgctccatgatccaatccagtatcacaccttgctttatttatttatttatttatttattgagcagggtcttactctgttgccagggtggagtgcaatgatgtgatctcggctcactgtaacctccgactcctgagctcaagcaatcctcctgcctcagccttctgagtagctgggactacaggcacctgccaccatgcctggctaatttttgtgtttttttagagagaaggtttcgccatcttgtccaggttggtcttgaactcctggactcaagtggtctgcccgcgtcagcctcacaaagtgctgggattacagtgagccactgtgcccagcccacacattgcatttagttgttatgcctccttagtctcctttaatctggaacagttcttgtctttctttgtattttatgactgatagttttgaggtacacgtcagttattttgtagaatgttcctcaaattgattatttcctaatgaatagattcaggttgtatatatttttggtaggaatactacataagtgatacatcctcagtaccttaatctttttatttatttatttgagacagtgtcttattctatcacctggacaacagggtggactatagtggtgcaatcatggctcactgcagccttgaactcatggggtaagcaattctttcatctcagcctcctgagtagctgagactacaggtgtatggcaccatgcccagctattttttttttttttttttaagatggagtcttgctctgttgcctgggctggagtgcagtggcacgatcttggctcactgcaaccgccgcctcccaggttcaagcgattatcctgcctcagccttctgagtagctggggttacaggtgcctgtcaccatgcccagctaatttttgtatttttagtagagacagggtttcaccatgttgttcaggctggtctcgaactcctgaccttgtgatctgcccgcctcggcctcttgaagtgctgggattacaggcatgagccactgcaccaggcctatttttatttatttatttattattattatactttaagttttagggtacatgtgcacaatgtgcaggttagttacatatgtatacatgtgccatgctggtgcgcagcacccactaactcgtcatctagcattaggtatatctcccagtgctatccctcccccttcccccaccccacaacagtccccagagtgtgatgttccccttcctgtgtccatgtgttctcattgttcaattcccacctatgagtgagaatatgtggtgtttggttttttgttcttgtgatagtttactgagaatgatgatttccaatttcatccacgtccctacaaaggacatgaactcatcattttttatggctgcatagtattccatggtgtatatgtgccacttttttttttttttttttaaagagacagagccttactatattgcccaggctggtcttgagctcctggcctcaagcagtcctcctacctcgacctcccaaaatgctgggattacaggtatgagctaatgtgcccagcctcacgatcttttttttttttttttttttttgagacagagtttcactcttgttgcccaggctggagtgcaatggcacgatctcagctcaccgccacctccacctcctggattcaagcgattatcctgcctctgcctcccgagtagctgggattacaggcatctgccaccacacccggctaattttgtatttttagtagagatgggtggggtttctccatgttggtcaggctggtcttgaactcccgacctcaggtgatctgcctgcctcagcctcccaaagtgctgggattataggcgtgagctactgcgcctggccttttttttttttttttttttttttgagacagagtctcactctgtcacccaggctggagtgcagtggtgacatctcggctcactgcaaactctgtctcccgggttcaaacaattctcctgtgtcagcctcctgagtagctgggattacaggcatgtgccaccacacccagctaatttttgtattttcatagagaggggggtttcaccacattggccaggctggtcttgaactcctgagctcaggtgatctgccagcctcggcctcccaaagtggtgggattacaggtgtgagccacgcacccggcattcacaatctttttaataacctcatcgtattttctaatatggatggaccctggtttattattcccttagtgactgactttatgatcttttcctttttaaaattattacaaaccatgctgcagcggacgtctttctaggtatctctttatgcacacatgccggtgttctccaagagactcttccagacccctcacagactgccagctgtaccttttttagcaggtgactgaagatatacatctgtgctaaaggggtcactggctccttgcagttacttcatgattccccatggtttctactggttgggatctactaccttagacttacacactactcctgacccctttcactcccctctgcctcaggagccagacagtgacaatgagtggcagcacctgctagagaccactgagcctgtgcctattcaactgaaggctcctctcaccttgctgtgtaatcctgacttctgccagcgcatccagagtcagctgcatgaagctggagggcaggtaatggggagaaagacactgtggatgggatcaagactgttttcacagatggagcattgaaatacactgacttcaggagaaagagaaagtttgtccttttccagttcttcagtctatctgcttagtttgaggaggtttaccaacctcctttagtaacacagaaagagcagccctcaggtttctttttctgaagggaaaaatgcctactagaatagggatcaaacttttttgatgataaatattttaggcattgtgagccaccaggcaaaaatggaggatattatgttaagtacttacataatgagggaaaacacattttcactaattttttattgatgaaattaaaaatataaatgtaacaattaaatatacaatattttgtactacaggtacactagtgagaagaatgaggttattttgcgggggagaggaatgacattttgcttaattagcattcaaagttagtgtaaagttagtgttccctcctacaaaaccttactttgctcctctgaaacacagtgcttttccttcctgggtactcgccaaactgtgttgcttatatcactttattcaggtataatttatgtataagatttacacttttttgatgaatgataaatgatttttagtaaatttgctaatttaaaaactgttaaccatagttcagttttagaacattttcatcaccccagtaaaatccctcatacccatttacggttttttttttgagacggaatctcactctgtcacccaggctggagtgtagtggtgtgatctcggctcactgcaacctctgccccgcgcaggtttaagcaattctctgcctcagcctctggagtgactgggattacaggctcgtgccaccacgcccggttaatttttttgtatttttagtagagatggtgtttcaccatcttagccaggctggtcttgaactcctgaccttgtgatccgcccgcctcagcctcccaaagtgctgggattacaggcgtgaaccaccgtgcccagcctttttaaaatttatttatttatttatttttaatttttgagatggggtctcactctgtcatctaggctggagtgttgtagcacaatcttgggtcactgcagcctctgcctccctggttcaagggattctcatgtctcagcatctcaagtagcttggattacaggcgtgcaccaccatgcttagctaattttttgtattttttgtagagatagggttttaccatgttgcccaggctggtctggaactcctgggctcaagtgggctcaagtaatcctcccaccttggcctcccaaagtgctaggattataggtatgagctactgcccccagcccccatttacagttaatcattattcccctttttatagctggttagtattccgttatatggatatatcacattttgtttatccactcactagttgattagatattgatgtattgggttgtttccactttttagcttttatgaataatgctgctatgaacattcacaagcaagtctatgtatggataaatgtttttatttcccttgggtaactacgtaggagtagaattgctggtcatatggtaaatttatatttaacattttaagaaactgctgaactattttccaaagtggctgtaccattttacattcccaccagtattatatgagggtccttgtttcttcacatccttgtcaacacttgttattgtctaacttttttactatagccattctagtaagtgtgagatagtatctcattgttattttaatttacattccactaatgatgaatgttgaacatcttttcatggcttattcaccatttgtatatcttctttggtgaaatatctcaaatcttctgctcagtttttaatttggttgtttgcgttattgagttgtaagacttctttgtatattgtcaacataagacctttatcagatgggtgatttgcaaatattttctcccagtctgtggtttgtcttttcattctttctcataagagtgtcttttgaagcaaaaaatgttgaattttgatttaagttcagttactgttttttccctttgtggttcatacttttgatgttgtgtataagaaatcttttccaaatgcaaggtcttaaagattttctcttttcctaagttttatagttttagctcttacatgtaggtttctgatccatcttgagctaatttttgtatataatgtgaggaaaggatctaagttgatcgtttttgcatgtggatatataattgtcctggcaccatttgtggaaaagaactctcctttcctcattgaattggcttggcactttgcacttgtcttttggcgctaacacgttttcctcctagtgttggataacttgcagtgtggggaggcagactgaaagctctgcctttagggataagactccctctggtggaattccagctgcactactcattagctgcgtgatcttggactacttacttgacttatgcagaagcttcagtttcttcatctataaaatggctaattctatttatttcacagggttattgtaaatattaaatgagcagatgccaacatttagaacagctaatggaatattataaaatacttggtgtaaatgttcttcttttgaagaataaccatttaaaaatacaatactggccaggcatggtggctcacgcctgtaatcctagcactttgggaggctgaggtgggaggatcacttgaggtcaggagtttgaggccagcctggccaacatggtgaaatcccatctctactaaaaatacaaaaattagctaggtgtggtggtgggcacctgtaatcccagctacttgggaggctgaggcaggagaatcacttgaacccaggaggcagagaggttgcagtgagccaagattgcaccattacactccagcctggaggacaagagtgaaactctgtctcgaaaaataaataaagggcaaaaataaataaaaatataatactatccttagcatgcaggctgtatacaaataaatgttaggctggatttgacctgtgagccatagtttgtcaaccctgatctagagttgaataatgttgttttgtctttctgtggttaaataatattgttttatatgcattgttttgaattttcagaagcatgtgcggtgcacgtgttttttgtttttaaggtgaagggctggagaagggagggagcagatgggaatggcacttagtctgacagagatcctgaggagaggcccctatccgttggtcactggtgttctgtgttaggtaacctgaccatctattgtcttcttccctggtacagttcccctatttccctgctttccttctctgtgttttagacttgcaaagaaaggaatgcaagcatgtggtctgctttcccagctccttggggatgcttggtatgtgtagttctccttcttttacctctgaaaatatcaatcgttgcctctttccctcatgtcacccagatcctgaaaggcatcttggagggtgcttcccacatcctgcctgcattccgggtcctgagcagtcttctctccagctgcagtgattctgttgccttgtattccttctgccgggaggcagggcttcctgggctgctgctgagtctactcaggcacagtcaggagagcaacagcctccagcaggtaagcaccaggccagaagcctctgaagacttacagaggttctttttcttggatttatctcattcagattgccatctctctttggtctgactgccttttattttctttcctcctctttctagttagtagactattaattgcaaactctaatgccttctggggccaggcagataaggtctgccatgaagtaggctatgcatgtgactatatgagttgtggggaatatgatgaactagagttcacatgcctcctctaaatagagtagaggcatcctttcctcagcctccagcccattgttgccacagggaaatatgggcctgagaaaactagccagatcttctagttttctaagaaaaggtagaaacccaaatttttatgtgtaatttttaaatatttagagcgctgtgctttgaaatgttagatcctaggcttcattgacctgatcttacagagcagagtactaaaattcagaggtaactcatacacagtcactaatttgtaaatggtcacagagataacaagtggaagagctgggatagagactcaatgtgtttggggccaaacctctacttccccctgctgtgtcctacggtagctggactgagaggatggggaatgtttcagagtcagtgtaaatgcctaatagggcctaggatgaggcagctggaaagctgcactttgttgatgagtattaatcttgggtgattttaaggaatttagagaaaaagatttttgaaaaatagaacctcctatactccaaaatgctattcaggccaaacaagacacatttaatccaggctgttcacagcccattggcagattctctgttacccctagaactctctctctgcctatacttctcttctgtccctttctgtttgatcaacttgactgggtctctatacaccctttctactgttttttctattctttgtttccatccttcacattgcccttactctcttctccttttcctgggcagcaatcttggtatgggaccttcttacaggacctgatggctgtgattcaggcctactttgcctgtaccttcaatctggagaggagccagacaagtgacaggtaggataagaagtgcttttgcattgttggcaagtttggcttctgtttctaccccaagtgcccttcccatttaggaacaggccaagtatgaagaagctgtgatttgttacaggtttaggaatcagctgagtggccactcatagtccttttaaggaccctaagacagctccaacttggcctcaagacttacagtttctaagagtcagcagtcaccatggtcctaaaatggaagggtcaagatgtgaataacctattccaggaagccaattggattaaagaaagaaagaaagaaaaaaaatatgcgaataacctagagaaaatggcaaagaaggggcttggagggtgtatgtgtgtgtgtggcaagggagaagggaggaacattctgatgtgtccctttgcagagattctcctacctgcccaggactgacccattcaccacatccaggcttttagtagagagataagaaatcatgggctcattttccacccccagcctgcaggtgtttcaggaggctgccaacctttttctggacctgttggggaaactgctggcccaaccagatgactctgagcagactttgcggagggacagccttatggtaatctgctcccacttccagatttctgtgtctcctatcattctccgtgtttctcccatcccctttcttatgactatgtagggtcagatcaagttaatatgacaaacatttgttaaattcccaccatgccatatgccatgtgagtaagaaaaagtgcctgccttcaagggactagggataatttaataggggagaggtaaagggattaaggacaacagtgaaaagtacattagaactttgcatataatacaagagcactgctgtattttatgaagaagatgcagttaaccactgcagaagatgcacttaacactatttggagtatcatagaagaaatctcgaagaaggaaatcatctctgctagcatttgaagaatacatcgcagtttgccacgtaaatgaggcacaaagtagaaattctatacagaaagagtaacatatataaaggcccagaggctttaagcagtttggcatatttcaggggaccacaaatagaacgacttcttcttgaaaagacttgcagatcatctagtattgtctaacctcgtttgtcctgaggattagtagactatgcagttcttttccctagatcctggaggtaagggacaggagaatggaggattgaatgagaaaatagctgtgttctgactaacctcagaggagatagagaggaacatatatttgtaaggaagtaaataattgcctggtcattgttaaaactggtaattgggaacatagatctggactactacttgcctttagctagcattcactcagactttcctggtctgagatcctgttttaatatccctcaccctttcaagtcagaaagcttttactgtctaacctaaattttggccagcagtgactcatgctattggccagcacttctcatgtcatatgctatgaatagaatggggagtttggaataattacctcctgaaattctgaatcagtaggactgagttgggagggacccaggaatccctaggatttcttcttttctttccttttttttttggagacagggtctctctgtcacccaggctagagtgcagtggcatgatcttgactcactgcaacctccaccctccgggctcaagcaatcctcccatctcggcctcttgagtagctgagactatgggtgcacaccaccagacctggctattttttttggatttttagtagagacagggttttgccatgttgcccaggttggtctcaaacttctgagctcaagtgatccacctgcctcggcctcccaatcccctgttgggattacaggcatgagccattgcacctgacccctaggaattcttatactcacagtctataaaaaatactttgagaaacatcatctagggagcatctgatcagagaatagaaggattgacacctaaaattattgtccttgaagcatgaatgaaagcagttctaatgcatttttggtgtgaagaatgcttaaaattagacatgtgtttgctttggtttttgtcctctttcctcagatcctcagggttttcttgttttttacactaagcccagtcttctgatgccctgatgctacctctgcacttctctcctttagtgctttactgtcctgtgcgaagccatggatgggaacagccgggccatctccaaagccttttactccagcttgctgacgacacagcaggttgtcttggatgggctccttcatggcttgacagttccacagctccctgtccacactccccaaggtaaccagagtggagaagggaggttctcttgacttacttgttgcataggtcaggctccgctctttctattgccatcacctagatcgcacctggcatttagtaggtgctcaataaataactgtgaactgagagaatgaatggggatctgagggaaacaaacagacctcatcctgcattcttcccactcccttaggttccctactcctgctgccatgtcggtgagtactggtgctattgtctagggcaagagcctcaggcctttggagttactctttgcttttctccacaggagccccgcaagtgagccagccactgcgagagcagagtgaggatatacctggagccatttcctctgccctggcagccatatgcactgctcctgtgggactgcccgactgctgggatgccaaggagcaggtccgagctacaattggttgttcctctcatcctactgccagaggaattgaggaggctagccccagtttttcagaaaggcagaaaaacaagcttttaagcccctcctttagtacttccagaaacagatgctcccaccctgggccatttgtagaacatgatatagccagaatcccagagcccatggccagttggtgagggagagagcacagtgataaactgcccagatggtggggcagctgatctgaagcctccagtgatgcttcctcaagggctgagaattcagctttcctgatccctgttggtcggtaatcctttcctctgtacctggctacactggggccaaactaggccatgacttttggttctctattggtgatgaagactgggaatagaatggggtctgaggtttctggtgaatgtgggaagagtgactaggaagagactgagagtcctgatcattttggacatatgtgaggaatagggttgtaatcatgtggataggattgagccttcaggtatgtctctataggtctgttggcatttggcaaatcagctaactgaagacagcagccagctcaggccatccctcatctctggcctgcagcatcccatcctgtgcctgcaccttctcaaggtaatcctcttaactcctggcatcacagctttatttttaactcccagtgcagacagagaagcagagaaacagaccaagagaggaggactaaaagagagagagactgagagagaccatttgagacacccccttggaagactcctttctgcttttaaatctgttcaactgagaggaccccactgttagccagtcctcagcggaaccgagaagggtccctgtctcactatctcatagcaagaggcagaagggggttctctcacactcccaagtgtgggtaccagatcttttgaggggctggccggtgtttccgctgagccttcaatcttggagcccggggcctgccctgcctcactgccagactccttccttctccctcaggttctatactcctgctgccttgtcagtgagggcctgtgccgtcttctggggcaggagcccctggccttggaatccctgtttatgttgattcagggcaaggtaagccagcttcccctggcagccccactgtctcagccagaggttgttctgatatcttaggtttcctttgtaggtaaaagtagtagattgggaagagtctactgaagtgacactctacttcctctcccttcttgtctttcggctccaaaacctgccttgtgggtaagtcataaagtagggtgtctccacagaagtcttctagccacatagctaaccctcacaaagagtatggggaatggtaccctacagcatatccttaggaggaattgggatagagagcgtgaagctttctctacaaagaacagacctagactcccatcaactttgtgccttggaggtagacatgcagcctaggtgaagaacaccatgcaagggagaggggaggccgcttaccaacctcctttaatactgctgcatcccttgatgtatctctttattccagaatggagaagctaggcagtgacgttgctactctctttacccattcgcatgtcgtctctcttgtggtaagtttttaaccttcaccctcctccccttttcaccctagcatctaccccttgtggaagtgggggagtcactatccaatttgcatctgtttctggaggcattcttttggaccaggacagagacataaatcctctctgcctgtcctgaatgccatttagatttggacattctttctcctcttttacctctcccacagagtgcagcagcctgtctattgggacagcttggtcagcaaggggtgacctttgacctccagcccatggaatggatggctgcagccacacatgccttgtctgcccctgcagaggtgaggccccccagggagggcacagacatgttttctctgagtcagacactaggactgcattcaaggggaaaagactgaaatgccagcaagcctggagtaaactgaggaatggaaaaggaatcaaggagcccttccttttctagatttgtcgccggatgataggcccctctgagcccagattgatctggactttagatttctttttaatatgcagagcttctagagagtgagggagggaagggaagaggaagggtgactaacctgagttttctgagtagtgtgagaaccctgcctgcttcgttctcctcctccagaagctcatgctcttggcagagtccttcctaatgcataatttcacctctgactgcagcttccactctgctttccccacttgttcttcttaacagatggaaaaggtggctgacatcctgtgaattcttcaggaactcagtccattatgtagccttctttctgctttctcctttcccaggacttttcttcctttcatttttagaccctttggaactcatctttccttcattttgtaaaaagaaggatagactttataatcaaattattgtcatccctttttttttttttttttttttttgagatggagtttcactcttgtccaggctggagtgccatggcgcgatctcggctcaccgcaacctctgcctcctgggttcaagcgattctcctgcctcagcctcccgagtagctgggattacaggcatgcaccaccatgcccagctaatttttgtatttttagtagagacagggtttctccatgttggtcaggctggtctcgaactcctgacctcacatgtgatccgcccacctcggcctctcaaagtgctgggattataggtgtgagccaccatgtccagtcttttttttttttttttttttttttgagacggagtcttattctgtcgcccaggctggagtgtagtggcacgatcttggctcactacaacctccgcctcccaggttcaagtgattctcctgcctcagcctcccaagtagttgggattacaggtatacaccaccatgcctggctaatttttttgtgtgtttttagtagagatggggtttcaccatgttggccaggctggtctcgaactcctgacctcaagtgatccatccgcctcagcctcctaaagtgctgggattacaggaatgagccactgtgcccagcctgccatctttatatatgtagaattcttttttttttttttttttttgagatgcagtctcactctgtcaccaggctggagtgcagtggcgtgatctcggctcactgcaacctccacctcctgggttcaagcgattctcctgccttatcctcctgagtagctgggacaacaggtgcacacctccatgcccagctaatttttgtatttttagtagagacggggtttcacaatgttggccaggctggtctggaactcctgacttcctgatccccccgcctcagcctcccaaagtgctgggattacaggcgtgagctacctcagtggctgaattctttataatttataaaacattttcacatgttatcccacaacacacttgaaatatagacacaccaatgtaataatactcatctgctttttctagactaagttagccttcagagaggttgtatcactagtgatagcactaacactcatccagaagtctaagtcagaactttgggagtcatcagtgactgttctctcttccccattattcccccaccgaaatggttcccccaggccccatatattctaccttccggttgactctcaaatctgttccctccatggcaccatcactgacctgccttggtttaacggacaccccattcctcttaggcacctgcattcttcatgtttctctctgacaggttcggttgactccaccaggtagttgtggattctatgatggcctccttatccttctgttgcagctcctcactgaggtacagatggatcttgggatggatgggaagtaaagagagaggaactgggcattttggggagcctctggaccagaggaatgaagaagcaacccacagccttccctctcaagctactgtgcctgtgatagccttggaacttccccgcctgccctcagtactgaccctttgaaggaaaccattcgctgcgtcccctgggatccagtgggagataaaatgaattccctgggtttcagcagacatacacatgagttgtgaggtcagagggttaaggtttgataagaaaatgaaataagacgacagggaaatactaggtgggaaagcggaaggaattatttctgggacttcctttacttgtaagtcagggacaggaatgaataaaagcatttggattcctgacttctgtctttccccccgccctctttcacttttatctctagcaggggaaggctagcctaatcagggatatgtccagttcagaaatgtggaccgttttgtggcaccgcttctccatggtcctgaggctccccgaggaggcatctgcacaggaaggggagctttcgctatccagtccaccaagccctgagccagactggacactgatttctccccagggtatctttctatcagtatcctttttgggagtgcattgatctctcttcaagaggaggcagcccagaactgggttaacccacagaggtttattttttttgcttttgcctggggacaggaagcagtgtctgcactagagctgctctaagatggggaagggactgaataggtgtagccctgggagctgtggggaagcaggggtatctgggcgtcttgcctgttccattgggtctccatttttggtgttaccaggcatggcagccctgctgagcctggccatggccacctttacccaggagccccagttatgcctgagctgcctgtcccagcatggaagtatcctcatgtccatcctgaagcatctgctttgccccagcttcctgaatcaactgcgccaggcgtgagtttgagctagaagagagccacagagtcagcaacggggagggagaaagaagaaggcaggaaagaagttactgacagattgagctataaagcaagaaagatgagatcaggtttaggctggaaacctaagtagtggctgagactgtagaaggggagttgggcaaaggaattggaggagggagggaggaatgataaaggttaagtgaacaagaccaagtctcttcgacattcctctccttaggcctcatgggtctgagtttctccctgtcgtggtgctctctgtctgccagctcctttgcttcccctttgcgctggacatggatgctgacctccttataggtgtcttggccgacctcagggactcagaagttgcagcccatctgctgcaggtacttgggcagctagcatgaaggtgggagaggaagatagccaaccttgtatcctctaatttacttcccagcagctccagggctcttctaggcccctgtaagcatggaacagctggcttgactcaaaagttggcgtggagacagtactcagacctgcgcatgtggtggaggcatgtggtgggagctgggttggtgcctcctcctctccatcagtccatcacctggttctgttggtgctcattggggagaacatcctagtctaggcactgaagactcacctccttggccaggaatcatgtttctggcaattcttggcattgcacagtgggtctttgttcttttgttgtttctttttgttttttcacagtgggtctttgaaggcagagactgagcccttgcaaagtaaggaatgatcttggaaagaacctgctctctcaggctccacgttgtgtctcatgtggagtgctgtggggcaggacttccagctctctgtggcatttctcaccatagcttggcttttctctctcccaggttttgggcttctttatagctgcatatactctctctctccctgaatccttttacctcctgttctctcaggtctgctgctaccatcttccgttgatgcaagtggagctgcccatcagccttctcacacgcctggccctcatggatcccacctctctcaaccagtttgtgaacacagtgtctgcctcccctagaaccatcgtctcgtttctctcagttgccctcctgagtgaccagccactgttgacctccgaccttctctctctgctggcccatactgccagggtcctgtctcccagccacttgtcctttatccaagagcttctggctggctctgatgaatcctatcggcccctgcgcagcctcctgggccacccagagaattctgtgcgggcacacacttataggctcctgggacacttgctccaacacagcatggccctgcgtggggcactgcagagccagtctggactgctcagccttctgctgcttgggcttggagacaaggatcctgttgtgcggtgcagtgccagctttgctgtgggcaatgcagcctaccaggctggtcctctgggacctgccctggcagctgcagtgcccagtatgacccagctgcttggagatcctcaggctggtatccggcgcaatgttgcatcagctctgggcaacttgggacctgaaggtttgggagaggagctgttacagtgcgaagtaccccagcggctcctagaaatggcatgtggagacccccagccaaatgtgaaggaggctgccctcattgccctccggagcctgcaacaggagcctggcatccatcaggtataccctacagcacttatgaaccatgatgatcagggcccctatagttgacaacatttctctgagatcatctgtaaggaattggaatcgggacatggagaaacttatgccgtgtttctcccagggacagtgtcttggagtgagttttctagttacatctcctgccttggaggagggaagggagctagaagagggctccaatgggctgggaaatgtctgagatctcaaggaccacagttgatctcttctagaggctgtgcaggagggagatgagggaagactaagagatgctgagatagagtagttttactctgtgtgccatgaaggtgctgactattttttttttagacttaccatgagaaaagcacgatgctaagcattttacctttattatctggtttaaactattattatcctaattttgcagatgaggaaactgaggcacaaataatttaataacttgtccaaattacaaggacagtatgtaggattgggcttttgaactcagaagtctgagtccagagcccgtactcttaaccactactttatccttcctcttctgcgcaactttctttttccttttttttttttctgagacagagtttcactcgtactgcccaggccggagtgcatggcatgatctcggctcaccacaacttctgcctcccgggttcaagcagttctcctgccttagcctcccgagtagctgcattataggcatgtgccaccacgcctggctaattttgtatttttagtagagacaggtttctccatgttggtcaggctggtctcgaactcccaacctcaggtgatccacctgccttggcctcccagagtgctgggattataggcgtgagccactctttttttttttgagactgaatatcactcgttgcccaggccagaatacagtggcgcaatctcagctcactgtaacctctgcctccaggttcagccaattcttgtgcctcagcctcctgagtagccgggactataggtgcctgtcaccatgcccggctaatctttgtatttttattatttatttatttatttatttacttatttatttttaagatggagtctcgctctgttgcccaggctggagtacaatggcacaatgttggctcactgcaacctctgcctcccaggttcaagtgattctcctgtctcagcctcccaagtagctgggattacaggcacacaccaccttacctggctaattttgcatttttagtggagacaaggtttcaccatgttggccaggctggtcttgaactcctgacctcaagtgatccacccgcctcagcctcccaaagtgttgggaatacaggtgtgagccaccctgcctgaccgcgattttcagtatataaagagtccagtaggccaggctctgtggctcttgcctgtaatcccagcactttgggagactgaggtgggcggatcacttgaggtcaggagtttgagaccagcctggccaacatagtgaaaccctgtctctactaaaaatacaaaaattagctgggtgtggtggcaggcgcctgtaatcccagcttctcgggaggctaaggcaagagaatcccttgaacctgggaggaggaggttgcagtgagcggagatcatgcctctgcattccagcctgggtgacatagcgagactctgtctcaaaaaaaaaaaaaagcccattggaaatcacagatatctacatatggtaatataaattatgacatctcaaagtggtagcattgggaagttcatgcagagcagaaatttgagaggatggtgaagatcttttttttttttttgagacggagtctcactttgtcgcccccaggctggagtgcagtggcgcgatcttggctcactgcaagctctgcctcccgggttcacgccattctgcctcagcctcccgagtagctgggactacaggcacctgccgccacacccagctaattttttgtattttttttttttttagtagagacggggtttcaccgtgatagccaggatggtctcgatgtcctgacctcgtgacccgcccgccttggcctcccaaagtacgggattacaggcatgagccaccttgcctggccgatggtgaagatcctataggaatcttgtgcaatccatggggaaaataattaatgggattcttggtggtaatgaggttagaactcactggtctgcattgaaggctaggaattagaccttttggcttactgtgagttactgctgcattcatcaagtcttcctggggacaagtatatgtgtcccttagtgccttggtttcatggtctataaccaaagagaatggaagtagacttctggtcctgatgattcctatctccaaggtttctcttctgccattcagtctattccaagtccccaagagcccatttcctttttcttcctcttctcgagtgggaattcctgggtaaatgagagtcctccgcacctgccccagacaccaccatttctgagcctcatgttctgttctatcatctgttctctatcctacaggtactggtgtccctgggtgccagtgagaaactatccttgctctctctggggaatcagtcactgccacacagcagtcctaggcctgcctctgccaaacactgcaggaaactcattcacctcctgaggccagcccatagcatgtgattccagattcctgcggtccagcctccaactttggttgccagctctttcttattctactacacaagccgccaactcaactgagagctaaagagactagaaaagagataagctgccaactcaactgagaacaagaaactagaagagatttatatataaagcttcttccttctcccagatgcaggatgttttcaaccagtaaattttattgctgttggtgccagagaagagtcctttcttctctacatccaggggccttttctccaataatgtgcctttaactctagggacctgcctcacggaccttagggaaaaacctcaacctgaaagatctcttcctttctggagctcctttaatcttcccagcaggtttttgccttagacgtgctggccccaggacagtgatgaagacagagcctgtctcagctctaggctgtggggatcaatgccatcagtccctgttattgagggattatcccttagccaacattcctatctgtgggtgggcgtggagagtgtatctttttttggggtgtgtgtgtatatgtgtgtgtgtatgtgtgtgtgtgtttaatagttctgtttgtaaactcttttaataaaagttgtgcctcaccatacttgaagctcccaggacaagggttgagaggctcaacccctctttcagcttctatgtggtgttggaggtgctggtatcgtgttcacacaaga

SEQ ID NO: 279 - DNA, 9746 bp, Homo sapiens
  source 1..9746: mol_type = other DNA
ctttcgcctcagtctcgagctctcgctggccttcgggtgtacgtgctccgggatcttcagcacccgcggccgccatcgccgtcgcttggcttcttctggactcatctgcgccacttgtccgcttcacactccgccgccatcatggtgaagctcgcgaaggtaaacggccttgagcgcgagcgcagacgtgtaggcctgctttccgaggggcgagcgcggcgccgcggggaggagggcctgcgcgcagtcccgggcgcgttctagggcgccatgctgcgggaagtctcgcgcgattagtggggaggtctcgcggcttctggctacttggtggcgaggtgaagagcttctgcaggtgctgggggcggcgaacgcggcgggaaagacagagtcactgagcgcggggagggggcgctgggcctcggggtggagagatgagaccaaacttttgcgacgcgtacgagctgggactcgactcctgacgcacgtgcccgggagcgcggcctgccacgtgggccgcgccgcgtgggtcctggaatctccagagggaccgggtgccttgggccgggaaatggcggtatcggccctagtcggagtcccggctgcgctcggatgtctccgccccggcctggcaagccgacacgtggtgggccccggaaggtggctctgccgcgtgccttttgcgctgtgtttcgggcacgtggtggcctaccaggtacccccacgtggccgcgccgcctctttaaggggcggggttgtctcgctgggaaaggcataagcttcatgagaaaatcaaggtagtcatttttttaagtgccttaatgatcttcaccgttaatttggattcagatgagggtggtagaataaagtaccgggatttgtagtattaaaacacggttgtgcttaactaaggtaacgggaggagaaatcatttcctcaggttgactttttaccttagggcaggttttctgttggtaaagcctgggaggaaaaatgtgggcggttgagagtagtccctcttgcattgccatcaggagtagtttctatgttagttgtggtgtttggcactatgagaaatggatctgaggacggagatgatggcgtatgaacactaatggcaaaatatgaatggcctgaaatgtcgaggtggaggtgtaatgatctatttgtgtccattttaggcaggtaaaaatcaaggtgaccccaagaaaatggctcctcctccaaaggaggtagaagaagatagtgaagatgaggaaatgtcagaagatgaagaagatgatagcagtggagaagaggtaattttatccaacttaatgcagaattatgttaaaactacaaaatggagagttaagacatgaaattggatatctgtggcaaaaataagattttattcaggtatgtcttattgtagtggttgagtgtttcacaagctcttcattgacatgtcaagatgtcatttggctaagtatttgaatgtgagtgtaagacgagatctgggaatttcttttacatgttcctctgcagggcttggagtgtgatttgttgtgttaaatcattacatttttccagtttcaacatgttagcctcacccccacatgtagagctgggcattgtattcagagctgaggataaccttaccagattcctttcctagcctccaattaaaattaattggtctccattccattatatataaactttgtaatactactcactgtgttttatagttatctctggtgtagactgagggctgccacctctctttgtgttaccattgaccctctttagcactcctggccttttatttgctcactataaagacagctgagcactgaattgtgctcaggtttctcgttgagaactgaatgaaagttttactcttccacacattgcctgataaaactacgggattttaatgtagctaaatgatgacttttatcaaactaccatgcacactctttgatgtgtgatagttttgtaaggaatatttatatttagcctattcattttttgtctcaggtcctaagaattgagcttcactgggcttggtaccgccacccactgtaggagccccaaatgatttaataagttaatgcttggagcctcctatgtgtaaggttctgaataatttacacatagcaattcatgatccttaaacatgtaaggatgatactattaccattttcagatgagaaagttggggcttgggaaagtatgaggtgtaagaattcagagggtctggttcagaggtatttttaagtgttcaaaagagttccttatgtctgggtattcaccttatgataggggctctgacttaagacaacataacagaagcctggagtttaacatgctaatgtgtctagtgcatgtggtcttgaaccagaggcattgccagagtctaacatctcattgggaccatggttatctttttgggtgtggggctggacttactggtttggttttcatttattctcaaggtcgtcatacctcagaagaaaggcaagaaggctgctgcaacctcagcaaagaaggtggtcgtttccccaacaaaaaaggttgcagttgccacaccagccaagaaagcagctgtcactccaggcaaaaaggcagcagcaacacctgccaagaagacagttacaccagccaaagcagttaccacacctggcaagaagggagccacaccaggcaaagcattggtagcaactcctggtaagaagggtgctgccatcccagccaagggggcaaagaatggcaagaatgccaagaaggaagacagtgatgaagaggaggatgatgacagtgaggaggatgaggaggatgacgaggacgaggatgaggatgaagatgaaattgaaccagcagcgatgaaagcagcagctgctgcccctgcctcagaggatgaggacgatgaggatgacgaagatgatgaggatgacgatgacgatgaggaagatggtaaggagttgtcttggtagttactgggcttctgattacaaggtatcttgagattctgggatcaacatattccttccacgacaacctggagatgagattagaatccttgtgggaattctctgggttgttgtggtgtgctagacttaattacccatgaatgatttttgtgcctcttgagaaaatttcaatagcacattctattagtgttttttataatgtaggattttgtttctaagtgattttttttttttttaaatttttttgagatggagcttttgctgtttcccaggctggagtgcaatggcgcgctatctcggctcactgcagcctccatctcctgggttcaagcagttctgcctcagcctcccgagtagctgggattacaggtgcccaccaccacaccctactaatttttgtatttttagtagagacgacatttcaccatgttggccaggctggtctcgaacttttgacctcaggtgatccacccaccttggtctcccaaagtgctaggattacaggcgtgagccactgcgcccggccccaagtgatctattcttgccatgactgttaactaaacatggtgacaggattgcattttctttacattagatttgaaaaccgatgttggttttgggagattgctgcaatttttaggtgacttctctttcagactctgaagaagaagctatggagactacaccagccaaaggaaagaaagctgcaaaagttgttcctgtgaaagccaagaacgtggctgaggatgaagatgaagaagaggatgatgaggacgaggatgacgacgacgacgaagatgatgaagatgatgatgatgaagatgatgaggaggaggaagaagaggaggaggaaggtacttaaattagattctgacatacgacatgagttatgtttaaaggaggcacttaagtgtttgtggctactgatgtgtgatacattgtttgacatcttgtccagagcctgtcaaagaagcacctggaaaacgaaagaaggaaatggccaaacagaaagcagctcctgaagccaagaaacagaaagtggaaggtaacttgcagaattaggggatatgggggagataaacagcacaaatgatgaataacaaagggacttaatactgaaacctgatgttacattgtagtgtgctgatgtgctgtgtatagaaattttgctttggaaactaactttttaccacactacaagtagactgagttgagctttttttgtgcaggcacagaaccgactacggctttcaatctctttgttggaaacctaaactttaacaaatctgctcctgaattaaaaactggtatcagcgatgtttttgctaaaaatgatcttgctgttgtggatgtcagaattggtatgactaggtaagtgcttcactgcacgttacatacacgtgggtctgttaatgcttttccttcccctgttagcacagttactttagcctgctactgttaaacatgaatactgtaaacatcttcaaggattagcattagtgaactaagttagaattaaactgtagatcccctaagttgcaatttccataatcagtcgtaacttggtatagcacagaataatttttagtaagtttttttgttgtttttgttatgtattgagacggacgctggcttttgctcaggctggagtacagtggcgcaatcttggctcactgcaacctctgcctcccgggttcaagcgattctcctgcctaagcctcccaagtagctgggattacgggtgcacttcaccatgcctggctaatttttgtatttttagttgagatggcatttcaccatgttggtcaggctggttttgaactcctgacctcaagtgatccacccacctcggcctctcgaagtgctgggattacaggcgtgagccaccctgccagtaagttttaataatttggtgttaggtgggagaatcgcttgaacctgggaggcagaggttgcagtgagccaagttcgcgccactgtactccagcctgggcaacagattgagacaccgtctcaatttaaaataatgtttattttcttggaagtacctgaaactattagacctgtctagtcatcatagtgaatacttttatccagacaggattctcctgtattagtgcttataggtgttcttttgtcagctgctactgtgaattcttataagcaatttagctccatgatgaagacctcaaacgtgaatgtgcatgtcatatcttcatgctgagaccttgttctgtagctgcagtttgcagagccttgactttgttttgctaatactaggggtgctttttaaaatgtgatctttgtttgcaccatcacatttgtctagaatacatattgtggattttgatttgtgttttcacctgttgtaattttgccctcctctccaccttgaaggaaatttggttatgtggattttgaatctgctgaagacctggagaaagcgttggaactcactggtttgaaagtctttggcaatgaaattaaactagagaaaccaaaaggaaaagacagtaagaaaggtatgtaaggctttatgagattatgcaatgaactcaggagctagactgctagggaaaatgctttgtaacccatttcccttggtttcctcttatttttttaaatcatttttttcctttggtttcctcttaatgtgggaattaaatgagctacagtgtttacaagagtacttggcactgcttgtcagtgttatagtgtaaattcctgagttaggcaagcaagagcacttttatacagaacaagaattattagatgcacctaaattaacgtaaagggatctttcttcactgaaactagattaggtccctaattactccctatatacagttgtaatgttttgaattggtacattcactttttttgttatgcgcgtctactctaggttgaactccagtgtacctaacagagagtttgacatcagctgtgacaacatggagggaccacttgtgtgttgacactgctatatctccatatttagcaccgagccttgtacattataggatctcaaattatttgttgaatagagctatgtgtgtttttcccctctttttgttgttgccccccacctttggtttttcaggccacagagctcatttttgtttttttaatctagagcgagatgcgagaacacttttggctaaaaatctcccttacaaagtcactcaggatgaattgaaagaagtgtttgaagatgctgcggagatcagattagtcagcaaggatgggaaaagtaaagggtatgttctgtctattgaaatgtaagggttttattaacattaatgcactttcctgctttataaaagaaatattggtttgatttccttaggcgtgtaatcttggacagtttaacctgtaagtttgtgcctcagtaacccatctgtaccatggggataatgtactcatagggtgattttaaaagacaagctaatacttacaaagaagcaagaaatgtgcctatcttacaataaatactttgtaagtagtagcagttctttcagtgaggtgaggttactatgaaaaaattccaagtatttgtaaaactagtgggaagtaagagggaagctcgagttttgattgaaaagtggcataaaactaagggcatttattgtactcagatctgaagcaagttctgtgttgctgaggtaaaagcatttgtgttaatatggttttaaaaaccatgagttcttctccctccattgcaggattgcttatattgaatttaagacagaagctgatgcagagaaaacctttgaagaaaagcagggaacagagatcgatgggcgatctatttccctgtactatactggagagaaaggtcaaaatcaagactatagaggtggaaagaatagcacttggagtggtaagaaattaggcttgttacaaggtttcagaattggtggagggaactcctttgtgtctttgtatttcataagtttataaatactttttaatcaaagttactcaaatgtaggtgaagatcaaggacatgataccccaagtcatactcttatttggaatagtaatttccaatcttgaatgagagctctaaaatcattttgcattggaatacagtaggcaaatcaagcttcctttgtaggcatgttttatactttaaatgacttgaccatgtgcgttttgaactcagatgattctaggaaaacagaccagtcatcagcctatgtaagaacaaccagcaggacattgcaacacgtactaggtacttaatatgttgagtaacagaaatggatttagcttacgtcatgagtatttgtatattaactcaagcactgaaattcttaggaataagatattactgttgtgaccgaagctgggaaccactgtttcagagtcttaggaatgtggcatctctatttgcaggtgaatcaaaaactctggttttaagcaacctctcctacagtgcaacagaagaaactcttcaggaagtatttgagaaagcaacttttatcaaagtaccccagaaccaaaatggcaaatctaaagggtaagataatacctttgtatcatcagttataggctatatatgtcttagaggtctaaaggaacgtaaggtcatgtgatcctgtcagaaaagccaaataattttagctacgtaaatgagtgtaaaataaagatcatcatttaggtaccaacttgagagaaggggcttggcagcatcatgtgacagtgaaggagcatgtgcctggtaacttactctaagcattaactgttcatcctcaggtatgcatttatagagtttgcttcattcgaagacgctaaagaagctttaaattcctgtaataaaagggaaattgagggcagagcaatcaggctggagttgcaaggacccaggggatcacctaatgccagaagccgtaagttcacctggttagggtgctgtggttgggggtagcactctcggtgctttgtttattttttgcacaaattctgtgtttcctgttgctactgagtgaacaataactggatatgatgactgattacctgagaaataattgatgaaatctcaagaaaattcctctagatagtcaagttctgatccagctgtgtcaactcagagtagcaagtttgcccatgatttcctgccccatccactgggccccacctgcttgggttgcttctcccactttccatagaagatctggggcaggatatcaactatgcaatggcaattaaaaaatgtaaacccagaatagcctttactttaattaaggactagttggcttagttgcttttaactgctttttcactataacaagtattcttggctagtagtcatactaggcattgtgcaaattcagtgttacgaactgtgacttcacataaagtcacatttttttttccttcccagagccatccaaaactctgtttgtcaaaggcctgtctgaggataccactgaagagacattaaaggagtcatttgacggctccgttcgggcaaggatagttactgaccgggaaactgggtcctccaaagggtaagggaaggaagcgtgagtgctgcttccacttgaaggggtttttgttctgtgcagaccttgagtctaatgtgtcttctcattgagctcctttctgtctatcagtggcagtttatggattcgcacgagaagaagagagaattcacagaactagcattattttaccttctgtctttacagaggtatatttagctgtattgtgagacattctggggttcaagctgtcacaccagttagttttccatagagagctactctgtcactggtatcttttcccaaataaacaaggctactttctgtgggatggctccccagcatgtacagttaacttgggacatgtgtagtaggtgctttttataatgggcaatttcatttggtgttctaggtttggttttgtagacttcaacagtgaggaggatgccaaagctgccaaggaggccatggaagacggtgaaattgatggaaataaagttaccttggactgggccaaacctaagggtgaaggtggcttcgggggtcgtggtggaggcagaggcggctttggaggacgaggtggtggtagaggaggccgaggaggatttggtggcagaggccggggaggctttggaggtaaggcacgcagagataatgacaccacatagcatgtgctcttcagaccctgtgccctgtcacggttcctaatcactggggaggaggagctttgtacccattcttttaacagtgtcttgccttcctcctgtagggcgaggaggcttccgaggaggcagaggaggaggaggtgaccacaagccacaaggaaagaagacgaagtttgaatagcttctgtccctctgctttcccttttccatttgaaagaaaggactctggggtttttactgttacctgatcaatgacagagccttctgaggacattccaagacagtatacagtcctgtggtctccttggaaatccgtctagttaacatttcaagggcaataccgtgttggttttgactggatattcatataaactttttaaagagttgagtgatagagctaacccttatctgtaagttttgaatttatattgtttcatcccatgtacaaaaccattttttcctacaaatagtttgggttttgttgttgtttcttttttttgttttgtttttgttttttttttttttgcgttcgtggggttgtaaaagaaaagaaagcagaatgttttatcatggtttttgcttcagcggctttaggacaaattaaaagtcaactctggtgccag

SEQ ID NO: 280 - DNA, 17865 bp, Homo sapiens
  source 1..17865: mol_type = other DNA
ctatttgagtttgtggcgcgcgaggccctgcagtccgggttggcgcttgggtactggctgggtccgatgctgggtacgctgcgcgccatggagggcgaggacgtggaagacgaccagctgctgcagaagctcagggccagtcgccgccgcttccagaggcgcatgcagcggctgatagagaaggtgcggcccccgccggtccgccgggaggggaggcctgcgtgtcggagtgaggctgggaggggacgtaggacgggaagggaaggggctctgaggactcggagcgggggttggggaagcgggactggggcttggatgcggagagaaggtggaggcggagctgggggctccggagagggaaaaaggaggcagcgccgaaggcttcggtgcggggacggggaggaaagactggggcctccggaacggggagtggggaagcaggcctggggctcgggtgcagagaggagggtttggtggggctgggggtgctcctgagtgggacgagagaggcggagttgggggctccgctgcagagaccgcgtttggggcgccccaggccagactaacggcctctcacgggctggcgccgcctcctcccgggtctggggcccctcgtggccctggaacctgacaggaagccccttcctcctccgcagtacaaccagcccttcgaggacaccccggtggtgcaaatggccacgctgacctacgagacgccacagggtaagggtcttccccaccttctgagtattcgggtgaagagtgtgaatggagtagttgaaatgctgtccctgctctcttaagaagtaaacattgttcacctaactaataggaaccaaaacattggtgcccttaaacctgtaaattacttgaattacttattagaacaattcctgaagagacataggtgcctcctggctcacatgcctccggcttaccgggttggcatccccgctggccacctccccaccatggcagcgtggggcagttgcttagctggactggtctcagtgtcttcatctgtgaaatgggaaggatgatgacaataatgtctcctgggcgtgggtgttgtaacagtcacgtacaatccctatgaaactgtgaacagtaccccgccccgcactgtgaatactcacattgactattgtttgccctgtttaacttggagtagtaactgtcttccttgaggctccaagtacttgaatagggaggagaaggcattccgtttaatagttaatgtaaacggactgaaatcttgtggattctttttggtaaatagctggtgacactttgcactggctggggtcaattcctcccatatagctttataactaactcagtatcacttaatgaaaacaaacctcagagcaagttctatgttgcattaaacggacacagaaggttcacaagatctgctccttgagttaaaagaaatcctacctttctgcctttatagccaatccagacacatcttgggtgaaaagtttacacaggcagaaactaaaatattccagtggcaggtctgctaccctttggtctctgtataacatgtagattgcccttagaaagcattcattcagtatatgggatgtagagattgcctgcgaaaagtgcttactccctctatatggtatatagattgccctctatatattttaaggacagtcgctgtcatatgttccttgttttcatttaactttttgggctaatgatgtaatttgatgagccgttttctagtaggtaggagagatttccatgaatgacgaatttgccttaaaaacctgaaactttacaaagaggaacaatcgcagggtatcagaaacctggcttggttttaatattgtaccttttttttgcctgtcactttggcatctggtgaacacagattgagcagaagttcagcgttcaggattatgtaaatggtcatttttgtttcttttcttcaggattgagaatttggggtggaagactaataaaggaaagaaacgaaggagagatccaggtatttagtgtcaaattttattgccaaataaccttgctgtggaggagtattcatatgaataaaggtgtgggtatgcccaacctctgagcttacgcagaggccaccacggggcactttttctcatgattatactctttctgtttttaaggatttagaagcatttcttctgtagcttgtcaagtgcaaggagtcactgtgtaatatttggcctttttcatcaccctgtgtttcctgtgtcacaggctgaggggctctgataatacatgtgcagaggctgggccagttgggtaaccctccccaaggtcacgtgccagcccagcgaggcactcactttgtttgggtccttacagaaaataccaaatccagttccttctagggaagaagaatgtctctcttcctgttttgaaaggggaggaagagagatgaggagaggtgcagcctggaggatcacacatctttccttctgcatttttctaccttcggaagaccctggcttccctgcctagttgatccgagggtgttgtcgctctgagacccgttattttagtggaaggtgctgttggcctttctacgggggcatccaggagcccttttgccacagtggcttttgccaggttatctggtattcagttaatcactgcctctcagatgccacatggttcctctctgtggtcacaggtcaaggaacctgtatgaaagaatgaaaaacatcaagatcaatgtgacgatattaacagcaaatttgaaatcaaatcttcttgattaattattctagtcataaaaatgttaaaagtacatacaactacataaatgagctgattcctctctgcaaagatggtcactaatgctattttagtacaatgtgattccctataatacatatctttataaatgcatttttttctccctcacttttccggttaatacatctggcaaactcttctcttcatcaactgttgtataattataaaattatataattatttaaaaaatcatgtttttttaactgctctcctgttgataggcaattagctatttgtggcttcctttattaataaataagggtcagcacactttttccacaaagggccggatgatacatattttaggctttgctggctctatggtctctgttgtaactactcagctctgtgttgcaggaggaaagtggccgaaaataatatgtaaatgagtgtacgtggcagtgttccaataaaactttatttataaagcctctgttagaaatggttttcagagaaaatcccggtccttgtctcttcccaatactgatagtcccccttttcgataaatgctgagaagtgggattatcgggttaaagtatatatactctttgaattatgcataatacagatgtccactcattagaccagtgcttaatatggtcctggtagcaaaaagttttcatttaaagatttatttaaggtttttgcttaaaatgtaggaggaaccctacctgggtctccagaatcttcagaccctttcttgggattaggaaactgggcgtagcctgagatttcagcggggacatctctgacttcactgtaattgctattggtgacagtgtccagatccgccttcaccttttcccagacgacttggtgctcctgccgccctggaggctgggggaggctgtgggccctggcaggccgggtgttgacctgtgctgggttggttataacacaatgcctgggttctgtttgtagctaccagagctaccacatagtttggggttggtgtagatcgtctgcttctctgtgattctcaaaccaggttctgcctcagacacagccacaaaacaaccctgtaaactccaccttacgtgacggtttcactggaagcaaaggttctgatattctggaagtgggcttcagttaccctgtagtgctcctgggtagccccaagtcctctgaaccctcagagttgacacctgaggaccatccctaacggtataggcctcgccaccttctcacgccctgtttttataaggctgggtggttcctaaaatattaatatttcagccaatctggtatcctgaatgcttgaatttcattactgagaacccaccgatgccatgctctgggattattcgtggggcctgctatagagcaggctctggagagctgaagcaggcctgaccaggagtgtggccgcccgaccacctctgcccaccaggtatgagctcctggtcaggacaagcagctgcctctgtgcgttagcttgggcttaaactggctcctccccgccttaaatactccagcatattctttaaagatcacaggaagttgcccaggggccacttgcctatttctctgttctcgctgatgacctcaggacaattttgttctgtttcaatttggctttttgtttgccccagtccctgtcatccctgggccactgttaggaggtgtgagcttatctgctcgtgcctgggcccctgactttccctgctccttccaagtggctttttaagtagcagcccccgctgcaacccaggggagcctcagctccttcctacgctcttgaggcctcttataaagtggacatgcagggagaagagaagccttgtggcaggctcttgctgtctcctgtgttaacagaaggattgcagttttattattttgcggtgactttgaaatgtgctgtcactcaaacaaccatgtttttattggcttctgcacttggaggactcctccatgaagcccgcggacaggacagatggctccgtgcaagctgcagcctggggtcctgagcttccctcgcaccgcacagtcctgggagccggtgagtgttgccttcgtcagagaactgaagtcaggagggaccaggtctgacgcacctgttacaacagcttaaagcctagattcctcagtagtgaagtttttattttttctaaggtatatcttaaaaactaaaatcatgttaaagtaccctgttgattccttctgagctctgccttgcccacagttacatccggtgcctgacatatgaatggtactcaggtgttttttgagtaaataaacatgcccctccatgtgaaaagttaatatccagatttagtaagacttaagatttgcccctacagggtggtgttgtgaaccctcacttctatagggcagcttcccacttcgtcctcctaggaggctccttccttttccccaggccagtctcactgcccacccccatcctgtcctcttttctagggaatctgtccctcaccccttccttctgtcttcagtctctgtcccctggatccatccgtcggtatttagatgcgctcagactcacgttagatacatcagacccttcgtggctctcccctgtcctgggccccttccttgccacatccctttgcccagttccctttaccaccagagtgaaataacctgctccgtttggtgccatggattccctaccccaccaaccccgtgtgttcctcctctcccgactcctttcggctccatctctaaagcccaactctgggtgaggtttctcacaaccccattgctaaatcctgttagcattctttgggttttattctttgggttttgcgctctccattgcatttaaaccttccagaagttctggcctgggcctctgtggccccctgctcctcggccccatgctcctccagttttcctccttctgtcttcgtccttccaagcctgcagtctgctcgcctcccgtccctgctggatgccctttctagagggtttgtttgagctgcctttgcccttcccccaggtggagccatggcttctctgtgtgctgactgtaacctccagccagaactcaactgggggcgttttactgcccagcagcccctctgcttcaatacttcatgtccagacttggcacagctaagactcagcccgacagacaggctccccatcttctgctctgcgcctcagtacaggcccctgccgtcttccctctagcgttagccagaaacccaggatcttcatctcagcctctgcctcattcctcatggccaaggcatccctgtcctgtgccttgtgcttcgttagctctcatgtccccgctgagcaccagcctccaaccccacccgggctccctccgccccactgacgcccctgtgaatgtggtcaagccgcttctctgatgcaacacgtggcttcccattgcttttggggtaaaaggccagaacccagaatggggcctgaagtcctgcctgaccgcatggcctccttgctgcccccgggaagcccctgtgatccccaggctggaacagacccccactcttatctgagctctttagacctgggttcctctgcttgcgaaacagttttgtcactagcctttaaacacctgtctctcctggacactggccttccgcagcctctgtccccctctgcccagtccctttcctggcaccttgcctacaccaatagttagtgatgggtgttgagtcgctaaagggaagctggtggtctttcagagtagaattggaaagctcttcatgaggatatttacctgtggtgctatgtgtttactgctattaatccagattttaactataaatccttaggtccatgaatttccccaaccgcttgaaatcacaggaaatagttatttgatagatgtactgcccagtatggcacccaccagccctctctggatgatatttaaattagttgaaagtgaaataaaatttaaaatccatttcctcagccttactggccacatcccagctgttcagtagcccggtgtggctagtggctggcctaggacagcaggcagagaactttccatggtcaccggaagttctgtcgagcagtgctgggcttgagcgtctcaacttccaggctcagaggccatggaaagctggaggtggtgcagaatctgcctttcctcactccatggccccaggcagtttcccattctaggggttctctgggttactaagaaccacgggcagccgtagatggctccagtgggtgcacccttgaagcaatggggatttttactgtacaacttactcgaagtgatgccaaaaccatccttgagaggaaaatgcactccttcctgaaaatcctgattgagatttacttgtttgacttttagattcaaaaagcggtgaggtcgatgccacgtcagaccaggaagagtcagttgcttgggccttagcagtaagtgctgcctttagtaatgaatggacagagggggcgcttgggggctcaggggtccatcaaagcccatgtggcctgaggcgggcagcgctgcctgcacttttctggaagtcctctcctgaggctggcttttgctacttccaagtctcggatttcctcgtgtcgattcccttcagcggtaaggccctcctctcagtctagcacctggcagccagttctacccccagtgcaagcctgattcacgatgattttcactctgcagataaagctgtcagtgtggttggcagggcgccatctgcctggatgagcacacgacaggaaagctgggctctcggtcagtctcccctacaggggcagggtaaaaagagaggtgttctagggagtatttccaggtctgtcctcaaatgccccaagtcacaaggtcgcctcattgggcagccgtcactaacccaaacagtaagtgtcatctatatgtctgtttcccagagtgccccctgggtcacagaaaccacccgttttcttatgggatgtgcttcttatcctccttggttgggatagatgcgaatttacacagagcttaaccagctccagcatctttcctggcccccgtgtcacactctgttgcctgccagaatacctgatgcatggttttcctctaaaattgctacttttgtgcagagggtttcccacgcacccatgtgtgactttcagtgactaagaaaaaggccgtggtcctggggaagaaagtggatgctcactgagagattgtgtagggattggaacaaaggggaagtgggtggtaccaagagtcaagaaccaaagtgccagccccactcagcagaggatagagggtgacgccctctatttccagtgtctagcaggggaggggtaggagagcctcctgagctggagcactgaatttctgtttttgtttttggttcttttgagatggagtttcactctgtcacccaggctggagtgcggtggggcaatctcagctcactgcaacctctacttcctgggttcaagcgattctcctgcctcagcctcccaagtagctgggactacaggcgcccaccaccatgcccagctaatttttgtattgtagtagagatggactttcaccatgttggccaggctggtctcgaactcctggcctcaagtgatccacctgcctcagcctcctaaagtgctgggattacaggcatgacccatcacacccagccaggagcactgaatttcttataaacttaccagtttgaagttattaccagtagttgagtcctgaactcacctatgaatattcagattttttttttcctggtctagcaatgctgtcataaacttctctagacatggtttttttgtgtgtgtgtgtctttttacattcttttggattattaacatagcaggaagtgaaaaagtgactttgaataacatcatggaggtgaaagtgactttgagtaggatcatgtaaagatttgtacattaatgagcttgccagtttgttccagaagccaaaaggtcagctatactcagaagctcttaaaaattctgacttctcttttttgatcagcctgcagtgcctcaaagccctttgaaaaatgaattaagaaggaaatacttgacccaagtggatatactgctacaaggtgcagagtattttgaggtaatctgtttcccagttgtttgtttttatataattagatcataaactaaatacattgaggtacagtgttattatgctttttgttttttctacagaacccataaagagcatttgaagtaatgatttccaaattgttttattcacatgctgacatacttgctcttcttgaataaacactccaggtcccccagggcagcgccatcaggaaggtgggagccctggcaggggtgctctgcccactgttctggggcaactcacagaaaaatctagtggggcagccaggcacagtggctcatgtctgtaatcccagcactttgagaggccaaggcaggtgggtcacttgaggtcaggagtttgagaccagcctggccaacatggtgaaatctcatctctactaaaaatagaaaaattagctgggtgtggtggtgcgtgcttgtaatcccagctacttgggaggctaaggcaggataatcgcttgaacccaggaggcggaggttgcagtgagctgagattgtgccactgtgctccagccagggtgatagagcaagactctatctcaaaaaaaaaaaaatctattggggccacacacgggactcttaagagcagccctgacctctggaccaggatttgaagctgcatagttagggaagcaatagtccccacattccctggtgcgatcaggctagaatcagctgcaaggtgaggaggctgacccttggcacctgtcccgcctgctgagaggtcatgttgggaggggggggatgtgatggcatgagaggtgggcacactcacctgccaacccctctcttaaggtcagtgccctctgccatagaataaaggacattgcaacaccaaatacttaggaagtacacattgcagaataagaattcatctccagaaaaaggcagcaatctcacaggggtgtatgtgttttcttactgtgctgctgaccagcggaaagcctgtatttgtggaccaccgacttagtggatgtacctgaaatgctttttcctttaacccaaggcagcaagtggtgtcctcttggttgctgtgttgatccagggaacagattagggttaggaacgaacggatctactgggtcttctttgtccaccgtccggttggcccctaggtgttcttgtggtctgagtataatgctagacaaagaaagctaccagcgcccctggggtaagaagttactggcaggtgagtggtgactgtggctggaagctatcctggagaccacatcaactgtccagatcttagtaggacatattttcttcccactgcccgaagcctagctggccactgtcaccacattcacacgcttgtcgacatggctgtgctaagatgcacagtccgcatcgtcaggggagaacccagctccttgcacccagttgacacctggcaacttttttcttgtaaccactggctctgatttcagtgtgcaggtaacagagctggaagggatgtacgtgtgactccgctgccttcactggcctcacctgccgtgcctgcccccggtgagtgtgacatagaaactgtatgaacagtgcgtgtttccttcacttttgttggagctgcgtggcccctcagagctgctcatactggccacgccatcatttcctggtgtgtttcatcaacataacttgttagagatatacttggatttcactggaagattaagatgtttcaaaatgagctgttttctcctccacgtctgctctttattccagtttactagcttgaaaagttttgcatctccagaagcacaggactagtacagtgaacacccttcacttgtttcacaattaacatgttgtcatatctgcgttatcaccccctgccacacacgtgcacacacagtgtgtatttatttgcatttgtgtatgcatttatccctaaatgcctcacacatacctccaaaaatcggctaattctcctttatgactacagtacgcttaacacaggccagaaattgaacattgatgcggtactgttctacccattgtgccagtgacgtcctttgcagcctttctggtttgcctgatcgtttccggacccactcaggctggtaccaccgttgcgtttagtctccctccatcaagagcggctccttggcattttctccctcatggtcacctttcatattattgcctttcttgaatagcacaggccagtaattttgcagaatgtccctgaatttggacctgattgcttcctcgtggttaggttcacgttaaacatttttggcaaaattactacagggatgacgtgtcctctcagaacatttggtcagtctgtcccattcttggtgacttttaggctggtcattgagttaaggtaagaccttacttcgatgtttctcattgcgacaggccctttttccctggagtcatctatgtgtgattctttgagatctcctaggaaccttttctctaaaagcttctcacccagtgacttagaagccagcaatgcggatcgcctgggtggaggtccccgcccaggttgtttctgtctctgccgttccttggcacacgtcagttggcattattctgctcaaaagagctatctcccctctggttcttttttttgcttcctgtagttccctctcatgctttgatttattttatttttattttttaggatcagtaggaattcatggagtctttttgttctttgattcacatgttataatccattgccggtatgcaatttgacgctcaagtaaccccagatttagctgtcagggagcccctttcaggctggcttttgtgtcgtgtagtgcaacgacatgcgtttttgagcacttcttcacccctgccctgatgccatatctgcctctcccagttctcaccagccgcagtgagttaacacgtgctcatctggtcaattgtacagcataaaataactctagcattgcagcacctgctaccactcttcacaaccatctactaaataagcttgaaaatttccaagcagctctttttatccttagacaatatctctttaagaggcagacactcagagtatttggactctttttttttctctttatcaatttaacatacagattttttttttgtttgtgttcaattttatggttttttcccatcactgttggttttttttttttaaatataggaaacatttacatgatgcaaaagtcaaagctatatgaagaggtttgtttagaagtcttacaccccttcccatccatgtaggtaaacagtgttgtcatttttcagtttctaattagcttttgaaaaggcatccatcttctaaacagcctagagggaaaggaagacacctttgggaaatgtacgatggagagtagaaatcaaattttgataccaaaaaatatctctgagaagagtctactcctacacatttgtggtgtttttgtttttgctattgcttaaaaaaacatagtcctgatccaatcttaagttctgtcatctgtgcacatggatggtttagaatggtaacacacctttactttatgtgtatcttttctcccaggatactgcagtcgtatctccagaaagagtcctggtgacccagcgaaaccagcttcatctcccagagaatgggatcctttgcatccttcctccacagacatggccttagtacctagaaatgacagcctctccctacaagagaccagtagcagcagcttcttaagcagccagccctttgaagatgatgacatttgcaatgtgaccatcagtgacctgtacgcagggatgctgcactccatgagccggctgttgagcacaaagccatcaagcatcatctccaccaaaacgttcatcatgcaaaactggaactccaggaggaggcacagatataagagcaggatgaacaaaacatattgcaaaggagccagacgttctcagaggagctccaaggagaacttcataccctgctctgagcctgtgaaagggacaggggcattaagagattgcaagaacgtattagatgtttcttgccgtaagacaggtttaaaattggaaaaagcttttcttgaagtcaacagaccccaaatccataagttagatccaagttggaaggagcgcaaagtgacaccctcgaagtattcttccttgatttacttcgactccagtgcaacatataatcttgatgaggaaaatagatttaggacattaaaatggttaatttctcctgtaaaaatagtttccagaccaacaatacgacagggccatggagagaaccgtcagagggagattgaaatccgatttgatcagcttcatcgggaatattgcctgagtcccaggaaccagcctcgccggatgtgcctcccggactcctgggccatgaacatgtacagagggggtcctgcgagtcctggtggccttcagggcttagaaacccgcaggctgagtttaccttccagcaaagcaaaagcaaaaagtttaagtgaggcttttgaaaacctaggcaaaagatctctggaagcaggtaggtgcctgcccaagagcgattcatcttcatcacttccaaagaccaaccccacacacagcgcaactcgcccgcagcagacatctgaccttcacgttcagggaaatagttctggaatatttagaaagtcagtgtcacccagcaaaactctttcagtcccagataaagaagtgccaggccacggaaggaatcgttacgatgaaattaaagaagaatttgacaagcttcatcaaaagtattgcctcaaatctcctgggcagatgacagtgcctttatgtattggagtgtctacagataaagcaagtatggaagttcgatatcaaacagaaggcttcttaggaaaattaaatccagaccctcacttccagggtttccagaagttgccatcatcacccctggggtgcagaaaaagtctactgggctcaactgcaattgaggctccttcatctacatgtgttgctcgtgccatcacgagggatggcacgagggaccatcagttccctgcaaaaagacccaggctatcagaaccccagggctccggacgccagggcaattccctgggtgcctcagatggggtggacaacaccgtcagaccgggagaccagggcagctcttcacagcccaactcagaagagaggtaggtgtgtttctgttggttgaatgtggtttatgtgagtgactgctctttggacagaggctttttatggtaggaatctttgcgccacgtttagtgaatctcagccgaattcttacatacgtgatcattttctgagctttctcccaaatgcttttccttcctgtaaagtcagcgtctctatcaagaatgtgtccctgtgtaagatgcatcgaggtaaagcagaaagtgctcttgcagaagtttcacactttccattagaatgcattcagaggcttttttcctgcaaatcctcacttactacgctttattcgtctttgtcaaaccttcatttctaacctcttcatctgacactcagaaaatagctgttgtaaggcgaaagtgatctaaagcgaatgacttcctatttctggattcctggtagggaaagagcaagagtggcctgggagagccacgagcacagtattctcacaggtgcgaggggtgccctgcagatatctcagtgctcagtgttaaaacttctgcaccttgttctgcagcttaatttgtgcgaatcatgtcagctagagttttagtctgcgtgtgcccttttctctagagacagtggggtggggtgggtcagtgggagtgagtacctttgttggcattaaaggttggattccccagcacagcttctctgtgtgtccacagtcaggatctggaggatgcgactttcttaacccacaggtggacgggacttgactgtgggtttgatttggccggttcctttgggttttgtgtgtttgtggttccagcaggtgaggccgtgtctccagtatcctcttcccttgtgccctagcctggcgatgtgcctcttctctgaggtcatttgggtggaccctgcctgccataagtgtcccattttctgtttctcccacctggacccgcctggcctgcgagcccttctcagccactggctcctgccgtgcgtccagctcagaaccaaggtctggtatgccttgttccttctgtggtgcctgccttcgaagcctgcagtcccgcctgtgcatggcagagaccacactctcagaccgccagcggcctcctgtggcttgagccccctggggcctttctcactgtcactctgtcttcccaatgcccttggactgctcagggccacctgctccagggtctgccgtaggacagcccttcccttccagggaactttcactggcattctccccctactccccagttctttgctattgcatcctcggacatcctccctagactccacccaccgctcagctgcctgctccgtgcaggtaacccccaccctcccaggggctgcacatggtgggtgctgcagtggggagctgtctggacacagaccagtctcatgggttagcggctcaggctccttggctcagttctagaagctcccaggttttgttggatgttttggttttcaaagttattttcgtgtataaagtcatactgtgtgagctaaccagaagcagatgaaacaagccttggttgtcatctgtcttcccagttgaggatggacatacgtaagtgttcaggtgatgggaaaggtttttctctgcagggccccagctagggtcaggggcactgtgtgggcagggccctcggagctcctcccctggcagtgcacggctaacagcagtctttccctcgggtcttggtctccaactgtgtgcctgatgcccactcctgtgcccacttggggctttttcagaccaaaccaccagccgggtgactttcagccacagttagtgaagccttcaagaatctcagctacatcttcatggcagacacttcatggaggctgctttgaggcaaagtttatgcgttctgtttaacagatgacctctcaagagtctccttctcagttgaaaggggagaatttcaccaaaaacaactgtccggcccagagagagatctgaggtttctcctggtctcccacacatcagagctcctctgctctgctcgtcctgcttgtctaaacctaactgctttttctcagatagtgccccagctcttccttttaccatcatcctgcccctgggattttgtctcgtgccttttcccaccttgttccatgatctggcaccgtgccagtcgcctgcagacccctttccatgagtgacatctgccccagtgctccgtgcagaggctcctgccttgctttttcacctgctcagtctaaagggctttcttctggcccagccacacaggagggacctcggccttgtagagaatggtgtgaggttgcattattgtgggaccatcctgaggactcagcccttggtggccccgcagggccctcccagctaccctggaatttgatagcaagtcaaatcatgaacaccccaggtttcattttaaaccacaatataaacatgtttaactggtttcctatgtttttctgcttttcccgcttaaatgatagatttcttgaggaaagagaccaattcttcatgagctgcaactacatatggagttttcatgcctaacgtctgagtgctctctgtgtgccaggccatgctgaaccgtttttacgtcttatcttctttcatccccaccagaaccccttgattagatcgattctgtccaataggcaggctgtctctccttttaatagatatggaaaagtagcttaagtcttagaactcctaaattcactcgtgcagcagcgctagctgggccagggtgtgggatgtggacttccccaccagcttgtgctccctgggggagtgtggggagcagggtcggggggttgccattatatttttgttgtttctttaacataacttacttatttaacgtaatgccactttctataagtatttttatacatgcaatggaataagtagaaaacagttaaccttttagtggctggcattgggaattctagaattttgctaacatcattttctttgtcttttttttttcctagaggagagaacacgtcttacaggatggaagagaaaagtgatttcatgctagaaaaattggaaactaaaagtgtgtagctaggttatttcggagtgttatttatcttcccacttgctctctgtttgtatttttgttttgtttttgattcttgagactgtgaggacttggttgacttctctgcccttaaagtaaatattagtgaaattggttccatcagagataacctcgagttcttggtgtagaaattatgtgaataaagttgctcaattagaatttttagggttctctttgataggcctgtttttctgatgtgtgtgttttttttgggggggggttatttgtttgtttgtttgtttgtttgtttgtttttgagacagtctctctctatcgcccaggctggagtgcggtggcacaatcttggctcactgcaacttccgcctcccgggttcaagcgattcttctgcctcagcctcccgagtagctgggattacaggcgcgcgccaccacgcctggctaatttttgtagttttagtagagacggggtttcaccatattgaccaggctggtctcgagctcctggcctcgtgatccatctgcctcggcctcccaaagtgctgggattataggcgtgagccactgctcccagccgtgtgttcttttttaaatttagatatgtccagagaatcctctctcctgtttcccatttcattcgagaatattgtttgcttgtgagacgtaagttcgagccctgcatgcaatgacccttgaaggaaaataaacagtcctggtggtcccagacgctcctgcagccacagcgcctgtgactcctcatgattcttactgaagctgttgatgacaggatatcatggtgacgtttttgtaatgaaatatttcacatattcagaatacattggtgaaactcatgctggagtaaatagttaatatatggcca

SEQ ID NO: 281 - DNA, 11669 bp, Homo sapiens
  source 1..11669: mol_type = other DNA
ggatggccggagctggcgccctggttctggaggtaaccggttactgagggcgagaagcgccacccggaggctctagcctgacaaatgcttgctgacctgggccagagctcttcccttacgcaagtaagtagacgttatttaggtcgaatggaaaggccaggtgagccgacctggttaagagcattttatcacttatcacatgatgagaaatgaaacccacgcttcagtctgctttgctttgccaagcggtcgctagtacttgttaagcactaattgtatactaggcactgagctgagtaatcgctttagttggcttatctcgtttaatccacacatggcttggaagtgggtatgatttgaattttacagttaagatcttcctcagtggtttgtttgtttgttcgtttgtttgtttgttttgtgacggagtctcgctctgtcgcccaggctggagtgcagtggcatgatctcgactcactgcaacctctgcctcccgggcgcaaacaattccaaggtgcgcgccaccacgcccggctaacttttgtatttttagtagagacggggtttcaccatattggtcaggctggtctcgaactcctgacctcaggtgatccgtccgcctccgccttccaaagtgctgggattacaggcgtgagccaccgagcctggcccttcctcagtttttcaaatttgtcttctggactatggaaagaccttttttgggacagaagtgctgtctactttgtttactgtgcatcctctatgtctttgacacatccattgtaagtacttgttggatggatttaaaacttttaaaaggaccttagccaaggtctcccagctagaaagtgcctagtaagaattagaacacaaacaggtttgttaccagcccacactctaaccaccatactatactgcctgcctgcatttattaatacttgtgttgctccagcattgcctttggtgtttcctgttctttctattcactgccctgtaagtgatgtaaaacacatataacactgcgtccccaacttaagcatactgtaatctcacaatgagacacttgcacacaaaagaattgcaatttcgttttttaaaaaaatataattttacatttttcttcttttcaatttttaaattttaattaatttatttctcctttttttagagacagggtctcactatgttgcccagactggtcttgaactcctgggttcaagagatcctcccgcctaggtctcccaaagtgctgggattacaggcatgagctaccatgcctggctaaaatttcctattggtaattttgacctgagctgtgagttttggggcaggtagtgagaattctgaaaacagcattatatattcctgatttctatatgagtatatgcccgagtagcttggactacaggtgtgcagcaccacacccagctaacttttaaatttttgtgtagcgatgaagtctcactttattgcttaggctggtcttaaactcctgggctcgagcaatcctcccacataggcctcctaaagttctgggattacaggcatgagccacagcactcgagcaagatgatcttctaagacaggtgaagatgttagtgtctagaacttcaccttcaggggcacgtaggtatgaaaggtcatatctaagtgagtgtcatgtcagtccttctagaaactcagctgctccttttcaaatccagcctaataaaaggaggcttggagaatcaatgcacataagtcagaattatagaatgcacagcatgattactaggatggataacatgtggtctgaacaaacttctcatccattacactcagccctctcaggttaatggaactcagatcaagtatattcctgaagtcagtactgtgtgacgaacaggggtctggtggaagtgatgctaatagggctttaggccagctttagagcccttctctctctctcttttcgttttttgttttctttttgtttgttttttgttttttttttttagacagtttccctcttgttgctcaggctggagtgcaatggtgtgatctcggctcactgcaacctccgcctcccaggttcaagcaattctcctgtctcagcctcccgagtagctgggactacaggcgcccgccaccacagctggctaatttttgtatttttagtagagacaggggttttaggtcaggctggttttgaattcttgacctcaggtgatccgcccacctgggcctcccaaagtgctgggattacaggcatcagccactgcacctggctcaagaaacattcttaagcatgcttgatcttggtaaatgcccctgatttcttctgtaggaaaaaaccctagagatcgaatttctgtgtcaaagaataagtaaaattctaaggcttttgatacacatttctaagtttccaccagaaaaattataccaatgtatactcccacttgcaatgtatttaagtgcctacttccttgaatccttcctaacacaccaggtgttaacatgatttttattaatttggtaggttaaaattctgtctccattgaatttacatttctttgcttattaatgtggctaacaaacttcacgtttatgaagactaggactggacagtggaggccagatacctctggctttttgtttagatgaataaattttctatttctcttaatccattcaagttgagttctctgtcactgaaacctaaactatactaaccaatataatcctttgaggcatactgaagtcttaaaacttgtatggttattcattatgttttatgggtttttttcttatgtttggaagcccataggaagatctcataaatatttaccaaaatatttttccatttcttattgggtcaagatttgaatttgaattctttatctagaatttagtgaataattattaggaaaagtctttttttttttttttgagatggaggtttgctctgtcacccaggctggagtacagtggcgcaatcttggttcactgcaacctctgcctcccgggttcaagcaattctcctgcgtcagcctccctagtatctggaattacaggtgtgcaccaccacgcccagctaatttttgtatttttagtagagacggggtttcaccatgttggcctggctggtctcgaactcctgacctcagatgatccacctacctcagcctcccaaagttctgggattacaggcatgagccactgcgcccatccagaaaagtctacagcttttattcttttctaatagtttaaccaattatctgatcaaaatttacttcattctttctcccactgatccaatagtacctttactagatgttagagtagccacttaaaatgtaaattggatcacatcaaagatctgctgttgaccacattcccttgcacttttagagagcctacaaagtcctgcaagagctcaccccagcctctctgcaacctcaccttgcaccactcttgcttcagacacatcagtctgagttctacatcaaacttgtctgaatatattccaagtatgctgacctttataatcatgctattctctcagcctagaatgcttttttccaactctccaagcagctgtcttctctgataagatgctacctcctcagagaggccttctctgaccacagtcataggcatgtttatgtcctcatttcagtttaacataaaatttacgtaactgtacacctctttatcatttgacacttttaggaggacatcacttctgtaatagagcagaaataaacagattgatgtacatggtggatcccccatggatagagtttgtcatttaaaatgtcttcaaatctattacatgtaatttggcattaaaccaaaatgttattatgtaagcagacagaactgaaacagagtagtggagcatatgcatttgtttttagtgaagcaaatgttcctcactggaggaaggaacacattccacattttgcaaaggaactgagattttaacggacccaagaaaggaaaagaaccacaaacagatgatgctgtattatgttttgatattgagatgtatgcaaatgggtagtccatcacacataaagcaagaaagtgccaacatcaaaacttacaaatgagtagcagaggcttgcaagaaattccagagacaatagaatagcactattgaaaaatactgcatcatcaatacccttgacaacacagagtaggatattatacagaaaaacagcagaatcagcaactaactgagtggagaaacagtaggaatgccttaaccaatgtagcttaaattttttcatgtttgcacaagagtaatatataataagaatgtttttaaagtctaaaagttcttttaaaacaaaatagacccgggcgcggtggctcatgcctgtaatcccagcactttgggaggccaaggcaggcagatcacatgaggtcaggagttcaagaccaacctggccaacatggcaaaaccccgtctctactaaaaatacaaaaattagccaggtgtgatggcgcatgcctgtaatcctagctattcaggaggctgaggcatgagaattgcttgaacccaggaggcggagattgcggttagccaagatcacaccactgcactccagcctgggtgatagagtgagactctgtctcagaaaaaaaaaaaagaaaaagaaaaagaaaaaaaaaaagaaattctaagtgataaagcattgtgtaacagtttgaggctgggcacagtggctcatgcctgtaatctcacactttgggagaccgattgggaagattgcttgagcccaggagttggagaccagccagagcgacatagtgggaccttctctctacaaaaacatttaaaaattagccaggtacagtggtgcacccctgtagtcccagctatttgggaggtggcaagaggatctctcgagcctagaagttggaggtggcagtgagtagtcatcttgccactgcactccagcctgggtgtcaaagggagactcccctctctagaaaataataaaaaaaaaagtttgacagttttcttgcttgtgctacataaaataatggtacatattacaattgaaggcatcttataatagaaatgccctttcctgttcccttttaaggctgacccagtgctttaagaggctgatacagaagggtaaagttaagtctccacaaaatccagggaagagactgtgaaactcatcttagaaccttgtatggagtcacagctgaactaggaaaaaaaaaaaaaaaaaaaaaaggaaagaaaggcattccagagataaagaatagactaaggagaggagatatttgaagccataatgattgagaatatgtcagacttgaaatgaatcttcagttccctcaacaagacaaataaaactaactccatacctagatacatggtagaaaaactaaagaattctgctgaccaaggtattaaaagtaactaaagagaagtggtgtgaagaaagcaagagagaaacaacaaatcctgtccatcctgtaacaattgaaaatttctggctgggcgtggtggctcacgcctgtaatcccagcactttgagaggccgaggcaggtggatcacctcaggtcaggtgttcaagaccagcctggccaacatggtgaaaccccgtctctactaaaaaaaaataataataataatacaaaaattagccgggggtggtggtaggcacctgtaatcccagatactcgggaggctgaggcaggagactcacttgaacctgggaggcggaggttgcaatgagctgagatcgcgccactgtactccagcctggatgacagagcaggactccatctcaaaaagaaaggaaaagaaaagaaaaaatattaaatgtgtacgctctttgactcagctgtattacttcaaggagttgatatcaccaaaattgcctaagtgctcaaaggtgtttgtagttaaacaacaggagattgataaattatgttatatacatgtgatgctatgttttaaagaggtactgatatgataaaagatgtacgtggcataaaattaaatgtactttattaagtacttttccaagtgtttacggaatgagtgcatttttgaaaaaaaaaaagtgtattcgaacttttaaaaaagctttaaaagctttatacaatgaacgattgagtgattataagagctggcgggggaatgttaagaggatgatagggagctaagtttaacagaacaattcacctctttatcttgtgacacctacgagcgcatcaattctgtaattgaaaaataaagtgcatatttgcagcagctgtactctcttcaggctgcaaggaggcttttcctcccggtaggcttgatttgcatttcactttcactttcgtggctggaaactttctacccacgtagtgggaggctgaggagccaccataaagctggggcttgacgagccgggaccgggacccgatctccacatatgcccggacttgttctgcggccgggttcaggagtcaaagaggcggggagacctgcgcgacgctgccccgccctgcgcccgcttcctccaatgtatgctctagggggcgggcctcgcggggagcatggacacgattggccctaaagtcttccccgcaaggccgtgggctggacagcgtggtgacgtcgcaacgcggcgcagggtgagagcgcgcgcttgcggacgcggcggcattaaacggttgcaggcgtagcagagtggtcgttgtctttctaggtctcagccggtcgtcgcgacgttcgcccgctcgctctgaggctcctgaagccgaaaccagctagactttcctccttcccgcctgcctgtagcggcgttgttgccactccgccaccatgttcgaggcgcgcctggtccagggctccatcctcaagaaggtgttggaggcactcaaggacctcatcaacgaggcctgctgggatattagctccagcggtgtaaacctgcagagcatggactcgtcccacgtctctttggtgcagctcaccctgcggtctgagggcttcgacacctaccgctgcgaccgcaacctggccatgggcgtgaacctcaccaggtgagcctcgcggccccgggaagccggccccggcccgcctgcacctccggtgcttggcgggagcgctttcgagcctagccctcattggctggcgtgggccatccgcgccttctcattggcctgccacgcagtggggtggggcccagctgagcgcgcggttcggaaaagcccgcgctggctgctgcgcgaacctgctttttcgcgccaaagtcacaaagcgggtggtggcgggaaaatcaagggtttttccgcagtgccaggaacactgttccagggctctttgctcactaaatcctgttggccttgaatggacgctttagctgtggctttcttgtttctgagacggtctcggtgtgttgcccgggctggtctccaacttctgggctcaagcgatcctcccggctcagtcgcggttgactttaaatgctttataatgcccttgcgagaaatgtggcagcctgtcatcctacttagtggcaggagattgtttctatccagaagggacactgctggtggtattttagtataaatactgccagatgcgtcccaaaacgtctgcattaataatggcatcctccagcagtccgcttaccctccaccagttctgagacggcctgatgggtgagagtggtaaccccttctaaccgcgttcgaaatacagcccttcagcagacggcgttgattttaaagcatgtgtctcctgtcttctagtatgtccaaaatactaaaatgcgccggcaatgaagatatcattacactaagggccgaagataacgcggataccttggcgctagtatttgaagcaccaagtaagtcgtacctttttaccgagtcacgaagctacagaaaatcaaaactctgtgtcagtatttctcaaaagcatctgctttcttttggtagaccaggagaaagtttcagactatgaaatgaagttgatggatttagatgttgaacaacttggaattccagtgagtatcagtttctcattgtagagagtgctgtacacaggcacgatagttatgtcatagaatgtttgtttatttttacagacagggtcttggctctgttgcccaggctggagtgcagtagtgccatatagctctctctaacctgggattcctgggctcaagcagtcctcttgccttagtctcctaagtggctaggaaggactacgggcctgtcccaccacacctggctaattttttcatttttgtgtgtgggcgtgggggcagtcttgcccaggctggtctggaactcctggcctcaagtgatcctcctccgtcaagatatgttaatataatttaagcctacttcataacaactttttctagaaatatatctactggtgcatgtttcaaagagagattttagtatttggatagttgttcaccacaagtctaaaactcacaggttaaatttattgtttactgccagttgtctatttgcattaacttccatgaacctcttttaaaatttgtttccttctagaatgcttgctttttattaagtggattttaaagctgacttggaagaaatttatccaggttaggtttataaacaccaaaggagagaagaaatgtttgaatgttgaaaatgcctaatatattctcttgctttcttttagaaagtagttaggcctgcttgcgccatcatgatttctgtgccatactctaatgttctcttactttatccctggaggatgaggaggaggaggctcttgttccctggatggtgcatttaatagccatttatttttttgagtggagtttgttaagaaattacgcaagtcatattttaaagtaatcagaaaatattgattctgagttgtttaggtgttgccttttaagaaagtgagggtgccaaatcattaaatttctaacaattaacttttggaaaatttttgttcttaataggaacaggagtacagctgtgtagtaaagatgccttctggtgaatttgcacgtatatgccgagatctcagccatattggagatgctgttgtaatttcctgtgcaaaagacggagtgaaattttctgcaagtggagaacttggaaatggaaacattaaattgtcacagacaagtaatgtcgataaagaggaggaagctgtaagtagtttttaagtaaaaagaaaatagtttgaagagaattataatactgcttattaggttaattgctaaaattaaaagtagacagaattggatcccaagtaatttctgaaaattgagatactgttgaaatctgcgaatgatttataagtgtcatccaatttagaattatatttgcaagaagggaatacaaattcagcacgtgtacataccacagaacagtggtttatggatcaagtccacaccggctcttaagggtaggattgggaagttaggcgtataacctttagctttctggagatacttactctcttaccaaataattgagcataggacagcagctcaatagaaggatatggttaggagtaaaagtctacctgtttggagcacttatgtaatcctaatattagcttacatgttgtgggtccaattggtagcccattttaaaggtggagaagcaggctgagcaaccttaagtgacaatttagccaaagtcacaggctgtaggaatcaaaggttaaacaggaaggagacttctcactaaggctagaaagcagactccatgcaactttgagagtacctagagagcccttgtttaaccaaaatagaaagaacatggcaaaaccccatctctactaaaaatataaaaattagccgggtgtggtggcgcacacctgtaatcccagctacttggaatgctgagatgggagaatgacttgaaccgaggaggcggaggttgcagtgagcccagatcatgccactcccctccagcctgggtgacagagcaagattccatcttaaacaaacaaaaaaaactcgctaacctgggcataaattaaaactttgtaaatcaaggacaaaggtcctaacctcataaccttgttaggattaaatacggtagcattaaagagcttagcatatgctgtgtgtggcatattataagcttacaataaatactatatattgctctcttgtcccttgaatgggtagtcaacatttagtttaaataaaggtaaaattcagttgaaaggtttttttttaaattaataaagtctaggagctgattctttatctgtttcctgaatcacatttccactcctgccaacctcgtttttttctttttctgtttttctttgtttttgagacagggtcttgctctgtccacccaggctggagtgcggtggtgcagtcggttcactacagcctcaaactccagggcttaagtgatcctcctgcctcagtttcccaagtagccgggactacaggtgtgtgccaacacacctagcctggtttcccctaatttcattttcccccttccattacaatctatttgttgaagaaattagatcatttattaagttttccagagtttggattttgctgattgcattcctgtgtatacataaattcctctaccctgtgtgtcctacagactggtagctatagccctggagccttgatattcagggtgttttgtttcgggggtgagagagcaagaatataggtggtggtgtgtgcctctagtaggaggcacagggtgtctggatgtgtttgcaatgttagcagctataatagtcattgtctagatccattaagtcattaattagagtttgcagagctgaaattaatacgttttattcacttattggctgcttattagaaaaacttccataaagaaaagctttcccatattatataatttggttatctaaattatagctataggaaagacaagctagataatcgagtcttttgctttatgtatcagtcttcaaaattttcatagctccctccaaagtgaccaatacaagtgtttgtgggtttttataaatatataatgagctaatagattgcaactttcttgatgtttttcaatgatgaatcttttgttttgtaggttaccatagagatgaatgaaccagttcaactaacttttgcactgaggtacctgaacttctttacaaaagccactccactctcttcaacggtgacactcagtatgtctgcagatgtaccccttggtaagataataaatttgaaccttgttttgtaggtagtcatatgtgatacatactcctcagtaattaaccatcttcctgtctttcagttgtagagtataaaattgcggatatgggacacttaaaatactacttggctcccaagatcgaggatgaagaaggatcttaggcattcttaaaattcaagaaaataaaactaagctctttgagaactgcttctaagatgccagcatatactgaagtcttttctgtcaccaaatttgtacctctaagtacatatgtagatattgttttctgtaaataacctatttttttctctattctctgcaatttgtttaaagaataaagtccaaagtcagatctggtctagttaacctagaagtatttttgtctcttagaaatacttgtgatttttataatacaaaagggtcttgactctaaatgcagttttaagaattgtttttgaatttaaataaagttacttgaatttcaaacatc

SEQ ID NO: 282 - DNA, 13249 bp, Homo sapiens
  source 1..13249: mol_type = other DNA
acttccggcgcactgatcccgcctggggccggctgagtggcacttaagcgggccatgccatgcaaccttgggcgctgccaaccgtgggcgagctctgggtgtgcgggcggcctggcgcggcgctccggtaaggcgtgtgtgcggcagggcggggacagaaccgtcctctcgggctctgggcgtgtccgagaccgcgctccccgccgaaatcaagctccgagtcatccgtgtggggcattcgtcccccctggcacagttggcctctttccagaagcccgttttgtttgttttacgtctaaattcgcgtcggttcttatttctctccctggcaaggtctgaagacgggtaggagaataacgtatgtagaggcgcgtaatgccaggcactgtgtgccaaacgttttatgatgcttttagaactctcgtaacattcaggtgctgagggagtttgggggtagcggtgagctggtaaaaagcctgttggcaacgaagactgatactttgaaaatgctcgtttttatttttcccgtcttttagaatcctctttgccaagagtaaacattcgtctcccctctccctcacgcccctgcgatgtattgttttgatgcggatgtatgaacagttaatgtcaggggacgtactttaaaaaaaagtctaattgcaagttagatgtggttaaatgccctcaaaaaccacacatactggtagtttgaactttgttttatagaattaaatgcagccgggatcacaacactaaaaacctactatttgacacagtttgatccaatcttttttgaaaagtatagagattaacattatgctaatttttaaatacttgatttctagaccaggatgtaatcaataaaaacggatattaatatttagcaccaattatttaattatgctagttattttacattgactgcaagccacgtaaaacagttaggccgggcgcgctggctcacgcctgtaatcccagcactttgggaggccgaggcggacggatcaaaaggtcaggagtttgagaccagcctggccaatatggtgaagcccgtctctactaaaaatagaaaaattagccgggcgtggtagcaggctcctgtagtcccagccacttgggaggcagatgcaggagaatcgtttgaaccctggaggcggaggttgcagtgagctgagatcgggtccctaaactctagcctgggtgacagagcgagactccgtctcaaaaaaaagaaaacaccaaaaaaaaagaaaaacaatttgttattttttggaattaggtatgtacaaagtacttagaacagctggcatctaacaaagactaggtaagtactaaccaccattattgtgatgatgataatgatgaattttaaaaatgccatcccagagaaaaactagtcctttttttatgttgcccttatgcccttattgaaatactgaattttttttttttttttttttttttttttttttttttttttagatggagtctagttctgtcgcccaggctggagcccagtggtgtgatctcagctcactgcaatctccacctcctggcttcaagcgattcttctgcttcagcctcccgagtaggtgggactacaggcacccaccaccatgcccggctaatttttgtatttctagtagagacagggtttccccatattggccaggctggtctcgaactcctgaccttgtgatccatctgccttggcctcccaaagtgctaggattacaggtgtgagccactgcgcctggtcagttttgtcttttttaaagatatgtttttgaatttagaatttaaaaaccctgactaaaatatatttacccattttgatcatatagctttgttactttatggaggaaaagtggacaaattaaaaaaaaaattttctttttttttttttgactcagggtctcattctgtcgcccaggctggagtgcagtggtgcagtctcggctcactgtaacctccgtctcccaggctcaagctattctcgtgcctcagccttccaaatagctgggattacaggtgtgtgccactgcacctggctaatttttgtagttttagtagaaatggggtttcaccatgttggccaagctggtctcgaattcctgacctcaggtaacccacccacctcagcctcccaaagttctgggattacaggcgtgagctatcacgcccggcctattaatacaaatggtcttaatttaaatgttatgatttttcaaacttacccactgtctcttaaactagtgacataatagccatgatttcattactgctgtctgctttgaatattttgaacaagaagccaggttgttattccatttttttctttctttctttaaaattttttgtaagatattataccatattccgtttcttaaggttggtacagaagtaattaggaaaatgaaatcactactttcagtgcttgggatgggacagagaggtgggcgcttctggaggcactagtatagccaggcctgtatccaaatttacaaggggcccggcacagtggcctgtaatcccagcactttggaaggctgagttgggcagaacacttgaggtcagaagttcgagaccagcctggccaacgtggtaaaaccccatctctactaaaaatgcaaaaattagccaggcgtggtggcacacgcctgtaatcccagctactcaggaggctgaggcaggaggattgcttgaacccaggaggcagaggcagcagtgaatggagattgcgccactgcactccatcctggacagcaaagtgagactatcgcaaagaaaaaaaaaaaaactgagttcaagaccagcccggccaccatggtgaaaaccagttcgttacttaaaaaatacaaaaattaactaggcatggtggtgcatggctataatcccaactactcgggaggctgaggcaggagaatcgtttgaacctgggaggcggtggttgtagtgagctgagatcaacccactgcactctagcctgtgtgacaaagcaagacaccgtctccaaaaaatacaaacaaacaacaacaacaaaaaaaccccacaaatttacggcaagaaactttacagatcttttgcattaaaaggttgatctctatcaaggggaaataggcaaaatgctgatgtgagtgtattccattctctgccctcttctccctccctgtcaaacaagagaatcatttgagtatatgctcctcttgctttttcttaagagcgggagcaggggacaggcaatgctgtggtgtcaggtggacctagatttaagtccccattattctacctagtctctatgtgactttggaaaaattaaaagtcagggaatcttggtggcaaaataaactggaatgtgattcttggtgagtgtcttcactgtcattctacaaggacagaccagactagatatttaatacatagtgagaatcttttcactgtgtcagaggcatatctggttttccatatgcatatgcctctgacacaatgaaaatttagcagtgaagtgtaaattgcccattgctagtctgacatggcagcccagaactccagtgcacagcatctaataatcctgaactcattggctataatgcaccattgtcatctacagacaataacgggttttttgtttttaaactgtagctgtgtcagcgtgttatgatgccgtcccgtaccaacctggctactggaatccccagtagtaaagtgaaatattcaaggctctccagcacagacgatggctacattgaccttcaggtaaatgcagaagagaactgacaagactgactggctgtgtttctgttaagttagcaggaagaccttccagatggagattttgctaactgtccttggggattagaaggagcaacaagaagaaaactcagctctgagaccctttcagccataatcgcagaagagggccgtggcagggtagtttcaaaccaattccagtattgtccatttctaagaatttttagttgtaatgcgagagccttgtagttacaggttttatttactttattcagaaactaatcagattgtgttttgttaagtggagttttttgttgttgtttctttttttaaggaactttaaaatttttgttaggtggaattttttttatcactgtttatttacactttagtcaaagcccgttcaccttttaagggagaaacttattactaaagccagcagattgtgggaatcttccttctttcctgatgtcatgagatccaatttattaaaggtattctttgtgataaatagtaagtaaaacacagtatttattaagtttgtatcctaccctaaccatttataaactagtcaatactacagcatctccttttgcacacttccccttacaatagaatgttctacgtggaactagggccaacgaggaagtagcaggaaaccatcctttataaataaataaattactctttggacccacatttgaaggagagataaaaatagatctggaaagatctgggaagcttccagccacttaggtcagatacaacgatgagccaaaccttggaaaatttgtctctgaatcttaaccttgaattgaatttgttcataaggcaggtttacttgctatgtggaacaaacaactaatcatttggaataagctgaaattgccttcttttccttttttttttttttttttggagacggagttttagtcttgtttcccaggctggagtgcagtggcacaacctcggctcactgcaacctctgcctcccaggttcaagcgattctcctgcctcagcctcccaagtagctgggattacgggcatgcgccaccacgcccagctaattttgtatttttagtagagacagtgtttctccatgttggtcaggctggtcttgaactcctgacctcaggtgatcatcctgcctcggcctcgcaaagtgctgggattataggcgtgagccaccttgcccagcctcttgttttgttttgttttgtttttaagatgtagtcttgctctgttgcccaggctggactgcagtggtgcaatcctggctcactgcaacctccccctcctggttcaagtgattcttgtacctcagcctccctagtagctgggggattacaggcatgcaccaccatgcctggccaattttcgtatttttagtatagatggggtttcgccatgttggccaggctggtctcgaactcttaacctccagtgattcacccacttcggcctcccaaagcgctggaattacaggcgtgagtcaccgcgcccagccttttttttttttttttgagacagggtcttgctcttttgcccaggcttgggtacagtggcacaatcaagactcactgtaaccttgaccttctgggctcaagtagtcttttcacctcagcctcctgaatagctgggaccacaagcatgtgccaccacacccagctaattttaaaattttttgtagagacaggatctcttaaatccccataagttagtacagccatctatgtgccaggcagttaataaatatatatctaacaaatgaatgactgtaaagtcatttctgtttttgttttaaagaaaagtttcttatgatacaatgaatgatttatggaatgagattcgaactagagtgaatgacattcctctgagattcctttgagtaactgtgagagcaataactagagcttcatctcttgccagtcccttttatttctcagagctgcactgggtggtaggacatacttaagacacataaagtatctagtttggttcttaattaccctcctgtttttgctgttgttgtatttgaaacaggctctggctctgtcacccaggctggagtgcagtggtgcaatctcagctcgctgcctcttcacctcctgggctcaagccatcctcccagcttagcgtcccaagtagccgggactgcaggcacatgccaccacgcccggctaatttttgtattttttgtagagacgaggtttcaccatgttgctcaggctggtctcaaactcctgaactcaagtgatccgcctgcctcagcctcccacattgctgggattacaggtgcgagctctcctccctgttttaaagtgtttgagactgggcttgatggcttatacctgtaatcccagcactttgggaggcagaggtggaaggactcccttgagcccaggagttggagaccaccctgggcaacatagtgagacctcgtctctacagaaaaatttaaaaattagctgggcatggtgacgtatacttgtagtcccagctacttgagaggatgaggcaagagaattgcttgagcccaggagttcgaggctgcaatgagctgtaattgcaccactgcactccagcctgggtgatagagcaagactccgtctctaaaatcataaaaattaggccgggcgcggtggctcacgcctgtaatgccagcactttgggaggccgaggcgggcggatcacctgaggtcaggagttcaagcccagccaggtcaacaaggtgaaaccctgtctctactaaaaataccaaaaaaattagctgggtgtagtggcgggcacctgtaaccccagctgctcaggaggctgagacaggagaatcacttgaatccaggaggcagaggttgcagtgagccaagatcacgccattgctctctagcctgggcaacaagaacgaaactccatctcaaaacaaacaaacaaaaacataaaaattacaaataattaattaaatgtttgaacccaggtatttgcattaatgttcttcgttgtctttttcatctctatttctcttccagtttaagaaaacccctcctaagatcccttataaggccatcgcacttgccactgtgctgtttttgattggcgcctttctcattattataggctccctcctgctgtcaggctacatcagcaaaggggtaagctgacgggcatgtgggaataagttgtgagatttttaaaatgttagccaaggctctagtgtgcgtgtgtgtgtgtgtgtgtgtgtgtgtgtgtgtgtgtgtgtgtttgtccgtcccagtggtctgttttttttgagacagggtcttgctctgtcatccaagctagagtgcagtggcacaacctttacctccctgggctcaagcgatcctctcacctcagcctcccgagtagctgggactacacgtgtgtgccaccacacccagctaattttattttttatttacttatttttgtttgttttattttgtgtagagacagggtttcactatgttgcccaggctgatctctaactcctgaggtcaagcagtctgcctgcctcagccttccaaagtgctgggattgcaggtgtgaaccattgcccctggccaattttttttccaatttttatgggtacatagtaggtgtatatacttaggggatacatgaggtattttgatacagccatgcattcataataatcacatcaggctaaatggggtatccatcccctcaagcattcatcatttgtattacattccaattatacttttatttatttatttattttgagacagagtcaggctggagtgcagtggcataatatcggctaactgcaacctccgcctcccaggttcatgctattcttgtgcctcagcctcccgagtagctggaattacagacgtgcgccaccgcacccggctaatgttggtatttttagtagagatggggtttcgccatgttgcccaggctggcctcccaaagtgttgggattacaggcatgaaccactgtgcctggcctatttttagttatatatatacatatacacatacatacatacatacatatatatatattttggagacagagtcttgttctgtcacccaggctggagtgcagtggcaggatctcagctcactgcaaactccggctcgtgggttcaagtgattctcctgcctcagcctcctgagttagctgggactatggtggcaagccagcacacttggcttatttttgtatttttagtagagatgggtttttgccatgttggccaggctggtcatgaactcctgacctcaagcggcctgcccgcgtgggcctcctaaagtgctgggattacaggcgtgagctaccacgtccagccttagttattatatttttaaatgtacaataaattattctctagtcactttgtgctatcaaatactagagcttattcattctatgtaactatattttgtacccgttaaccttccccattcccccctacctttcccagcctttggtaaccatcattctacaatatccatgagttcaattgttttaatttttagttcccgcaaatgagtgagaacatggaaagtgtgtctttctgtgcctggcttaatttcacttaacataacgttctccagtttcatccatgttgttgcaagtgacaggatctcattctttttagtggctgaatagtactccattgcatatatgtaccatattttctttattcacttgtctgttgaagaacactttggttgcttccagatcttggctgttgtgaatagtgctgtcataaatatggaagtgcagatacctctttgataaactgatttcctttcttttgggtatatacctagctgtgattgctggatcatatggtagttctatttcatactgttctccatagtggctatactaatttacattcccatcaacattgtacgagggttcccttttctccacgtcctcgctagcattcgttattgccgttttttttggataaaagccattttggctgggtgcagtggctcacgcctgtagtcccagcacttttggaggccgaggcaggaggatcacttgagcccaggagttcgagaccagcctgcgcaacatagcgagaccttgtgtctatattttttaaaaagccattttaactaggatgagatgatatctcattgtagtcttgatttgcatttctttgatcaatgatgttaagcaccttttcatatacctatttgccatttgtatgtcttcttttgagaaatgcccatttttgattggattattagattttttttcctacagagtttgagctccttatatattctggttattaattccttgtcagatggatactttgcatatattttttcccattctgtgggttgtctcttcctttgctgtacagaagctttttaaccggatgtgatctcatttatctgtttttgttttggttgcttgtgcttttgggggcattactcaagaaatctttgcccagtccagcatcctggagagtttcccccatgttttcttatagtagtttcatagttttaggtcttacatttaagtgtttaatccattctcatttgatttttgtatatgtcaagagatttgaggggtctagtttcattcttcagcatatggatatccagttttcctaataccatttattgaaaagactggttctttccccagtgtatgtttttttgttttttggtttttttgtttgtttttttttttttgagacagaatctcactgtgtcatccaggctggagtgcagtggcaccatctcggctcactgcaacctcagcctcccaaataactgggaccacaggcatgtgccaccacacttggttaatttttttttcattttttgtatagatgaggttttgccgtgttgcccaggctgatctcgaactcctagactcaagcagtccaggagtacagtggtgtgatcacagctctctgcaacctcaatcttcagggctcagtcgatcctcccacctcagcttcccaagtagctggagttacaggtgtgagtcaccatacctagctaatttttttgtttgtttggtagagatgagatctcattatgttgcccaggctggtcttaaactcctaggctcaagcaatcctcctgcctcagcctcccaaagtgctggaattacaggctttagccactgcacccctctgactatgtttcccgttgtgtgttaattatggtcagtgtgaggcccaccctagcctcccaaagtactgggattacaggcgtgagccaccacacccggtggatgtagaattttatcaaatgcttttctagcatcgattgaaataatcatatggtttttgtccttcattctgctgatacgattttatcacattgattggtttgtataagttgaaccatccttgcctctctgggataaatcccacttggtcctgatgaatgatctttttaatgtattgttgaattcagtttgctagtattatcctccttattgaggatttttgcatcaatgttcatcagggatattggcctatttttgttttttcgatgtgtctttgcctagttttggtatcagggtaaaactggcctagtagaatcagtttggaagtattctctccatgtctgttcagaatagtttcagtaggattagtattctttttttttttttttttttttgagacagggtctcatctgtcatgcaggtgtagtgcagtggtgcgatctcagctcactgcaacctttgcctccccggcttatgtgatcctgccacctcagcctcactagcaactgggaccacaggcatataccaccatgcccatctaatttttgtattttttgtcaagacaggattttaccatgttgaccaggctggtcttgaaatcctgagctcaagcgatctgcctgccttggcctcccaaagtgctgggattacaggagtgaaccaccatgcccagccaagtattaattctttaactggtataattcagcagcgaaaccatctagtcccaggcttctctctgctaagagactttttattatggccttaatctcattactctttgtctattcaggttttagatttttttcattgttcaatctttgtttttatattcatgtctggtacagcagattccagcagaaaaaccaaaaagattttcttttacattttgttctctgttggcaaaacatgtttttcttcctttgagcaacagtaaacttccatagttcctataggggaggtggtggcaggtaggcaaacttggcctctgagatattagacagtttgccctgtcatagtttggaacaacatggctgagcctggcatacaggagtcctgattggtaaagggctgtagctggagcagcatgctgtcattgtagctgtgcagtgccatggacatactgtcagtatttggagagaaatagcaattctgttatatgtgtggggtcactgtgcctcgtaagtcagttccttcttacagtaggtttggttggagttcctgttgagcttcaatatgaaaccttagaaacctaaagtagttggtggttctttctcatgggctgtccccacatacacagtgtccaagttgtcttgaaccaattctgactataattaacacacaacagggaacacagccagccaggtgcagtggctcaagcctataattctagcattttgggaggctgaggcaggaggattgcttgagccccagagttcgagaccagcctgggcaacatagcgagacctcatctctaccaaacaaacaaatgtacaaaatgagccaggtatggtgactgacacctgtaactccagctacttggaggctgaggtgggaggatcacttgagcctgggaagtcgaggttgcagtgagctgtaatcacaccactgtactccagcccgagcaacagagcaagactcttacctcaaaaaaaaagaaaaaagagaaagaaaagaaaacctgaaaggctgagaaaaacacagagtttattgtagtggtatctgtacaattacaaaaggtgaaaaacaaccaaagtgtccagcagctgtatgtggggcagttaggtaaaactgtagtatgtccatttcggtggaatgttacacatccttacagtttaaatgtatgaaaaggttttaataatattggccacaggacacagagtatggtgtgttcacaactaagagctttaaaaaaaggaaaagaagccaaaatatctggatgagaatgggtcatttttttctttataattgttaatattttgtagtttgtcttcaatttataatcaggaggaaaccttttcccttggtggtatacaactcaaagaaaaagtactgaagagtataaaatactgatctaaggattaggtctgtgacgttttattttaaaatgtgtaactcttacggtactaatgtgtttgcctccttctgccaccagggggcagaccgggccgttccagtgctgatcattggcattctggtgttcctacccggattttaccacctgcgcatcgcttactatgcatccaaaggctaccgtggttactcctatgatgacattccagactttgatgactagcacccaccccatagctgaggaggagtcacagtggaactgtcccagctttaagatatctagcagaaactatagctgaggactaaggaattctgcagcttgcagatgtttaagaaaataatggccagattttttgggtccttcccaaagatgttaagtgaacctacagttagctaattaggacaagctctatttttcatccctgggccctgacaagtttttccacaggaatatgtatcatggaagaatagaggttattctgtaatggaaaagtgttgcctgccaccaccctctgtagagctgagcatttcttttaaatagtcttcattgccaatttgttcttgtagcaaatggaacaatgtggtatggctaatttcttattattaagtaatttattttaaaaatatctgagtatattatcctgtacacttatccctaccttcatgttccagtggaagaccttagtaaaatcaaagatcagtgagttcatctgtaatattttttttacttgctttcttactgacagcaaccaggaatttttttatcctgcagagcaagttttcaaaatgtaaatacttcctctgtttaacagtccttggaccattctgatccagttcaccagtaggttggacagcatataatttgcatcattttgtcccttgtaaatcaagatgttctgcagattattcctttaacggccggacttttggctgtttcctaatgaaacatgtagtggttattatttagagtttatagccgtattgctagcaccttgtagtatgtcatcattctgctcatgattccaaggatcagcctggatgcctagaggactagatcaccttagtttgattctattttttagcttgcaaaaagtgacttatattccaaagaaattaaaatgttgaaatccaaatcctagaaataaaatgagttaacttcaaacatttcagaaaac

SEQ ID NO: 283 - DNA, 32746 bp, Homo sapiens
  source 1..32746: mol_type = other DNA
tttgagcggaagttggatcactgaagcgccaaaaaagaatttaggggaagacctgattttcgcttgaggcatttttgcggcgctgtgcgctacagacaccttctggaagctgcggtggggaaactgagtttcccgagccgttgagacagatggggttcagcaccgcgcggggacgacaggaaagctgcggctgaagagaactgcggacttggcaggagtcgcctgaggagctaagatcccggagactcttagccccgtggtgcttctctacgggagggagggagggagaatccggccggacagatctgcgcgtatcctggagccggcccagttgtgaactaggagagctttgggacctctgtcccaagcaagtaagaactttagccttaggagatgtaaataaagtagtatttgaagaagcacaggtacccaactgtttctttttactctttctccagtcctacttcttaacgtttttttgaatttgttactgttctcagcatattgtctcgtttgagaagggtatggcacgcagcgttgttgaaggagcgcctcagcttgggaggctgaaagttttatctctgtactgtcgacaaacaactttgatcttgatcggtttgcttaatttctttgagcatcagtttcataatgtgtaatgcctaattattggagccctgtcatgccgttaaatcgtgaactttctagttactatcttgttttattaactaaaccccttttaagtaaggatttgggtagagtatttgataatgaattgcactgcagcgtacaggtatatctttatttacttgtatacttaggatatgaatcatttttaagtagacgtgtattttataagaacagttttggatttacagaaaaactgcacaaaaaatggatgtgacactgcaggattgactgtatgtaagaagctatgatgatgtatccctagtgtctcacaggccagaattatgttcatcctgtcctgccctataataagaagtctcaaatactgcaaataagttttcatagagttaattacctgtcctattttcatttctgtaatggggacttgtaaacaggtacagtacctgtccttatttttaacctgtgagcgtctagtatacgtaaaccatatttaatagttattaaactattatggtataccttaaaaagcgatagagattagaaacttaactgcagaatatttgggtcttgtatcatagctgtacaactttgcaagcctgtttgctactcttgaacctagaatacattaatttttccctttttattaatacatttttaagagcactattttccttacagttttggtgaagacctttttaatatctatcttttaggagagatgaatggagagtatagaggcagaggatttggacgaggaagatttcaaagctggaaaaggggaagaggtggtgggaacttctcaggaaaatggagagaaagagaacacagacctgatctgagtaaaaccacaggaaaacgtacttctggtaggtgaggtcaatgattgttcaatttttttcacttaaggaagcaattcacgtctatcatacaaggcggtttatctcatacttcagtttgtcttttatttcatgctactccttagtaagtatttgaacattgatgtcccagatttttactaaaacccctaatttggatactctattaatgagagtctcatttggaaagagaagcatattggaaaaatgttcactctgtttctactaacctagtattttatttttttcagaacaaaccccacagtttttgctttcaacaaagaccccacagtcaatgcagtcaacattggatcgattcataccatataaaggctggaagctttatttctctgaaggtagggtttaaaaagtacaaaaaagcaccataaatcatattttcttaacttgtctttggatgctacatcttgtattactgtaattcatttactaacatatacctgctttaatcttagttcacccaaacaattaaatgatgtttatgtttcaaaagcattttagactttatatcagtcaggaaagcagaaaccatactaggtatttcaaaaaggggacttaatacaagaaattggatacaaaaatggaagactgaaagagcagaaaggaaatattgaggtaactccccagaaagtagtaattcaggaagcagcaaccatccttatggctaagagactaaaagaagttctgaggttaccagaatgtgggaattcaaaggttggagaggtcacagcatagctgttattttgacttttgaggggcaccctacaaagctatgcttggacttctgaaggctaccttacagagctgtgcttagaccactaaggcaaatgaagctggttgccactggtaactgagggggcatgactcagtggtgcttggaactggaggctagcactatcgttatcttctgcagctgcagagatgctgaaaagagttggaaacaagaataaattcctttctcttcctgccaccttcccgtctctaaagtgccttcaattggcagaatttaaagagaatctgagacatgtagggtacagatctgaattatagcatcgcagagcaggaagtagaacagtgggcctgaaatcaagggacaataacaaatacagctttgtgtagaaacacaggtaaggaatctccctttgataattaggaataccaattaacctacatcagtctgtataggtgcagggaactgtcttttttgtgctgttaaaatacccatttgtttcttatgtctcatgaggggtgtgtgtgtgtgtgtgtgtgtgtgtgtgtgtgcatactttttatttttttttgagatggagtcttgctctgttgcccaggctgaagtgcagtggcgcgatcttggctcactgcaagctctgcctcccaggttcacgccattctcctgcctcagcctcccgagtagctgggactacaggcacccgccaccacgcccggctaattttttctgtttttagtagagacggggtttcaccgtgttagctaggatggtcttgatctcctgacctcgttatccgcccgcctcggcctcccaaagtgctaggattccagacgtgagccaccgcacccagccgcatactttttttttttaggaaaactagacgtttgaggtccaggaccctccctgccccataccaggcatgcagtagtcattttgtgaatgaatagagtactttacaaatgttttctttattggaaatctgttcgtttttttccatcaatagaatctgtttcatgaatgatcttttgttcctttaggatgtattagccaccagcactcccattgctcccctagcagatagctcagaacactataagtgatctttggacagtcctaaagatggagttcaagaggtgccttagccttcaccatctgtgcttccaaactactttattgtactgttcttctgtgagagacatatttgaaaatgtagaactttagagtgttaaaaaaaaaaaggcttttcagttttgccaccagggtcaagtgttggtctgtctcctgatctcaggaaagactgtgattgtgattgtcttcagctctgtcagagtaagagcttagtttatgtgtctggctttggctttattataatttttagtttaagcttattgtctaaattatctgaactaacatgtcctattaggtgtcaaagatgcaaaacaaagtttcccagatagtggggcttttagagagagagagtttctgtctgcatttcacattatgcaaacctaaatttgttttagaatcttaagtttacattctatactagttcttatatgaatgtaatcaaaatacaaagcaattagaaaaaaatcatctaccatgtatatagtgctgcttttgtctcatgaaaaatgtgcatgtacctgtgtgattatttgtgctaatgccatatttgttggattagtttacagcgatagctctcctttgattgagaagattcaagcatttgaaaaatttttcacaaggcatattgatttgtatgacaaggtaagattcctctacagcaaagctaccagtcatgtgccatcttaccaatgtattcgaggtacttgtgattatgatcgtaggcactggagtcagacttccttggttcagacctcagttctgccacttacctgcagtatggactttgattaattacttctctgtgcctcagttttctttcatttggagatagaggtataaatacctacctcaaaggattgttaagaggcagtaatacattaatatatttaaaatatcagaaccatgcttggcacaaagcttatacttatgtcatacttaccattatcacatataaacattgtatgctttctcaaagtctataatagaatgctcagttaatggtaattgactacagaaaagcaattattgttttcatacttttatattttataggatgaaatagaaagaaagggaagtattttggtagattttaaagaactgacagaaggtggtgaagtaactaacttgataccagatatagcaactgaactaagagatgcacctgagaaaaccttggcttgcatgggtttggcaatacatcaggtaactatttgtcttatgcatacttttgtctaaacttttttaatgtttgcacacacatgcacaccttgtctaagtttaaaggaagattttacagtgactgtactttctataagagatacttagcttttacgaaaagatgttggctagaactgagaggttgcagttccgttctgaaagataccattcattctatatacaacagcttatctaaatgaaatatttacctccaacttatttggatttgcttaatcttgctaaagattgtgcagaaattaaactttgctttcaagaagttatacaatctcatagggaagataaaacaaggaatcatggtgttatcggttatgaacttagagcaaaaaagagcaaccttagatttaggttctgtggcatgaagcaaaccactgagtgtccctgtatatcaaatgtaaataacagtttgtactgtgcttgcctgagttttttttcagggtcaggtaatacaacatatatgaaaacatttttaactttttaaattttttaaatttattttttatttatttttttgagatggagtttcactttgttgccaggctggagtgcagtgtcatgatctccgctcactgcaacctctgcctcccgggttcaagtgattctcttgcctcagcctcccgagtggctgggtgcaccaccatgcccagctaagttttggagttttagtagagacggggtttcacgatgttggccaggatggtcttgatctcttgatcttgtgatccgcctgccttggcttcctaaagtgctaggattacaggcatgagccaccttgcccggccaaaaacattttttaggctagcaaacagatacatgcttcaaggtaatgaatagcaaatctcaggacaggcatacacaaagtgctggggcattcagaggggcattcttctacctcttgcctgtgctgtccattcaacatagaatccccttcccttcacatggacagattatttgggcctagctcagttgtctgtctgtaaaacctttctcatgaccacttttcgaaacttgcatggtattttgtctgtacatctttatggtccttatgacaattacagctgtatatatgcatcttattttgcctcttaggttgccagcaaactgctgtgtacaagtggtattaaatgtttgtttgttgtttatttatttatttattttgaaatggagttttgctcttgttgcccaggctggagtgcaatggtgtgatcttgcctcattgcagcctcagcctcccaagtagctgggattataggcatgcactgccacacttggctaatttttgtatttttagtagagatggggtttcaccatgttggtcgggctggtctcaaactcctgacctcaggggatccacccactttggcctcccaaagtgctgggataacaggtgtgagccactgcgcccagcgtgtttatattatttaatgttaaatgccaagggagtgagtattaggtattttaaaggtcatttttattttctgtgtcttgattggtcagtgaatatagagaaataggaatgcatttttttttttttaattagtatcaagaggtgatggttttggggactaatgtaagggcttttaatgttaggtttagttgggacagaaagtagcagactgggatgctggagtttttcagcacagggacagcaaaatccaatgtaaaacatccactataaagtaagtagtcataattaaatattagatatttaaagggctgttaaagttttctgtttttattctgtttctgtccataaactttatattctctataaaaatagagttctgtataaagaggatgttttgttttccaacttcagagtaaatgtctgtcctgtttaggtgttaactaaggaccttgaaaggcatgcagctgagttacaagcccaggaaggattgtctaatgatggagaaacaatggtaaatgtgccacatattcatgcaaggtgaggaatttgatgtattaaagtattacttagaatgggacattgaaggccatttaagaatgaaaacgctcattttataaaaatgaggaaatcagtaaaaaggacatgagttccttgccatctcattgatcatcacactgaaataaactcattgaaaattattcaaagacatcatgacagatacttcctaaataaggaagaaaatgttgatttcctaacctgcagatttttgtaaacattggttttggatgtgaacttatcaagaccctgctgtgtaagtttaataatccatgtatgggttgagtatccctaatctgaaaatctgaaatctgaaatgctccaaaattcaaaactttgagccctgacacgacactgaaaggaaatgttcattggagcacttcagatttttgaattagagatactcaactagtaatattgcaaatatttggaagtccaaaaattccaaaatacttctggtcccaggcattttggataagggatatactcagtctgtaatacactaagtgttctttgttaaattattaggtttttgttagatacaagggaataatgaaattattttgtttttcttgaattcatctttaagattttaaattcattagaagaattcattataaggtaatcatcagcattttgtttttcttttccagaatttatagaagaaaatttcctagcagttctttaaaaagaacttagaaacccaaaggtttttgaatctgtagattttccttttggcattatttttttccttaaatttcttttttcttttttccttgagaacagcctgtgagacaagaagaaaaaggaagatttagtgttgtttcttgttaagaatggtttggctgggcacggtggctcatgcctgtaatcccagcactgggagtccgaggcaggcggatcacgaggtcaagcgatcgagaccatcctggccaacatggtgaaaccctgtctctactaaaaatacaaaaattagctgggtgtggtggcacacacctgtagtcccagctactcgggagactgaggcaggagaatcacttgaacccgggaggcagtggttgcagtgagccaagatggcacccctgcactccagcctggcaacagagcgagactccatctcaagaaaacaaaacacaacaagaatggtttaattcttgtgatatttctgatatatcgaagggatgatttgatttgagaattccatagttgctcctaaaaggaacttgtgaaaatataaaaaacatcaattttctgttcattacttcctgttttgtctttagggtgtacaactatgagcctttgacacagctcaagaatgtcagagcaaattactatggaaaatacattgctctaagagggacagtggttcgtgtcagtaatataaagcctctttgcaccaagatggcttttctttgtgctgcatgtggagaaattcagagctttcctcttccagatggaaaatacagtcttcccacaaaggtaatacgttctttaactgcttctttatttatcttggtaaagaaggcaaatcagaatacagaaaacatttcccagtgtttctgaacacagagcttatttttattttttattttcaattttctgcttttatattatgaaatacttcagggtaagaaaaatacagaaataaataaaacattccactactcatcaccccgaatttacatttttcagctccggacacattttttaatgatataaagcattactggcacaattagtgtctgttttttacctataccattcccagggatgatcattatcctgaagttattataatatgcatcccttccattcatatttctgttgacttctaggtatacacaccaagttttttttcccctttatttcttctactatttagaagtgatgggttttttaaatctttattagcctttattaaactggattttaaaactatagaaaagtgcagagaataatgtaattaacatttatctactctatgatttggcaaatattaatattattttagcttaatttgtaacaaaaatatggttatataaagttgaagtctttctgttctcagttttattccctttatttgctccctagatgcaaccactatgctgaaattggcatgtattcttcaagtttacatttttattcttgactacatgtgtagagttagttttttgtattgtgtttacgtaaatggtatcctgaatgtaacacgcagctgtttttttatttggttattttgtagttctacctattttaatacatatcaaattctttcatttttactattgtggagtgttgctttaaataaatagccacaatttatccattttcctggaggtagacaattgtgctctttccagttttttataagaacaaatgatactgcagagaacattcttgtacatgtctccttagcagaggaatactaagttgtaggctgtacttttttttttttttttttttttttttgagacggagtctcgctctgttgcccgggctggagtgcagtggcgcgatcttggctcaccgcaacctccgcctcctgggttcaagcagttctcctgcctcagcctctcgagtagctgggactacaggcacgcgccaccatgcctggctaatttttgtatttttggtagagacaaggtttcactatgttggccaggctgttctcaaactcctgacctggtgatccgcctgcctcagcctcccagagtgctgggattggccggctgtacttatttttaactgtattagatgttaccaaattactttccagagtattgttcccaacttaaatctttgctggtagtgttaagtagttaccatttctctgtcttttcattaacacttggtattgttagacttgtacatttttgacagtttgttaggtataaataatactgcatttataatgtgaatttttctgatttctgttgtggttgagcatcttttcatatctttactggccattcagtttctttatcgaattttctatttatatctaatgttcattttcctgtttattggtttattctttaattttgttttttagagatggggtctcattctgttgcccaggctggagtgtagtgacatgatcatagctcattacaaccttgaactcctgggctcaggtgatcttcccatctcagcttcccacgtagttgggactacaggtgccagccactgtgcctggttctattagtttattgataggagttctttatacattctagatactaattattgttgattatatacattagatattttctcccagtctttggtttgtcttttaactttgtgggtttttttgttgtacagttttacattttgacatgatcaaattgttgtcttttcctccctaatttgtatattttatgccctgcttaagaagccgttcttcggctgggcttggtggctcatgcctgtaatctcagcactttgggaggccgaggcgggcagatcacctgaggtcaggagttgaagaccagcctgaccaacagggagagaccccatctctactaaaaattctaaattagccagacgtggtggcacatgcctgtaatccaagctactcgggaggctgaggccggagaatcgcttgaacccaagaggcagaggttgcagtgagccgagatcacgccattgcactccagcttgggcagtaagagcgaaactccgcctcaaaaaatacataaataaataagaagcccttttcactcaagcattataaacatatttcctacattgcttctaagaatcctaagttttgttttttatctttagatcttttgtccatctggaatttaagccattggtgaagggcataaaactagggatttaagctgggcatggtggcatatgcctgtagtcccaactactcagtagtctgaggcaggaggatcgcttgagccctggagtttgagactagcctgggcagcatagtgagacccccatctcttaaaaaaacaaactagtgatctaatttttaggtgaaaagctatttatcctgacaccatttattaattaagcccttgttaccatggatgtataatgtttcctcggtggtacccagagtcatcgttatcaccattgggctttactaaatttaacatttgctaaatttttgctcatgtgaagggttgaatccttagtgaggtaaatagtcccttgaagaattaaaaagggaaacataagatgtttatgtttgaaattcctaaggcttctttctctgactggaagaagagggtatgtgagattcagctattggttctgaataatcagtggtgttgatagatgggtttcatctggtgtttgtcttggcttaaggttcaaggtataacctttagcttagaggccagaatttaaatcctgatttaaaccagatattttcttccttttattttgaagacggggtctcactctgtcacccaggctggagtgcaggggcatgaatacagctcactgcagccttgacctccttaaatcagatattttctagacagtatttgttcagggtattttcatgccccctaataaattaggtagtagcattgactcatgtgtgatgtcgtgaagaggtcctccatttgtctgaactgtggggctttgaagtgacagaaagatggctgtttcagttgatctctattcccgccactattgttgcgtaacacatcactccaaaactcagtggccgaaaataaagccaatcattttattagttctcatgatatctgtggatcaggagtttggaagaactactcaactggctagttctggctccaggcctctcatggagttgtagtcagatggtggctggagtacagcaaggtggctgggggctggccaggcatcttcttctccatgtggctgtgtgggctagtttgggcttcttgcacacagtatagcagctcaggcactcagtctgcttatatggctgctgacaggttcaggtcaagaagtgcagttggtaggcagaaatggccttgccttttgtgagctagtctcagaagtcgtgcaacatcactgtgtcacattctgttggtaacaaagtgagtcccaggccttctcaaattccaggagaaggaattagccttcatttctttttttttttttttttttttttttttttttttgagacggagtctcgctctgtcgcccaggccggactgcggactgcagtggcgcaatctcggctcactgcaagctccgcttcccgggttcacgccattctcctgcctcagcctcccgagtagctgggactacaggcgcccgccaccgcgcccggctaattttttgtatttttagtagagacggggtttcaccttgttagccaggatggtctcgatctcccgacctcatgatccacccgcctcggcctcccaaagtgctgggattacaggcgtgagccaccgcgcccggccttcatttcttaatggaggagtagcaaggttctaaaaagtcttgaagataaatattgttgcaatcatatttggcaaatacagtctgccacagtctgaatttataaatgcttcttgagatccaaacaccaaacaagtgcctgtgtggcataataagtattacactctacagaaagtgcaaaaggagcctagatgagaaagctggggattaaagaaaactctggaaagccttttgaaaaggagaggattggcattgggcatgtgggacagaatgagagggttgttgaaggagcgagaggtggcatgggcacagaggaagcaataagtgcttcatgtgggaggcaagcaaagcaccttgcatacccatagcaggatacgaacagtaagtgagaaggatcaattggaaagtgcctcaaaagctgtcgatattaaattgttgcaggaggaaatagaaagtcattaatctctcagtggattttactttactagcatcctgagaccaacttttaaaacaatattaaatgaaatgttttaactgaattttcctgaggtgtgattatagtttatcaaaatctgaatgtgaattacttttgtttcattcagtgtcctgtgcctgtgtgtcgaggcaggtcatttactgctctccgcagctctcctctcacagttacgatggactggcagtcaatcaagtaagcgatcagactgttacataaaaggcaggctttagatgtcacactgttgagaaaatccataattttactgtattatattgtacgttttatctaaatgacaaagtgtataatagtgtataatagatggtttatttgatgaagagtttgtatgttaaaataattctttttttttttttttttttttgagacggagtcttgctctgtcacccaggctgcagtgcagtggcgcgatcttggctcactgcaagctctccctctgggttcatgccactctcctgcctcagcctcctgagtagctgggactacaggcgcccaccacaatgcctggctaatttttttgtatttttagtagaggtttagtttagaggtttcaccgtgttagccaggatggtcttgatttcctgacctcgtgatctgcccgcctcagcctcccaaagtgctgggattacaggcgtgagccaccgctcctagcctaattgtctttatttgaaatttattctctgtcagattccagaaaggattcattatgcaaatattgtgtcctaatgagaaatagttgattttatatctcaattatgtgattaattgaactggatataggccataagcaaagctgtgtgcttcattccatattgagctgtgatagaaataatattgttttgaagttttcaaataaagactccctttgaaatggcatgtttcattttatgttctcaatgttgcaatggggcattttactatagggttttttaatagctttttttttttttttttgcaagtcagagttttctttgtgtatgtgtttttcatcccataattgattacattttttctagctgtagatctatagctcatccctaaatataaaataatgaatggttttgaagtcagtgctctctagcaaacctggctgaaatgagatggtcctaagaactaagaacctagggaaaagataagatgatctgctgctaactgcttcacccccttcttccctgaaaaattaagaccaacatatataataattaattgtactatagtgagatctttacaaacaccccattttataaaagaggaaatggttaagactcttgagtatgatcgtgtggcctatgagtatggtagagcctgatttccaacctagtctgtgggacttttaccacttaagagggacaaagggttagtctggaggtagtaagttatttcagttgattattcacagtcacttacagatcaaacttcttgttctactctttcctcccttctcactactgcacttgactcatcttaaaaaagtgggtgtggggggtgaattgattgtgaagtggtgagtgatcttggagcaaggtttgaagtcgtgcaggttaggtggatgccagcgcctggcccatgacctgaaaaacattgagaggtagtctagatgtatgatgaatgtattccaaagttattattttaatgttcaatgattgtacttacattaattaagtaaaaaaagctttaataacatgtgcatgtttttaaaaattcaatcagtgtggaaaggcacagtccccacaacttgctgttacattatacataactttagataccattcttgtgtctttcatccttcgctttactgcagtcattctatgtgagctgaggacattagaaacatacttgttcttttatcttctagactttctccgttccgacattactttaaattgtcaaggtttaccttttgtcttctaattataattgtcttccagagtttatttataggtcatgtctaacaaaaacaataaacaggcatttacatttttatgttaataaaaatgcccgatatggcattccccgggataaataatatgagcttctgacttctccctccatcttttctactcctacttgcgtcttcagtggtcgaagccagtgctggaactggctggacagtttatccccccttagcaaaaaacctagcacatgcacaagcctctgtggatctgaccatcttcacgttccactgtctcttccattttaggggccattaactttattaccagaataattaacataaaacctccagctttgtcccaatatcaaacaccccttttcgtctggtaagtccttattatggcggtccttctactcctttcccttcccattttattaacataaaaatgtaaatatagctcaacaaagaaccaaatgaatgatcaaatgccaagcaaaggagctgtaatttatgtcactgggttttgttttgttggtttttaccccttaaatgaaaatgactcaagcatcaaattatcttttcttatactctgctagttatttggaattatcccacattttagtgtgcatcatatttggactgtaactttgtcatttagtactttatttttcctaaggtttctaagtgctggttttacttcttagagtatgcctgtaccatttcaccataattttccattctctcttcaatatactatggaatacatggaatccaccttttattcttaaaaaacaaaaacaaaaaaacacaccttccttctgcttgagtctggatcagtagttctccagacctgcattcctgcttcatcctgggatcttgcttcattgcattttttctaaggaatattcccaagtaaattttcagaaagtatacaggacaggtaaaaagttctaagcccttgcatgtctgaaaatgtctttatttggatcttagtctggctaagagtttgctagctattgaagtctatttggttttaattttctctgctgtttatgagaggtctggtgctcatctgattctcattcctttgaggactggacttttcctcctctttgtaaccattttatctatcatgctgtgaaacagtgaaagtgtatctagttgtctctatcctgcttgattggcaggatcttttgtcttcaactctagaatatctgactgatttctcagcttcctatcagatgcattgcttggattatttgttttaagtttttcctcattctttcattttctttgttctgttttctagatttctttggctttttcttatatcttctctataaatgcttgatttttatatacatgctttaaattttcttgattttgtacttgtttccccattgttccctttttgtagtggcttattcctgttttatcatggcaatattttctcaaaactcttaggcagtttgtttttaatactccctgaattattgccatttaattttcaaatgtctgatgaggaatgagaaagtatttgaagtaggtaggataggtttcctttgcaattttttaggtagtagttttttctcacaagactttacctctaaatacaaagataggggtttgggctatcagattttgctttatgaatgtgtttttgaattggaattgggtttctcagatggtagaatgaagagtctttattctgaagctctgatattctcactgcacagtttagctcccttcacagaggggatgggtttgtttccttagaacagtgctctggtttttgccagatgataaagtacgcattcttcccctacccacctgtccactcaccttctccaaaaattctcaacagctattccatgacttgtctttcggttgattactgttttcttccagccatctactcctgctctctattcctgccacatccaacttggaagcttctctggggctctgctaagaacgttgggtcccactttgcttgtacgcttatagcttttgcccatgtgtattctggactttattttgttttatccatcaatactttaccatttgctggtttcaaaaatttcattaatatctcatttgctgatgatacctctacatacccccaaatttttagtgactcattttggtggacattttggagggaggctaggcaaatacatatgttcatttggctatcttgaattggaaactgctgaagtaattttagatataccattaaactgttaataagcaaatctgcttttatcttcctcagcatcatgtgaaccctgaatagttaatatcttgcagaaaccatccaaagtaagtattctaactgaaaactatttaaactttttagaatccaggaattgatgtctgatgatcagagagaagcaggtcggattccacgaacaatagaatgtgagcttgttcatgatcttgtggatagctgtgtcccgggagacacagtgactattactggaattgtcaaagtctcaaatgcggaagaaggtagggtacaactcttttcattatttgtctctcaataatgattcatcaacgttcatcttttctaagatgctcctgaacctcaaataatttgaggaatttcttgttgcttacataagatgaaacattcccttttaaaaaaacatgtatttgtagctccctatgactttgttttatattctagttgagtcattgtagggaaaatgaaaataccaactattgtatttaacacttttaatttacaggttctcgaaataagaatgacaagtgtatgttccttttgtatattgaagcaaattctattagtaatagcaaaggacagaaaacaaagagttctgaggatgggtgtaagcatggaatgttgatggagttctcacttaaagacctttatgccatccaagagattcaagctgaagaaaacctgtttaaactcattgtcaagtatgtatgctgtcatttgaaattttattacataaatgcacgttgggggttctcttggctacaggtaacaaaaaactagtcaaaatggtcggcaaactacagtccatgtaccaaatacagtactccatccccttgagtatggcctatgaactaagaatggtttttatattttttaatggttgaaataaattaaaagaatatttcacaacacatgaacttatatgaaattcagatttcaactggatatggtggctcacgcctgtaatcccagcactttgggaggccgaggcaggcggatcacttgaggtcgggagttcgagaccagcctggccaacatggtgaaaccctgtctctactaaaaatacaaaaattggccgggcttggtggcgggcgcctgtaatcctagctactcgggaggctgaagtgaagaatcacttgaacccgggagatggagattgcagtgagccaagatcgtgccattgcactccagcctgggcaacaagagtgaaactctgtctttaaaaaaaaaaaaattctgatttcagtgtccataaataaagttctattggaacatagccacactcattcatttacataagtgtgctgcttttgtgctacagtggcagagttgaatagttgtgacagagaacatatatatggctcacatatttttgctttatccttttatagaaaaaatttgctgatctctagtttaaacaatacagaatatttactatcttatacaagaagtttgtcactcaacggaagagtgagggaacagtgaattccaaagccatttcaattagttctgtgtagggtgttgctcatagagattcaaatcgaattaacatatattcaaaaagtatttgataattttatttccatgctattgccatgccgtggagaagcagcaaagtataggcattttttgctttagtggttaagagcttttctttggagacaaacctaagttagactcctgctttgggcatttacttccagtgtgatctgggacatattacttaatttcccctttatttgtatcaccttaaaatggaaataataagacttacctcagaaggttgttctaaagattaagtgggattttataatgtacttaacataactactgcaacatactgttacttttgataattttttgacaactgtggggtaattttgaagaaataggagaaaatgagagagactgaataatagatatatctaagagaggtaaagaactgagaacgttttgaaatgcattgtattataaaaagtgatcttggccaggcacagtggctcaagcccgtaatcccagcactttgggaggccgaggcgggtggatcacctgaggtcaggagttcgagaccaaccggaccaatatggtgaaaccctgtctctactaaaaatagaaaaattagctgggcatgatggcaggtgcctgtaatcctagcttcctgggtggctgagacaggagaatctcttgaacctgggaggcggaggttgcagtgatctgaaatcgcgccactgcactccagcctgagcaacagagcaagactctgtctcacaaaaaaaaaaaaaaaaagtgattttgtcatgcttttctgttcagtaggctcaggtctgtaagaggatttgatgctttttctttctggctttaatatgttaattagctgactgagtaaagaatagtgctccacaggggttttttgtccttaaatcctacttccctctgaataaaagccattcagacccaccctggaagagaggctgctctaacttagcgttgctggggtggtcttggagtgagtcctttgagcaggtggccaaggaagcaacctggtcgacaatccaaacatctttggttcctcttaacagttgtaaattaaaactgaacatttttagtggtccctcttctcccatacttatagaagagtaagtatggaaaactttagttttcttcccacagtttgctttttccccctccatgtttgtgatttcagcatcaaaactagaatttttcatggtcctctattatcagtctagcagagattggcaaactaggcaggctgcctgtttttgtaagtcaaattttattaaaacacagccccacccagtttacttacattactgttcacagttgcttgcacactacaagttgaatagttgtgactgagacagtatagcctgtgaagctgaaaatactttctggccctttaagaaaaagtttgtcaacccagcctaggtgacagtagaagtttatgttttagtttaggttccttcagaagcaatgatttggatcaacatagtttacttgggaggtgattctggagttactggtagggaaatgatggcagccagtgtaggtgccttaacgaacaggtgacccactagcatctgggacataatcctcctgggccagtggaaaactccactgtggaaagccagcttcagtatttttccatttaagggcctacatttgggactgcccccaggagtattaaacacctcagcacttctggcctgcccatcctgcctgccaatgatgcttgtgtggccatagaaaggtctttggcagacaggtgcagatgccagtaggaagccggaacatactgaacagtgagtgccaaggggatatgagcacaccaccacctccttctgtgtttacatatattaaaagggaataaagactcatgttttactcctgattttctctcccaccctatttttgtttgttccttgtttataaaattgacaaatgtaaatgtactgttttatattctttctcttaattttttttagagacagggtcttgctgtgttgcccaggctggattgccgtggcacaatcagagctcactgtagcttcaaactcctggccttaagttattctcccacctcagcctcacaagtagctaggactaaaggtgtatgccaccatggctggctaatttttaatttttttttttatagatatcggggtctcactttgttgcacaggctagttttgaacttttgggctgaagcagttcttccaccttggcctcccagagtgcttgctgggattacaggcatgaacctgtaaaccaaaaataaaattccaaggccccccacccatttaaacagacttccttctcagccagggctcttaagatttaacctgaaagactgattcaggccacaaagggaagtgggggtcagacatgccttattatacctctctggcattaacatcaacacagattttaagtctaataagaaacattttacagcctgttctctctgaaacctgttagccaaagcttcatctgcatgataaaactttggtctctacaacctcttgcatcccaaacattcctttctattgatcccaggtctttagacaaactcaaccaattgtcaaccagaaaatgtttagatttacctgtaggctggaagcccatgctttgagttatcccacctttctggactttctggttctacaaatcactgcacctggcctcattttcttatttaatttgaccttttgacttgaactgaaaaaaatgaaattttatcccatcttagagtattatatactgagttcacttctcagtctcctttcagtgacttggctgcacagtctcaagatgtctgttcacataaaatacaatataatcccgtatcctaaaatggaagaccatgattgtgacgcattttaaggctagttgtgtaagaagagcaacattgtatttagttactttaagatgctttgcaagtatcctctgttccttatgcagagtttttaaaaaattctaacctttatagattaaccaagaactttgagaaatgtactgtaagaataaaatttcagttgaggggatgtaaattttttacatttgtctttgttgatattaagcaggttaaacaaattgtagaggagatctcctaatggatcaatgaagtataaattagaatttataagttgtgttctgtttttcagctcgctttgccctgtcatttttggtcatgaagtaagtattttacttcatctttactcaaaaagtatataaggttagcaaaaataacatataaaaactttacagaaagtagcaaatttctattggccagttatttatatcttaatatgctttgtaaattaatgatatgggaggcaagcaaactatagcttttttttttttaatttttttaattttttgagacagggttttgctctgtcacccaggctagagtgtgatggcacagtcatggctcactgcaacctccagctttggggctcaggtcatcctcctgacctcagcctcctgagtagctggaactacaggcatgcaccaccatgtgcagctaatttttttgtattttttgtagagatggggttttgccatgttgcccacgctggtctgtaagtcctggcctcaagtgatccacccaatttagcctccaaagtgctgggattataggtgtcagccgtatagctccttttaagaaaaaacttttaccaactagagtaaatatgaatgggcttttattttatttatttatttttttgagatggagtcttgctctgtcgcccaggctagagtacagtggtgcgatctcagctcactgcaacctccacctcccaagttcaaacagttctcccacctcagcctgccgagtagctgggactacaggcatgcgccaccagacccagctacttttggtaagaaatgggcttttaaagtgactagacactgccagtattaaagcaaaaacaaatatttctcgtttttgtggaatggatttatgccttgcaaggtagctcttagtaatttctaagatagctctgattttatatgttttcaagtttttactttttaatcatttacgtgatagaagtttgtttttagacttccttttcttagaaaaaaattatcatgcttttaaaacaatccccaaacaaattaatattatagaaggaggaataccccctttactagtcacctttatgttttccttacttctgttttttgttcttttttcgcacttgagcttgttaaagcaggtttggcattagcactctttggaggaagccagaaatacgcagatgacaaaaacagaattccaattcggggagacccccacatccttgttgttggagatccaggcctaggaaaaagtcaaatgctacaggtagacaatcagtcatttagtgtttgttcttttgcttgtaaaatgcgttaataattcacaagtgaattttctcaaagcatgtagtgtgtgtgttccagaggacatggttaggtggcgtaaatgaattggaatttgtgtgagtaatatgtaacttatatctgaccatatttttaaattgagccagtctcctgttacagaggctgtacaaacatcttggtctgttgagacatcaactattaggaaatattaaccatttctctaaccattgttttgctagtctttgttgttgttagttgttatgtgacctcacctatgaacagaatagttcaggggagttaaagcagggtcacctattctccctcatacaagtacataaacactgtattgggctttaagaacagtctgctaaaggtgtgggatctgtctgtatatatctccactgcttgtgagtccaaatcaaggcaacctttttttttgagacggagtcacactctgttgcccaggctggagtgcagtggcatgatctgggctcactgcaacctctgcctcccacttttaagcaatccctgtgcctcagcctcctgagtagctgggattataggtgcgcaccaccacgcccagctaatttttgtatttttagtagagacagggttttgctgtgttggccaggctggtcttgaactcttggcctcaagtgatccacccaccttaacctcccaaagtgctgggattaccggtgtgagccaccacgctctgtccaaagcaaggcaactgctgtgatcagtcatttgtagatccccaagaaaattctgcctctgccagtcagagcctagtggttttcctttcctgggttttatgatggctttagaaggtgctgcttattggtatgcttgtagtttccttaaagtgacaaccggtaagccagccgtaatgtgctttctactttatttttttgagacaaggtcttcctcttttgcccagactgaagtacagtggcgcaactttggcttactgcagcttccaccttgggctcaggcaattcttccaactcagcctctcaagtagctgggactatagacatgtgccaccatgcctggctaatgctttttttgtagagatggggttttgccatgttgcccaggctggtctcgaactcctgggctcaagcagatccacctgccttagccttccaaagtgctgggattaaaggtgtgaaccactgtgcttggccactgtgctttctaaaaatgcctgtggcccccttcttcactcgatgtggaaaattgaccagggcttctctggccctttagtaagttgtagtagtatggctcctaaatctttttccaaggattgggatcctggctgcacatcttaattacttttggagctctttgaaaataccatagcccactgcaagccaattgagttaagagtttctaagttagggtcctagtgtctatatgtgtacaacagtccacagatgattctaatatgcagccagccttgagaactgctttgatcttgtcattacattataaacccactgtccttcatatctgagtcatcctttattgcctgtggttgagtgttaaaccagtcattttaattcctagatattattataattccatagatatttcatctatgtttggttccttttggccatctggggctactttttaaaaaataaattctgttctgagacctcgctacaatgtagcctgacaacagaggctcagggtaccccttacaggtgaaacaaagctcatcatgaacaggaatctgggtgcagtggcttacgcctgtaatcctaacactttgggaggccaagtcggaaggattacttgaggcctggagttcaagaccagcctgtgcaacaaagtgagaccctatctctacaaaaaagaaaacaattagctgggcatggtggcgcacacctgtagtccctgctactccggaggctgcagcaggatgattgcttgagcctagaagttggagaatgcagggagccatcgttatgcaactgtaccccagcctgggcaatagagcaagaccctgtctttaaaaaaaaaaaaaaagaaaacattatgtttagaatatgtaggaaaagatgcaagtggggatctgaattgttacagctttcttttctgtcttttgtgtggtatacctgttcgtgtgtgtaactttggaattagtgaattataggtgggagcctgttttaacccctagagtgtcttatctgtacaaatctcataatttatacatactgcttgcagtatataaaacttcctttttttgctctttttttttttttttttgagtcggagtctcgctctgccgcccaggctggagtgcagtggcatgatcttggctcactgcaagctccgcctcccgggttcacgccattctcctgcctcagcgtcccaagtagctgggactacaggcgcccaccaccacgcccggctaattttttgtatttttagtagagacggggtttcaccatgttagcgaggagggtctccatctcctgaccttgtgatccgcccgcctcagcctcccaaagtgctgggattacaggcatgagccaccacgcctggcctttttttttttttaataaatgtttcttggcagatagttgttctaaaatgtgtccagtggtattgaaagtgttaataccaagaagttacattggcagtttttcttgttttcagacctggaataatgcctttggctcaatttaaaaatagaatctgtaatgttagtggaaattaaacatcctgaatagagtatggcatgtaagccacactaagccagggtttttaaaaacgagactaacaggctgggtgcagtggctcatgcctgtaatcccaacactttggcaggccaaggcaggaggaccaagctggacaatatagtgagatcccatctctaaaaacaattttaaaaaaaattaggtgtggtggcatgtgcctatagtcccagctactcaggaggctgaagtgggagaatcacttgagcctagaagttttagaccagcctgggcaacatagtgagaccttgtttcttacagaaaattaattagccagtcatggtggcatgctcctatagtcccagctactagggaagctgaggttgttgtaaccatgcgagttatagagaaacgccacactttgagacaaattaaagagtcctttattagccagcgacccagagacagctcacgcccaaaattctctcagccccgaggaaggggctagttttgtttttataccatggtctaaatagggaggggggattttagctgaagcaatttttacagaagcagaactggcagaaagttaaaaaaattaattggttacaaatgcagttacaaaaaaataaacagttccaggtaccggggcttaaactatcacaaagagataaatgtaggggttttgggtgccatgcactgcgcgtgcccccaggagctgctggtgcaactcgcctcagcatctcatcaacaggtgcattcctggacgtgctttgagtcagttttacactagctatgcctggagggaggtgaaagggtttacaagtgaagaagctaaaatggagtctgtccggctctctctctgctaggagagagtcactcgggttaaaacaaggtaggatatcacaaggtgggatgatcacttgagcccaggagttcaaggttgctgtgagctaggattgtgccactgcactccagcctggacgacagagtgagaccctgcctcaaaaataataaatataacaaaacaaattaaaaattaggctaacaccaactgttatgaaccatttactttatatttttgtgttttcttcttaccacctagtaaaccatcatactctgtgtgttataaggtttctcagaaagactatataagtaacaaaaataatgataattactatttattgagccagcagcataggataacagtgggtgtttgagatgtgaatactgtcccctagaattgggcagtgcactgccatacacggcagttttacattgggcacttatgtgccaggtaccaaattaaatgcctttcatacatgatttcatttattgttcagggcaatgctgtgataaaacataaggaagctgaggctcagagaggtctgagagccacacagctggtgcatggtggagccacgatttaaacaggtctgtctgactccagagagctatgcttttaactcttgtgctgtttacttttctggcctgttatagcatgtttgctcagaaggtgagcatgtattaagtcactttattacctgatgtttaaagaagcattggaaccttcaaaattaaaattggtactcatgtttttgcttttcgaacttgaaaatgaagcataaattggaattgtgttgagtatttatatgaccacagacttcagaatctgactgcctgggtttgattgaatcctgactttccaccttgatagctgtgtagttcctcattcactctttgttggccttggttttgacatcagtaaatcaggatataataatacctttctctgctggtgatggtgcaccttgtacactaaagctcttaaaagaatacctagcatatacctaacgtttgtgagcaactgctgttagctattacttcccttttactttggatgattctcttaaactttttgtttccttaggcagcgtgcaatgttgccccacgtggcgtgtatgtttgtggtaacaccacgaccacctctggtctgacggtaactctttcaaaagatagttcctctggagattttgctttggaagctggtgccctggtacttggtgatcaaggtgagaggccaaagggaataattagtgattctgggactttttgaaaagccttttccttttcagttaatttctttacattctgtttaagagaaacatttagatagcaaagtcctaaccagtaagttgacactgtcagaaataatcattggaaatgcagtatcatcatttttatactacagaattggaactgtacttaatgtcattcattttcagaatcttatagccgatacaagtatatgtaaaaatcaaataaatatgtgtagctccctgaacttcccatttcataccacctatcatatttgtgatcattttttttaaaagcctgttttgaagctttgtagtaagctccctgtatggtgggatttggatgtcttgtggactgccatgttcccattgcctagtacataggggcacagtaaatacttattgaatgcgttactatgatttagctctaaatagtttggaaaccttggcactgacaaaaaggtggatgtcatcctttgctcacagaggacttgcaataggagattacaggtgttactttcgatgtttttttctttttatgagacagagtcttgctctgtcacccaggctggagtgcagtggtgcagtctcagctttctgcaacctctgccttccaggttcaagccattctcgtgcctcctgagtagctgggattacaggtgtgcgtgaccacatccagctaatttttgtatttttagtagagacggggttttaccatgttggccaggctggtcttgaactcctggcctcaagtgatccacccaccacacctcccaaagtgctgagattacaggctacaggcgtgagccaccacacctggcctacttcagaatgaatagttttgccgtattgtaactgaactcattggttttttttcaggatttgagtgacaggtggtaagaagtccaggcatagggcccagcaagaagaaacctctacattgggctttgtcacctaagtttctctttgtgatgccttcaccttattgggaaaacatgtttccatgcatgtgtcaggcagtgtccagattccagtccagttaaggtcgttcattccttctggtttgccagtgacttccatattctgaacccaggacctggtagccacatttgacacagttaatcactccctcctccttgagacccttgaaactctcattggtttccaggccactttacttcattctttacttctttctcagtcgtttactggttcttcatctccacaacctcttacctgttgttaactaaggtgcttagttcttggaccttttgtcttctgggtctgtatttaccttcttggtgatcttgtatcgtttcattggctttacctacctatccgtgaaaaattctaaatttataatctcgtttcccttaaatatcaggcacatacttcttattgtctacacagtatctccacaaatttctcaaacttaacatgtctaaaattaaaatcctgattttgcctttcaaatctattttcacagtcttcctcatctcagtaaatgacaactctcattataattgctcaaatcagaaaacacggagccatccttgactttttctcataccccacattaatctgtcagcaaatcttgttggctgtaccatcaaaatatatctgctatctaaccacttcttcattaccctggtccatggcaccatcatgtctcacatggattattactgtaatctcctaattggcatgcctgtaaccacgcttgccccttcctgttgtttttaatacagtaatctcattaaaaattagattgtgttactcttgctcataaccctccagtaactgcccgtctcgctcagagtgaaagccaaagtcttgagagtggcccagggccattcatgttctggcctttcacctcttttgcctccttatctgctgcttcccatgtctcctcttctctagctccattggtggctctgccttggacaccaccagcacaccaggcacgtcacatttcctcataagggcctttgtacttactgttctgtttgcctggaatgttcttaccccagatagagctgcaaaggcttgttttctttcccccttaatgttttgctgaactgtcctgaccccagtgaggtcttccctaaataccgtattttaacttataacctcccctgcccctgctgcaccttagcagaccttattttccttaccctaatctactttttccttccatagcactttttaccttctatattgtttacttttttattgcctggaccccctattggctgagtagaacataagcttccaagagcagggaattttgtcttttcagtgccatactcggcattcctagaacatagtactggtatatagaaggcattcagtttattgaatttataaatttattgcatttatatctagtaaatatttgctgaataaataaataccaaaaacatgtatctcgttattatatagctcatcagaagtgagaatatctttgctaagttaccaggtaaaatatagtaataaaaagatgatactcatgaaaccatgcaacttcattaactagaagtagaaggtgatttggaggttttttaaaaaaattttaatgccagcactttgggaggccgaggcaggcagagcacttgagaccaggagtttgagaccagcctggccaacatggcaaaaccctgtctctactaaaaatacaaaaattagttgggtgaggtggcgcatgcctgtaatccctgctgctcaggtggctgaggcacaagaatcgcttgaaccaaggagatggaggttgtagtgagacatgatggtgccactgtactccagcctgggtaacagaacgaaactctgtctctcaaaaaaaaaaaaaaaaaaagttcaaagtttatgttttatgctttaaaacaaggggtcattaaactttggtccataggtcaaaccagccaacagtgtgttttagtacagtccacaagctaaaactggcttatatatttttaaaagattgtaaaggacaaacaaacaaacagaaaagcccaagaatatgtaaggttgtgcatggcctgtgaaacttaaaatatatacttctgcacatttgcagaaaaggcttaccagctcctgctttatactttgaaaagtgacagccaaagtaggaagtagcttgactttgttcctaccccatctctgaggaattgcattagcaatcttgataatttccagtaataccatgaatccagagaggtataggcagacggagcaataggcagctcagggaaaggtggagataaagcctgtgagtctaccactgctaggatcttagcacaggcagggaaggctcactatgtcccagagctccacattgaacagcaggaacaggctaatgcactgggatcccctgccatgaatatgggacacattcccaacagaggggggtgaactctcagaagagatcagcaagaaaggtggcacaaagttcaacaaagccccccttgcttccccctcctaaatcattacgttaccaaaaagtgcaaactgtagctggaaaggaaaaaatgggtcaaaattacattgggaaaagcgtattgacaagaattcatatatactgtgtcggaagaaataggtttggacagagcagccgttattatacatgagcaaggcaaagagacagcatagcagctgtgaagaaataacgtaggaagaaagaaagacatttaatatgcccagtaaaagacctcactgtagacaaaattataatctaaggaacaaatgaaaatttcccatgagtgtttcatgtttgataagaacattaatgaaatagctcaaaacaaaaagataaggctatgagagacaaattgatgactaacaatgttattaaactaatatataaaattgacactgctgaatgagaaattataaagaggaaaggcttgagataattgcagtgaatgcaaaagaacaaagcttaatacaattagaggggaagtaacagagatagagaacaaaggaaattcaacataattggttccatgaagtagaaaacccaaacatgaaaccagaaatggattcaaggatagaagaaaatctgttgaaataaactaaaggcactgtatgtgccaggaatgtcatgtctattgcacaagttattggggactctctaacattagtttacaatatttgtcttccctgctccccataccagttaggttagcagctggggatcaaaaagactaatcagcagttattttccatatactcctctgtgctagtaaggcttacttaggtatagagtagatacggaggggtttaaccacagcaaagcccttcagatgtgacccccagatactaacctaactggtatggggagaaaggaagacaagcattacgaggtaatgttagagaatctccaataacttatgcaatagacatgacattcctggtacatacagtgcctttagttagtggtggtgcattgtattatgtttaaagagattaagtgatttccctataagtgcatacaagtgtatagtcaatacctggtataggttttgaaatatacttattaaacataataaacttactatatgtgtattgaggtatacttattaaattgtgcatgtgtgtttgtgtgtgtatgtaacatcacacccatttgaatttaactccttaagcattttgagaattactcttacctcctcttcgtttttgtaatcctcacaacatagtgctgtgcgtatgaaaaatgctaaaggaagaactattacacaaaacttagttaaataagacaaatgtattaacttgctgcagaacaaacagtaattctccattgtatgacattttataattttaactgctgaaacaaatggaaataattattgtgaaacaatttctatcctataaaatttggaacttgaccaaagaaaaaatgttttttctgctttattctacttcgattgtaggtatttgtggaatcgatgaatttgataagatggggaatcaacatcaagccttgttggaagccatggagcagcaaagtattagtcttgctaaggctggtgtggtttgtagccttcctgcaagaacttccattattgctgctgcaaatccagttggaggacattacaataaagccaaaacagtttctgagaatttaaagtaagtctcttcaaatatttatacctttaatgtattgaatcactttaattcaataagaaaaagaaatagttcacagaactacaggggaaaaacatggatatttcacagaagttataaatgtccaataaatgcacaaaaatgtgcttaaacactgcagagtaaaacaatgaagtacgaatgagatccaccagattggcaaacattttaaatattaatcatttttggcaaagtag

SEQ ID NO: 284 - DNA, 32746 bp, Homo sapiens
  source 1..32746: mol_type = other DNA
actcgctctctccctctgtgtatagaggatgtgctgaatggtgcgctttgaggcggcggcggcggaggagcagaatccgccgcgactggcagcctcggctgaccggctcggcttctcttcgccttccgaggctcctcatccaccgcgggctccagacctcgcgtcccgcccggggcatggccgggcgctgcgcccccgcgcgctctgcctgctgagcggcgccggagggaggtgcggaggccgggaggccggggaggccggcggggagcagagtcgagcgcctccggagcagagaaaggagcccgcgccccgcgccccgcgccccgcgcacggtccccagtccctgccgcgctcgcccgggccgcccggagcccagatgagcccagatggccggggctcaacccggagtgcacgccttgcaactcaagcccgtgtgcgtgtccgacagcctcaagaagggcaccaaattcgtcaagtgggatgatgtaagtattggggcggcccgagtcggggcgctggctcgggcaccgggcagggcgggcgtcgtgggggtggggcaaggggcgcgttatgcaatgggcgcactgggagcgggcaggggcagcctcgggcgcacaggttggcatctgccaaagcggatgtccaagggcagaagctttgcgcgcgctcctgtttcatcgggcttcagtagttgccatcctttctgggtctggcaggcgccccctgagggtcttacatcttttgggccagtggagagggaggggcaagctttgcctggtgacaggtcctgagagttcggaaagtagggagtgtgaagttgggaccaactggaaagcgcctggtgtgaacaaatcgcgtccctctccgcctgcggacgcaccccctattacctcttttgcccgatttcaagaaggaaggacctgaagttcaaaacactttagtgattgcgaaccctcttggcgcttttgtgggagccaaggcggcggaggacacaacggtccagccaacaggtggtcgttgatgccaaacttcagcgcctggctccggagtgagggtccctgaaaagggctgcggggacacatctggggagggcgtgaacagaatgggggcccttgaggggtcctggagggctcatgggcctgcaggcaagtggggagggctgacttttgagaactgagctgattggagtcttctgcctgaaatagacaggttgagagtttgccccacgatttacctgcaccgtttgccaggtagggcagagcctagcccagcgccggggtctctaatgctttacgagcggcccagaccccaggacttcaaatgacttccccttcccctctaccccagttgtcttcaaaacacgtaaattagttatccagctgaaaacatgcgaatcttcggatggagaacattatggtatcagttttatgtcctgggtgtcattctaaaggttcgataagaaaaacctactgaaataaacccgagttgccaggctctaagcaaatttaagtccaaatgactaatacatctcttaatcagaaggaattataggagaatgaggcgttcttcttgccgaaaagattttccacctagtaaattatagcctgttatcctctagggtatttttctttaatcttcttaagccattttccagtgtctgaaaacaatttaaatattccaggtagtgaatccaattacttagctgagtgcgtctgtgtctatattttgtccagctggaagcgcaaacggaacttggagtatgaaccacagcttccttgaaagctcgtgccaattattaaatgctgtaggcaaggatgtaaacatacatctttttaccatgggcttcacacttttcttctttctgttccagtctaattgtactgaatgtttctgtaaatggaatagaatctaaacaataaattcagacgcagattaaatgctttgtgtcagggaaaaaaaagacaaagaaaatgcagttcagcaataaacaagacggtcttgcccattttgagatccttgaatagagaggtgatgtgatgatggatttactgagaaagagagtgaagggcagaggaaagagaaagagactttgcagaatttagaaaagggagtttcagcgtaagctctggatttgtatacagtgatgattctaaactgtattttaaataattctctataatttcttgtttgggagagaatagccaacatcacattgagaatgaaagtattctatgaaaacacattttggtatatccaggtagatgactttcattatgtgcatttctgtaacacatatttcttgctcacctattactgccaatcctagactggattctggggtggtgaaaaaagtagacaaaatccctgctgttacggaccttacatgctaggtggaggagacaaaaatcatcaaaaacaccaatgagagagagattgggtgatgcattgagggtaatagagaggacgttagtgaaataccaaccaaagaagaagttgaaaagagctccttctgagcattgcagcagtgagtttccaaggaagccctcctgaaagaaaggacatagtcactaaggagaagaccagaagaatttcaggtcttttttaaaaaaaaaaaaaaaacctagactgcactcaggagtcaagttatctggaatataatgagctatcttgcaggctctttggttctctgggtcttcatgctgatcagtggactacaagggacccagcctttcttaaggttgcctttctcttccccaggcatcccttttctactcttctcagctcgtatttgcccttccagaatcaagccagttcaagttatctggctatttatattgtaccttagtgagacagtgtgttgaagacaaaaaagaaccagatcttgaatcaaaggcctgagtttacctcctagttctttcaccagtaagctgcatgactttaggcaaatcacttagcttctctgtatttttgctgcttcttgtgtaaaagcgtggtaatgttacaggacattcaaaaatgatgaatttggggctgtttaggatgtgaagaaattatctcttgttcctgaagtgattaaagcagtataatcactggtcttgttgtcttgaccaccatatggaatggaagatgtcacccagaggttgcagtgccatgcataatttgctggccacctaccaagtcacagtgaggctgtggatgctctaagggtggtagtcgaaagctttaacataggcactaaacaatcacaacagacagcaggggggtaatagatcctggagataccctgttgtaccagggccaggcgttaatatttttgctgcttggtcatggggaggtctgggagtccccagggtctgtggatgggtgggtaggtagctggagtttttttgactatttcagtattttaaaactcatggtgtatattgtctgaacatcaaggctatacctgtccttctgaacttggcatgaagataaaggactgacctaatgatatttaaaaaattcaacctcatgtctttgcttttgttttgcatttgtctgttagcaggctctggtggtaggaggtgggtgtaaaggactatgggtatttgtgggagaattctggtgaggtagacagtggaaggagagttactttcttgatctaagctagggagcttgggagattgtgagagaagctcctctctcttctggatcttggccttggtctatattgggcaggacatggagagaaagagcaaggactgtaaactgtacaataggacccccagccactgatttggccctgttttccatgcctaagcactctgtctcactgtcgcacaacctctgagggatggaagggttttcatttatttattccttctgtttcttcattcttacctttcaaattcagatcttactgtgggcaggttgcttaacgcatcccaacttcagtttcctcaacggtaacatgcaaattgtaatatttcctaactcagaacagctgttgaggttaaataaatgaatgcatatgcattgctttgtataaagcctgacatacaggcaaccttcaataaaacatgtttttaaaagttattgtcggccgggcgcggtggctcaagcctgtaatcctagcactttgggaagccgaggcgggcagatcacaagaccaggagatcgagaccatcctggctaacacggtgaaaccccctctctactaaaaatacaaaaaattagccgggcgtggtggcgggcgcctgtagtcccagctgctcgggaggctgaggcaggagaatggcgtgaacctgggaggcggagcttgcagtgagccgagatcgcgccactgcactccagcctgggcgacagagcaagactctgtctcaaaaaaaaaaaaaaagttattgtccctcaaaaataagatggacgtgaattttatcaaggtgattagcaggtgttctatggctcttttattctactagtggaaaaattcagaccttacttccattccctttaatgtgtgttttgattttatactttataatttggagaaaaatcaggtttctcaccttcttttaaaaatccaggtgtttcacggaaaataagtacgtaatttagagcaggatccattctctacagcaagtcagtttacaaataatccaaaagtttatttttacttaaattccatataaaatatatttatgtatatatgtgtatataatttaacattgcacgttctgtcttacaagcatattctaacatggaaaaataattgctagactaagttgtctgagaagtctgatgaaactcagaagtttggatttgcgttaatgccatctggatttgaatcaagtaactccctcctttaccacacctccaacccccacagctaaaacaggtaatttaagaaatactagtatattgcacacttcccagcatcctacacaaaagcttagaacttttgcattatgtggaatctgctgttccagtttccaaaatgatgacaagtaaatgatgacaagatgacactcacaagattaatgagagagcagaggggaaaagggtttgcgaggtgggaatttagtagcgttcactttggaaaggttatgggaaacagggaggaaacttctctgagttggtagctggctgatgtggatggagcaactacaaagtgcaaggtggattttagaatggaaggctagcagatgccctctaaggagccacttaaatttgcccagttatgtccatttttcttgtccaaagagctttgagaatttctcattggcagtcaataattactgtaatctaagtgtaagagcataactcttttgcaagcaaatcaataaaactacttgaaactttttaaaaaatcagtgtaacatgcgtacaacaaaacacacaaatcctgtgtccagctggatccattttcacaaagtgaacattgccatgtcatcagtaccagatcaagaaacagcatcacttgccccagaattcctgagtgctctcttccagtccctacgtccccttctaagggtaacccttatcttgacttctaactttatagtttggttttgcttgtttttaatctaataagctatttttactttgaatgaaaactttaaaaaaaacctcttcagcctaaaacatttttattattgctgaactgatcctcttgaacaacagcaacaaaagtgacttacagtcagtttagatggccattgattgggttcttgtctgtcccaagtctgggaagtatagcaggtatagtaaatgccctgaaggagcaaacagttcaacaaaaccctagtaatttacagaggaaatgtaatgccttcaggctgttattggcatggcaaagctgactagtacagtactgttgctggaatataattttctctcataggttttctctcttatcttgcttaacactaatatttccccacctatggtgaatgaggataatttgcagtggctattagtttcatttgaaagtttagcctatcagtaaatagcttcaagttatatttatctgcaatggtatataaatggaatgggaacattttacttttttatgtgggatttggtaaactgtaaatgtttccttatcagaattgtttcatgttatcatgaacaagaatcgccagcagaaaatggaaggggattgctggtgaattgttgactaacgctatgggtctccacttaaataacaaacccctggtaactgaaatcattggtcttcttgttactggagctaataattaggttcatgcaacctttcagatcatatcataaattccaaatgctcaggcatatttcacagtcttttccatctaatcttttccctttctgttctatgtctgatccccctaagcagagccttgtgcccctatgtgtaagtaggcaaaggaaatatagacatatttctgaggtcatttacatatatgaccataaaaaagccattgatttttgtaactaactaactgaaataggatataaaggaactaactaattggaatagattataaaggatgcttatgttctttaagagtctctctggttttcctctgatctctttaagagctaatgttcgattttattatcattaccatgtgttaattctcaaaatttttatttcaatttgtattccaaaaatggtttgcatgtacctattaattgaggttgactaaatctatgcatttatcaagaaactaaattattataaattgagtaacaaactattatataaaattggaaaaaagttatttttatttatactaaaattattttatttatattaaaacagaaataaaagcatcctacatctgtcttttatttcaagggtttttttttttttttttttttttgagacagagtcttgctctgtcacccaggctagagtgcagtggcaccatctcggctcactgccaacctctgcagccgggttcaagctattctcgtgcctcagcctccggagtatctgggattacaggcacatgccaccatgcccagctaatttatttttatttttatttttagtagagacgggggttttgccatgttggccaggctggtctggaactcctgacctcgggtaatctgcccacctcggcctcccaaagtgctaggattacaggtgtgagccaccgcacccggccttcaagggctttttttgtttacaatatttggttaatgttctgtttctttttactgaattgacgtttaatgtacaagatcacagaaagtggattagttagtaaagaaaacatttacctgaagtagtcacatggatatcaatatatagcattgatatctagaagattaagatattattttgccattaaaaaaaacattttttttggaagttgtctatgaaatagttaagagtaagggaaatttaatttaattttaatccattttatagaagaagccatacaagctcatgaagctggaaaaccatagagcgaatcagcaattgatctggtcaaaaaatgttaaagatgccaatcatgatcctccccaggtgtgctgtgttggatatggttgaatctcacatagcatcgattcctacatcctcttagtaggacttcttataatacaaaatctggacttctaaagctacatttaccagactcctttttgacgaacattcttcttgaaaattaatatttccaccaaataaattcatgcatatgagatatggagggcagaaacattaaaggggccaatttcctgcatcctttgggttgtttctacagatacgtgagaagctaaaagaggtgggactttctgtaatagttcttcagtgtctctgagaggcagtggtgacagtggccactccctgttggcagcttacacttctttggcttcaacaaagctggtgttttgtttggaccccgggagttccttcttgatttctcacctttctgaatgtggtagatacaatagctctccccaagggtctgtgctgctatgttctgagatcattcatggagagccaacctaaagcctgctcctccaacccttccagtttttctgtcaagtgcttactttatattaagtccctttatcttcaaaattcaagagaaatttctgtttctcgcaccaaatcctggctgatatggccttttgcggttctaggatttcacagctttcagtcctaaatataataatcatctaagtatcctacatagttttctccttcagtactactgttgagtaaaatgaagttttgctgtaatatttcctctggaattcaaaatccagactaagtcctaatagcaggcattcatgcttatatagcagccctgcttacccctgttcagtcattaagaccacctcgggtggtaggaaaaagagcaagcgtttgtcttttgcatttcacgtagaagcaaatcgaggctagtgattgtgatttgtcgaagggcacataactaagtagatctggaataggaatttaaaactacgtcttctggccaaattcagtgtcctttccagtctaccatgatgtccccgaacagggtccttttagtaacaacaacaacaacaaaaaactttttatttttttatttttttttttagacggagttttgctctttttgcccaggctggagtgcaatggcgcaatctcggctcaccgcaacctctgcctccccggttcaagcgattttcctgcctcagcctcctgagtagctgagattacaggcttgtgccaccacgcacagctaattttgtagttttagtagagatagggtttctccatgttggtcaggctggtctcaaactcctgatgtcatgatccacccgcctcagcctcccaaagtgctgggattatagatgtgagccaccgaacgtggccaacaaaaagcttttaatagagtctaaatgaatacaagtttgaagagattgatagacttttccaaagaatctctgttatttttaggattcatacatatgaagcttagatccctgcaaactcagtttttgagctattgtcttcaaaatagctctttttcatggtgtatgtacagtccgtttttgtctacactgtgcaagatgtgtgagcattggaaaacctcattgctgctttgagacaaaaagggcaggccagccgcagtggctcacgcctgtaatcccagcatattgggaagccaaggcaggtggatcacttgaggtcaggagttcaagaccagcctggccaatatgatgaaaccccgtctctactagaatacaaaaattagctgggtgtggtggtgcacacctgtaatcccgaccactcgagaggctgaggcagaagaatcacttaaacccaggaggcaggcagaggtttcagtgagccaagatcgcgccactgcattccagcctgggcgacagagcgatactccgaaaaaaaaaaaaaaaaaaaggagggggcaatgtatgctctatagtctttaaagatattctacatcagtcagtcagcgtggaaacatgcatgtggaaagacaggtattcaggtatggtgttaaaggtctttttttcattgtcgagtaagtgacatttctgcattcagcaagactctttatatctgttactccaccttttcttcttctcgacatacgtgtaaatgttgtcttttgctgattcctatttaggcttgtcccatggcctctcatagaaatcatggaccatggaagaacaagaatatggtagacatgaaggaaatgtagagggtgagttgcctgctctcaagcacgatgcagaatgcaagacagtgtcaactgagaggccagatctatattacttgtgcagggaggtagataggccttgtttatattacaactagagcaggacttctggagggctatagctttataattatcattattatttttttccctaggggagagcataggcctggcactgggaggtgctgatgctcaggggatatttgtggaatgaaggaactgtctggtgtttgtctggctcacagtgggttcacacaggggagtgtgcagccttgaggcagacctggagggcagtcatgctcctatgagaccttcgtgacctttgaggtgttgtgttacattggttggaacaccttgctccttgtccttccattccatctgaaatctcctagggtcctaagggactctgtgaccttcttaaatgggatttctccatgtgtgtttgagaaggaaactatttattggcaatgcagagctcactgctgttacagtgctgatttcatttaaggtccaaatatgtcttaagattgagtgtatactacactgcaattcaatattggttgaaggtgatgatgcttaatgtatttatttctcatattctaaattttaccattagttcctattttctgaaaaatatgctcacccatacacccaaatattgcaatgaaaagcccttaaagaaattcagaagcgttgggagtgacagaacaaaagatgcatggttgtgaaaacatcctatcacgataatgattcacaaagagaaaaaagaatacttgtgctttattgctaaagtgagaaaagtaacaagacatagttctaaatctgatttataatgaacttccacctacactattctttgtgtacagaggcaatggaagtccctggaacaatgcttttaatttcctcctttctccactcctcgtttaatgtacttgggccacctccattattccagctgccctcctgcccctgagaaatacctcaccttctgcatttatattttggagctcgaccttcctggcatctctgaatcctgacttcattattatctgacaccactcccctttcttttaacagtgtctatatgagtttcccctcagttgaagctttcctaagaacatagcaatatgcctttactagtaaaaatcccaacctcaaaaccaacacaatgttccccagtcccttttcctcctttagttaccgtcttcttcttcatctccttccctctactatgcaagtgtaacttatagtcactgtctccctgtccttacctcctacctacttcttctcagccttccaaagtctttttctgccctcaccactactttgaaatttctttatcatggctgtgggcaacatggctcccagcaaccccaactgatgtttttcagaatcttccttgtttttatttgctgcagtaccttccaccccttcatccattcattcaccagtcatactttaaaaatgtactgatgtctcttttaagcattgtgctagtgttgtggattgatgatgattaatgatttcatgcctgcccttattgcggagacagatgctaagcaaatagaggtacaattattttcattataactgctatgaaggaaaaaaagtacaagtgagtataggaagcatggaaggtttccctggaaaattctatttatgacaagtgggatttaggccagcatgagtagaagaatgtgtcaggtggagggaacagcaggtgtgggtattccaaagagccaaggaacacaagattttgaaggagagaagcagaattagcacaggagagtgtggctcagataatgtggttggatggcaagggcctgcatatatactgcgtaggtccttgcaggattttagacgtataaagtcaaccagaaaccattaaaaccatgttttcaaccctggcaccattgacatttggtcccagtagttttttgttgtggagtctggcctgtgtattatacgatatttagcagtatccctcgctctagatactgggtgtcagttgcaaagcctcccagtagtgacaaccaaaattgtctccagacatagccaaaagtcccctggggtgcaaaattgctcccagttgagaaccactgatgaaaatgataaatgatatactatgcttttaaaagtatccggccagttcactgccctccccgccaccccaaaggccaataagtacatgaaaagatgtttaacatcattagtcattggagaaatgcaaattaaaaaacacattgaggtgccactgcatacccaccagagctatatgttactgaaattattggtttttctcatctgatgcccccactaagccaggagcacctcggttgatttgggatctgggctttaatttggttctctcgtggattatctgaaggatcttgcacgacacttgaagaacaattcttccaacatttccctacattgtgttaaaagggatttttctgcttgttctgtaggaagccagtatcttcacattgcttctctccactgttttgcaccctctactctggaccttcttcatctcttctgcttttctttattttgggaaatttcagagtagagacactcctggaggaaaagtctcatcaatgctgatacacgtggatgttttactccaatgatcttaattcctcacctggcatccaagactacgtttataatgttttcatttcatagtcagggctgtattgctcatgtttagtttgacaagcatcacatctgattttctgtgacccttagaactctttgcccgttgcatagctgttttccccccagtgtctctatttgctgtatttggccctgctgcttcctgatgcaagtcttgggcaatccctgtggaacatcgcttgttacttttcctgttgactctgtggtatcgattagtttagacgtgcatgcctctattcatgtgtgttctcttgtaataccataaaaacatgagaatcgctgtggagtgagaattgtggtcaaccttggccaggagactttctgacagtggtgctgaggaatgtgccatgggtctgtggactggcccttgacatgagccttgaggtttagggttatgctttgtagtagtttactaagacttccatagcaaaggaccatagcctgggtggattacacaacggaaatttattttctcacagtttgggaggaagtgggagataaaggtgtcagcagggttgcttcctgctgagggccgtgagggaaggatgtgtgccaggcctctcgtcttggctggtagatggcctgcttctccctgcatcttcacatcattttccttctgtacatgcctgtgtccagatgttctcttcttataaggacaccagtcatactggattagggcccactctaaggcctccttttaacttaatcatatctgtaaagaccctatctctaaataagatcacactttgaggtactggggattaggacttcaacatgtgagttgttggggaggaggccacgataaacctggtgacatacctccgcctggtaaagcgtagctcagagggtagcaacatgacagctctagttagatattgaagaactgacacttagagaagaagttagatttattttgtactatttaaatgttaaaaattaaatggtagctgcatatgtggataaaaccataaactgccttgctggaattgtgtgacaagagcactgagattgctttgtgagaaatctccctgttaaagagtgtccctgtgaaggtttggagttgccctgcctaacagaaatatagcgtgagccacacaggacacttgtaaatgttctagtagcctcattaaaacaagtaaaaaagaaacagatggaattaatacgaatactatatttaatttaatccactgtaggcattttgacatgtaatcaatgtcagaaatcattagtgagctattttctattcctgtttccattcttagtctttgaaatcttgcagcacatcttagtctcagcagtcgcatttcaagtgctcagtagtcacaagggagccacagcagctcctgtactggacagcaccagtatagggcatccattctcaacaggggccatgtcgcttccaaggaaacgaaaagtggttttggggaacaaaagaaatcttcttactgtttttgttttttttgttttttttttttttggtataaggcacagttatacatacagcatataaacagatattcagcctatctgcaatattgaagtgtcatgggggatgattagaaaaataaaaacctaaaaagcctcccttgcagggcaataatggaaaaagttgagaagcactgttatagagtgcgtacttgaaggtttaatttccagtgcttcccataccagcttaactggctttccttgaggaagtcacttagcccaagccttggtctaggtatctgtaaaatgggaataataatagtgtctacctcttaagttattgtaagtattaaaggagaaaagccacgtgaagttcaccacagtgattggctcagagcaaatgttgagaatgtatcagttactattcagtcagggatttttataaaaaggtatactggtattagaagtgagtttggattagtggtgcctttgtcatttcgtctcagtttctttagtatttattattgacttatatcagtgcattgatgagcaaatcattgtaatgttaatgttgattccagtgactcttttttttcttgctgaattgtttctcattcttcaggatttcgaggttttgttaaggtcttttgctttgccccttgattgtttttgatttggcttaaagactctttagagattcatgtaaattactaaataacatcttcttaattactatattaatcttcactatttatgatataggaatgacagtaaaacgtattatatcaaataaagagcagcaagtagaaatttactgaacattatctgctattactaacttaagacaagtatgtttattggttttcttttttacagacaaacatttatcagaaaaaatacaactttaagtaaattagagttgaattcttagaagcaatatactcacaagatatggtttgcctgcattctaaggtcacaggtgttcttggaggtaaacatcatcctattcctgacccaaagcctcacctattgtaggcctacatccgtggttttgtaagtgtggcccctggaccaacagcatcagcatcaccatgagcttcttagaagtccagattttcagactccgtcccagagctactaaatgagggactctggagaaagagcccagcaatctgtgtttttacaagatctctcagtgaacttgatgcataggcaagtttaaaaaccacaatcttatgaaatacacacatgttatagatgttgatggagaggtaaaggattaaaatatagaccatctgagagctgtcttcatcattctacagtcaaaggtcccaagagtcgcaacccatctgcagctcctttgtcaatgaaggatggtcatatatttcaagtttcaaacctgggtatatgttctgacaattaagaatatttgggatctgggttgagtggctactttggtatggggagaatatagatactagcagctatgtgggaggtgggaaaacaagcaggtggaattgaaaatagacattcatatatttctgggtcagatcctactttgcatggcaagaatgccaagttccagctgatcttggaatgttagaggtgattatgaaggaagcgggcagggagccgagataaatgatcacttaacagaggaactgtggccggaagagtggggtcaagaaaacattgaacaaagaagggttaattttgaaggaggggaaggaataagctagaaatggaagtatctgaaacaaactaggcagcatagaacagtgttcctaaatataaattttgaaaagttttttttttttttttttgagacggcgtctcgctctgtcacccaggctggagtgcagtggtgcgatctcagctcactgcaagctctgcctcccgggttcatgccattctcctgcctcagcctcctttagaagttttattctgctcacttaaatatttgattgtatgggatccttgcagggaatcgccaccaagattttgattagaattttgtcagatgctctgataagaaaagaaactgacctgaaaaagataagttacacctacagtttattctaaagtcctctagaagtgggaatgtgtgctgtgtgcagcctgtcaaaacttttattttggcaacttctagaagtaacaaaacaggactgaaaatattgctatgatttattggaaacattggtgtgagctgttatgcatgcaatctcatgaaagaagcctaaactattttaaaaattagtctttcattataatatcgtttatttccaaatgtctttttttgacatttagaagtaattgggaaattttaaaattctagctgaagttccttgcaacagcacggtccttgtaaaagatatttttcaaactgcatgttaaggatgtatatatggaatatcagcataaaacagaatggcagttcctcaaaaaatgaaacatagtactatcatatgatccagtaattccacttctgggtatatactgaaaccaaggactcagatagatatttgtgcccctatgttcataacagcattattcacaatagccaaaaggtggaaacaacctagatattcatcagtggatgaatggataaacaagacatggcatatacataaatggaacattattcagctttaaacaggaaggagatatgacacatgctccatgaatgaagttttaggactttatgccaaataaaataagccaaacacaaaaggacaaatattatacaattttacttatataactacttagaatactccaattatttaattacctggagtagtcaaattcatggatacagagagtaagactggtggttgccaggttataggggcaagagggaatgaggagttagtgtttaatgcatgtggcatttcaatttgggaagatttaaagttctaaagatggatggtgctgatggcagcacagcaaggtgaatgcatgtaataccactgaaaggcatattagaaaagagtaaatgttatgttctgtatattttactgcagtaacacagaatatcctgataaacttacatttagtattttgatacatctgtttttaattataatccactataataataatgaacatttttatgtggcaaacatgcccagatgctttaccccaaattatcctagctatttctcacagcaaccttctgagttaggtattatgattattcccttcttttttcagttgtgtaaagctatgcactgagatgggacaggcaggaatttgaacccagagaacattttccagaaccaggctcttacaataaaacttaatatgtagattaaaatcattcatactgctctgcccattaggaagaaaaaagtcccaaatgccaaaattatctctgcaagttctaattttcattacaagttcttttaataagctagatgatatgacacactatggttatgtgtatgaaaaaattgaaaaaactggcaatttatgtctctctaaaaaatgcaattcctgcaaaggcctgagtgtttcagtataaaaatccatatccagtggcatgtattttcttgtgcagatggtatgtctttctgaaaattgctaagagaaaagaacacatattttagaaatgtttaatattataattacaatgtatccaagttttgctttatactatgcatgctttaaactcagaagactatttacctatgatgttttattttagcatgtaaaattgaaatttgcaacaagtttgtatatatctttctgaatatgtagaagatggccttatttactgttaccttggaaacagtgatgctcaaatactatgttttactctattacaattaaaaatcattttatggaacaaatgtaatttaaaatactattcttaagcatggattttagttaatattaatcataaaaataagtaatgatgtttagtgttaaaattatttgaaaagctaaatatagatttttaatagaaaacataccttaatcaataaatcataatgctttttcctttacaagttatgtataagtcttctgattattaggaaagaacctcagttacataatggataattccatgaagttaaaaatgccatgtctaatttcttttgaaatttttcttaataattgactactttggagaatctgtacaattattacttcttaaataactcctggatagatttttctacagtgatatatgttgatattcatgtttcttcttacatttctaggactcaactattgttactccaattattttgaggactgaccctcagggatttttcttttactggacagatcaaaacaaggtaagaaatgaggtatgcctttcttacatttttcagtcgtttactactttgaaaagtatttatgtatcttatctatagaagaacatccatttcacagatcttttgcagtttatttaaaggttctacttttaaagaatatctaaggtattcttaggacttaggacgtttcaaagtcactagtttgaaatattagatttgctaaattctagagcaattggtatttttggttctgtttatattatgtgttaggataagaacagggaaatttgaattacatttggtgtagcacataattagtcagcgttactgatttaagtccccacccataaaggatgaagaaaaatgatgagaaaataacttttgacccaatagccttaccccttggcttttctttctctctcttttcccctgtgctgttcattaaggactctctcagaatcagcaggaatttggccctgataatttgttgatgtcagaaaaccaagaataaaattcctttagcctattccttcagttgtcaggaatttcttactaaattagctttctgcccacaatagcatgaatttattatctcatttgttatgaagccaattgatgattctgtactgaattattaaaaagtagaatatctgctgatcataagatttatttggagtttaatgggcagttagatgagaacactcatggaaagtggttattatttcaagcatcgttgccacagtcctacacttgaacctcagaggccacagaatatagaatgtttttgttctctaagttttgatatatggagaaatgggatagggtttactgagaatgctaaatacatactgaaaacaatagaatagtaatagtataccattaaaacagctggaacctccacagttacggatgaaggaggaacaaattgttagctctttcaaaactctacattagtttcttatatccaaagttcctggagttgcctgtcagctttgccttctgtctctgaggcaagctcaattatacctgtgtctggtcccagggccactcctgaatgagcctgtttacacatcattcaaaaggtgaatttcagtcttgttgtcctggaattagactctaaatcagtgtgccctggaaccatgtgtggctgtagaagtggaggtaaaccacagaccctacgctaatgtcaaaaattgtatgagtaagatttcctacttaacgctcacatttattattgggtgtgttaatcgctttggcttagacattctgtttggtttcctgctgttatgtgtaaaacaatggcttgcaagaggttttgttttttgggtgtttttttcttctcctaaaggatatttttagaactgttgaaactatattcatgaacgatgtacttataatgcctagagcatttctaaacgttgggtatttgtacgagagaccaaactgtcagtttgatttttcaacttgtagatcaagcttctataaaagcaacagaagatattctgggatttttaaataattcatggcaactcagttaagctcccctctagaccaatcatcaatatttatttccttaataaagaaaaagggtttaggaccaaaggctctttgttgcatttctgttgtgaacccagtattttgacccatgcttattttcaaaggtaggaaaatttgttttcattttttacacaaacttttaaatcttggttgcaatgctgtttatgaccaagcgaaacagataatgtggtagcaattccttttatcatgttattgcttttcttttcatggatattactcttacagttctagccaagagatagaaatagtaaattttacttttcactttctaaatgccaaagtcatctctcagtcatttatcagaatttggaggctcatttcttagtgatcatatatcttagaatccaaaagatgagaggatttaagaaaaaaaaattaaacttaccatgctttcaagtttgtcattttctttctggcttgaagcccagccctggaaccagtaagagtgattcatccacttttaggagatggacgactccaagtgatgaattagagtaaatgtgtgctagaagaaatggtgcatgcaaataaaagatggcatgccaagcttttagtggggatttttttgcataagatcatttgaaggtacatgaatgaatggtacattcatgatgctacttagagggccactttttaaaaaatattttttatctggcaattagttttaggaatctgccacatgtaccatagagataatctctcagaaaacaaaaaaaaaatgtgatacctttaagtttatcccttgattttatacactgtgttttccattggttgggaagcttgcattggtatttattgtaatatgcctctcttcttcctttgggcttcttccaatatattccctctttggtccacgaagcttataccaaagcacttggattagcaatcatctgaggcctagtctgctcagaggtgagcagaaatccctagcagaggggattttacaagtgttttttatttttcttttttatagcattggaggtaaatggccacattttatgatgttctatgcatgtccgtctcttgtcatggctacatcagatcttgtatcagagccacttatttcaagccactggctttcccctctgtagacaatgacatgctaccttccaaaacccctcctttgatttgtcaccacagaaatgataggtgacaaagaagacagcacagatgatgaatttaggaattaaaaactaaagctagcgagtcatttttaggtagcagaaatgtgctttagtgaaacactgacaggatgtttggagttggtggaagcagataaatatgaatatcatttttagggataaatgttcatgctttgtaccagctctggacttattttaataattcttttcactgtattgttggctctgtaaatcttattgaataaaatgagcaaaaatgagtttctgaatatgactattttaagcagagtggtttttcttgtgtaagtgtaggtgatgtgaagaggatgaatttatctgtaagtcatgggtgagaagggagtcctgcacagcctgagtacttgagaggtggcctacattaggctataacttttctttggatccgtgccatgtgaacactagaaaccaacacaggaagtgttagctgtgaaaaccatgtgaactataagaatctgctccaccggttttgaaagaaaggctaaagaagaaaaaagtgtcaatgttaaagagctaaccaaaacctatcctgctagaatatgaaaaaaattagacctttgccttgcaacctgatgccctgcttctgtgccaaggttggtgtaaaaataaaactagtcaccactagttcagatccaagaagttcaatatagttcagtaaacccttccttgtcttcataaaactggagcttgggggaagggaaaaggaacacatcattaaatttgaaaaggaatgggaggaagaacacacggtttgcatgaagaactcccattactttcttttttgttacaaattttatttgtttttaatattgtggataatatacaaatatctttttatctgtaaaatagtaaagcaatgtaactatctttaaactgcactctcccattgactccaatcctagttctctattcagagtcaactaatagtaatagcttcatggtttcttcctaggtctcttttaaataaatttgtgcatgtgtaactatggaaatatttcattttgttttgcttatgtccatttttatactaagtcacatcatattaaccattctacaatttcctttttaccatatagtgtgtctcagagaacttttcaagttagtacatgtgtgtctatatcattccgttaaattggcctatcttagggaatttttcatgttagtacatgtgtatgtatcacattctttcatattgctctatcgtatgttaaacaattgattaccacattttatttaagaatacagaagttctcactggtggattcttggtgtttgtctctaatttggggttacaaagaatcctataatatggagtaatagtcagctgtgtgtagccctctctgggaatatgggtcagggattccctaaggtaaatgctcagaagtgcgattgctgatttaaggctatacctatcctaaattataatgaatggctgtaccattttataaccctacctgtcttatatgagtggaactgttttcttaagcccaaccaacagtaataggaaatattttaatttttgcctaactgatgcaactgttatatcaccttgttttaatctgtcgttgcctgatttgctagtaaactgtgtatattatcatacatttattgatcatttcagtttttccttacatggattgcctatttatatctcttgcccttgtgtggacagttctctgtgtattctagatgtactcctttagctgttataaatgttgcaattacactcttcctgtctgtggtttgtctttgactttcttaacatctaatttatgggtaacaaaagatgacttgaagctttaagttttcatgtagttacattccaactacctccccactttttgcttcctttaagatatttctgattccttctcatcaccgttattaatctaggtttttaatccatatgtaatgtattatgaggactggtgtaaggtggagctctaacttcaatttcttcatatcactcgtagagctgacatttcactacctggtttggatggcccaaagatctgttatgttttaatgcctgtggactgctgggttctgatttcctacttcattcttatctcatttattttctgcctttcttactttgtggttcaaaattgtaattctttttgtttacccgtgatcctatattagagatttaaatttatacctgcatatttagtcatttctggagacttagggcaagaaagattggttctaccattcatgccatctgccatcttgttctgccctgtgaatttgcatgagacaccattctggatgtttgtacagagtgatgattcagtttccattaatggcaaccatagatagtcttctcttatgataaccttaaatttctacagagttcaaaagcaaagtttaaaagttaaatatttacataagtcacagtaacatttttcagcatgagtccagagttcaaaaatattttgaatgatgcatcataaatgtcaacaagaaaatctagtgatttcctattaaaaatagtctggcttccataaagaactactgggtaccacacatttcattaatgatttttagcagtggggctttctctttgggatatgcttctctagggtatcccaaaattgtcaactttgacccttcttgtgtatagtaaatgggataggtcattcaagagtccactgagtgattaaatgcaatgatgtagttataaatttagaagataagtgctatttattttatttggtagctttctctaaaagttgaaacaataacttacattatctgggaaaaaaaccagcaaaattcacgtgaggattgctttgtgagggctgggattgttccttggcctggagcagtgtgtcagtcattgttgactaagcagcagcatctggggactaagtcctttccttcaccttccttgaatttccttcaccagtattgatgatattaatagctaaaacagacacagtgccatacccacaccctcttcctcaccactcctgagaacataagccgggctccagtggctggccagtgcctgcattcttttgctttgtctggctactagaactcatgttgctacccatgcagctgcccagaagttcctggcaattcacactcaccctcaccaatgggattcagtggataaataccacagctccctcacctcttgggtgggataacttaaaggtgcattctttatattatatcccagaactctctagtgggattaagcccagttacccacagtggcaactggcttgaaaatgttccccttatgggcttccttcccttcctgtctcacttctccactcctgattgtgttctaaaaccacctctaaaataaactacttttactagaatccttatctaggaactgcttaatgcagatgcatagtgcttaacaacttaatatagatgcccccaaatgaagggttttaaaatgattccttggttaagagagattggaacatattaagtgaacacttttatttgaagccaagtctgattttcctaaaacagtcctaatttgggaagcccaaagctggttgaggaaaccagctttgaagctgtgacagatgtggtttgtcacagtctggctctgctgtgtatttaatgagtcaccctcagtgaatctctttaaaaatcaaagccttggtttcattatctataaggtgggtattactctcttagtgttgttgtgaacattcaatgtgtaaaatgaatgacttagcataacacctgctactttgtaaactctccatcctttgtggtggcttttattattgctacataataaacaatgactctctgaccaaacaattgtccataagtattagagaccacaaaaatgtgctgttttgaaaaccaagtgaccatttatttatgtatatctttttattccttttttcttcttcaaggcaacactgacttgttttctatttagactctgctgtggtcttttgatctgaaacattgaagcttaggtctgtttgggcaaataagatgtttatttatgtatttcataatgttgtgggaacagagccatggaaggcaaaagaaggatttattgtttaaaagactttccctctggggataatttgctaataaatagtccatcataggtgaaagtttcttggacccttggaaatttgaagcatcgtatggaacaacttttaagatgatttagaggactttgataggagaaaattgtattattcacaagaaaaattggacacaatcatggttgcctatgcctttttcctaagatagtcactttaggattgtgacaactacatgggcatcaggccactcctcttcctccctactgaccaagaccttagagattaaacttttagtgtttttgaggatagtttagccactaagccaaggttcagattgctgaggaacaaatctatcctcaccatatcaacttccaggttaagtttttccatttttattaacattaccttcttttcacttctgtgactcctcagagattttgcaccagtgaactctggctagcatagaatagacatgtcatgatgccttagcttatgtagacacaacatacaaataaatgttattagaatggaatcatttacaagttcttcttagaggatgtgatgtatgatttttttggtagaatttctaattgaagtgtagccttttaaagtatattttaaaattaggctagtcattttgagatggtttcattgcagcttctttggaatcatttttagagtagaaatgcattagtataatttttatgtcacaatcaccacacttcattatgggcataacaacagcaatgcttgttttaatatattgtaaccagagtttagaaacatgtaataccacgaaaattcattactcctaatataatttaattacaaaattgttccttggtttcataagttgcatatatttagctcttcccactactttaggagaaattaaattggatactttccatgctatgaagctattataatggaatatttgtactttttgatgccaaaaaatggttcgagccattggattggcagaatatgtgaaggaaatgcattctgcatattgttcataattttacttcctgttacggagaaaattcctttgactttgttacaaatagaatccccgggtacttggtattgatataatgccatgctcttttgtttgaattacaaatgttgtaggtagagtaggcatttttggttgttctgtagttcattttcttgccaactcaagattgttgatggtactgatggagacattattgtattagtccattttcatgctgctgataagacatacctgagactgggcagtttacaaaagaaagaggtctcacccacaacatacgggaaatcaagctgagatttgggtagggacacagccaaaccatatcattctgcccctggagcttcccaaatctcatgtcctaatatttcaaaacaaatcatgcctttccaacagtcccccaaagtcttaactcatttcagcattaactcaaaagtccacagtcccaagtctaatccgagataaagcaattcccttctgcctatgagcctgtaaaatcgaaagctagttactttctagatacaatggaggtataggcattgggtaaatagagccattccaaatgggagaaattggccaaaacaaaggggctacaggcctcatgcaagtccaaaatctagcagggtagtcaaatcttaaagctccaaaatgatctcctttgactccgtgtctcacatccaggtcacactgatgcaagagatgggctcccatggccttgggcaactccgcccctgtggctttgcagggtacagcccccttcctggctgctttcatgggctggcattgagtgtctgtggcttttccaggggcatggtgcaagttgtaggtggatctaccattctagagtctggaggatggtggccttcttctcacagctccactaggcagtgccccagttgggactgggggctccaaccccacatttcccttctgcactgccctagccgagactctccatgagagcaccaccccagcagcaagcttctgcctggacatccaggtgtttccatacatcctctgaaatctaggcagaggttcccaaacctcaattcttgacttctgtgcacccacagactcaacaccatgtggaagctgtcaaggcttggtgcttgcactttctgaagccatggcccatgttctatattggcccctttcagacacagctagagtggcagggatgtagggcaccaagtccctaggctacacacagcacagggacccttgttccaacccacaaaaccattttttcctcctaggcctctgggcctatgatgggaggggctgccatgaagacatctgacatgccctggagccattttccccattgtcttgaggattaacatttggcttcttgttacttatgcaaatttctgcagccggcttgaacttctcctcagaaaatgggatttccttttctattgcattgtcaggctgcaaattttctgaacttttatgccctgtttcccttataaaactgaatatctttaacggtacccaagccacctcttgaatgctttgctggttagaaatttcttccaccaggccgggcgtggtggctcatgcctgcaatcccagcactttgggaggctgagttgggtggatcacctgaggttgggagttcggaaccagcctgaccaacatggagaaaccccatctctactaaaaacacaaaattagccaggcagggtggcacatgcctgtaatcccagctacctgggaaggctgaggcaggtgaatcacttgaacctgggaagtggaggttgcagtgagccaagatcgtgccattgtactccagcctgggcaacaagagtgaaactccatctcaaaaaaaaaaaaaaaaaaaagaaaaaaagaaatttcttccaccagataccctaaatcatctctctctagttcaaagttctctaaatctccagggcaggggaaaaatgctgccagtctctttgctaaaacataacaagagtgtcctttgctccagttcccaatgagttcctcatctccatctgagaccacctcagcctggaccttattgttcatatcattatcagcatttttgtcaaagccattcaacaagtctctaggaagttccaaacttttccacattttcctgtctccttctgagccttccaaactgttctaacctctgctttttacccagttccaaagttgcttccccatttttgggtatcttttcagcaacaccacactactggtacaatttactgtattaggccgttttcatgccactgataaagacatacccaagactggacaatttataaaagaaagaggtataataggattacagttccacgtggctggggaggcctcacaatcatagtggaaggtgagaggcacgtctcacatggtgtcagccaagagaaaagggcttctacgggaaactcccatttttaaaaccattagatcttgtgagacttattcactatcatgagaacagcagaggaaagacctgcccccatgattccattacctcccaccaggtccctcctacaacacgggggaattcaagatgagatttgggtggggacacagccaaacctatcacttgtcaagctctttctatatttaatcagcaagacaagtctctttttgtcttttgggaaaataaatttagattgatagttggattatttaaacatttatcacacacacacaaaatattaaaataaataatataattactttcttccactttaaaatattttaaatttactttaagtaatttaaaaggcaaaaatgcaaactttgaacaactgacttattaggacgttggtacctattataaataagtttctcaaatctagcaaagtatgtaatattcactaatttactttgcacatacctttttatcgttgttatcattatccttgttatccttagcatcaccaacagcaaacacatatatgctgttttatccttgccagacacaattctaataatatatagtctgtatatttatagcatatacatatttttatacatatatttatatagtatatgtagcataggtatacttatagtctataatagtatgtatatagtgcatatatgctacatatatacatacatagtgtgtctatatgccgtgctacatatatacatacatagtgtgtgtatacttacacatatatatagtgtgtgttaacagacctatgcaatttcgtcatttccataatcctatgaatgacagtgctactattatctacatttaaaagtgagtaaactgaagtgtgaacagaggttatgtcatgatccctggttgtacagttggttaatggcagagtcaggaatagaaacaacagtggcagtgcagtctggctctatgttctggctcttaactttttgctgtttaaagaacctgtttaatatgtaaagttaagtttgcctgcaggatttttttccttggatttgtttgaaaaagaaacctcagtaggcctagtacatttgctaggaacagacaaactgtatgaagaaggtattctcaagttgggctgcacaatgaaatcacagggggagcctcaaaggacgctgctgcctgggcttcctgtctccagagaatctgacttaattggtctggggtgtggtcagaacattggactttttttttttttttgaaagctcctcatttgattctaatgtacagccaaggtgaacacagatagaaagcaagctgaccttacaaattaattcagtaaacttcctgaaaggatgtgctcactttgcctttcctgcctgtgacgtggcctactttctactcagaagtaacactccacatgagcaactacaggccctaccagattctgaattatttgactatgactggataatattccttacactgtgcttagtaaggcaataaattactaggatttttttagaattagtctcaatatctaaggttgaatcaaaatagtttttttattatattctgtcgatgaaaatttttttaactttccattccctgaatgttacaggtattagctgtttgttttatcgttaccaaacatgtcctcagaattcaagtcctgtttattaaccttatatttgtgttttttgagacccttgtttagatcacagtactgtgtaaattccatacttaattaaattagctgcacccttgaatgagtgaatgtggttttaagaatgaccttatataactattttattttatagctaatttttcatttctgggatacaaaggcagatgttatcttattaaattgtagcattatgtcatttcttatcaatttgtaggaatccttccttaactgagacatacactcaactgggcaaaccagagagagctagataatttcaggtgtgataggaagtttgcctttcatcacctctacatgatacatttcagaatagtaaaattcacatttctcctgttagaatgtttggttttttattctgcttctatagggaatggggattgtggtaatgatttttcatgagatttctccctggcattgtgcaaaactccacttaggaacagtggtctgaaaattatattgcatcacggcaaacaatgcacctgtgtgaaatgaatgcttaagtgaaaagttttatgggacagagctagttgctatgctaagaaactaatgactgtgctggtatacataatggattctatttttagatgaacacttggtcctatagcatggcttcattatgcaagaggacagaagtttcagcgttatattgtgaatattgagacattaacatatcagagtatatgccttcttagatactaaagtgactttttcatatattttaaccctgacatagttcataactagaggaaaaaagtaaagaacaaaaacagaatttcaaaataatttcaggtttctggtgtttgtaggttgagtttttccaacagttgactgcaaggaaaggattcaagttcaagtggtttatttgggaggtgaccccagaaagtgtgggcagggccatggggaagtgagataggcaagggaagacagccattaaagggtgcactatcaaataagttaccatggtgtacaagtgaagctccgtcccattggagagccctgggagacagtgcagagaggagagggagcagtggtatacccaccagttcctaataatcagtgactgggggcagctctctcaggggttattttctcagctcttctgccagcctctcctggagactgaggggcttccaggccagtgggccctaggctttgagaaatccctcagacatagatgcagctggaagctgtccgttggcatacatgaaaacacatgggcaccaccagcagcaaccactctggtggctttaatttctggtaagtcagacttttaaaatctatatcgcagtgtgcaaactggagcctgcacccattcacgaacagttcttgcttggcctgtgcaaataattaaatacataaacatgagttgccagcatttaaaaatctgcaggttcatatacagatctggatttctcaaaaaatcagaaggcatggaaatgccggccgacatacccccatggccacatttggctggggcagtgcagcagctgcctgctttagacagggtgtgtggtatgcaatctgccacatttcccaccaggctagcctacctaatttacatgaacttttaagctcatttagatgtttgagtataaatatcgggcctctatggtaacatcctatactggaagcttcaataagctaatgattgcaaagcttcatatggaatgaggttaattctgtcacagtgggcctattggagtgctgtggcataaagactagatttttacagtggaaaaatggctgaagatcagcatatccaggtcttgctcgtaatggccataagcaaagcaattatgctccaatcccaattcttctctgtgatgtatggatctaaagtgtaggagccctgaggtccctctctgacttaaaaggctattattccaaagtgactttcaggtgtcattttgctaggtaagatttataaatatgagtccttggcaaaggattttcgtgtcgaattgggccattaatctagggaaaataagaatggtggactccaggacaccaggcagaatgacttcccttggttcccttggttgaatgaatgggattaacttcacccccagatcaaggcagtgagcattgactggtttagccaaccaatgtagtccacccttttctcaccgtagagctgtgctgtctcatacagtagcctctagactcatgtcactgtttacagttaagttttaattaattaaaattaaattaaaaattcagtttctcaatcccactacctacctttcaggtgctcactagccacctgtgtccaggtgccatttccatcattgcagaatatgttattggacatcactgcacagagcttggatcaggaatggctcttcagagccaatgcaaagtttcttgcaataagaagcttccttgaacttgtggggaaagaaactttccttctttttctggattatgtgctgcaaggatgtaatatctggactcacttttgttatcttgttcccatgaaagaagatattggagtagctcagatgccactttgggagctcaaaggggaagctagccctgcagaagacaagccagtgaagaaccaagtccttaatgatgtcatttgagataccagatcagtccatttcagttccatgaatgaatcaatccccttcataggctatgccagtttaagatagagtgtttgtccctttgcagttagaattactgactgacacattggacaatcatttatttgaaggaaggcagagactcaggtgttaaggatccagctaacatctggcccataa

SEQ ID NO: 285 - DNA, 32744 bp, Homo sapiens
  source 1..32744: mol_type = other DNA
gtggactcacgcaggcgcaggagactacacttcccaggaactccgggccgcgttgttcgctggtacctccttctgacttccggtattgctgcggtctgtagggccaatcgggagcctggaattgctttcccggcgctctgattggtgcattcgactaggctgcctgggttcaaaatttcaacgatactgaatgagtcccgcggcgggttggctcgcgcttcgttgtcagatctgaggcgaggctaggtgagccgtgggaagaaaagagggagcagctagggcgcgggtctccctcctcccggagtttggaacggctgaagttcaccttccagcccctagcgccgttcgcgccgctaggcctggcttctgaggcggttgcggtgctcggtcgccgcctaggcggggcagggtgcgagcaggggcttcgggccacgcttctcttggcgacaggattttgctgtgaagtccgtccgggaaacggaggaaaaaaagagttgcgggaggctgtcggctaataacggtaacgataattattgttattaccatgctaacaggttataaacattgactgaactaagcaccctgcatgcccgttctcatttaatttcctcgccaagccaatgtagttggtgctattcttggtccctcttgacagaaactgaggaaggaggaaggaggaggaaactgaggcccagaatctagataaatttcgagaaatgggtgatacagtagccatgccctcaggaagtgtggcgtttgatggaggaaaacagaggtagtcacaaataagtacatttcaaaactgttgtctaaaacaggaagataattagatggtgtgagaacataattgagggagagtttaagtccacttggagttgtcttctatttgggatttaaaattcattatatgttatccatatttgtccagctctctttttgtatggaatcaccagatattattccctttctcatttcctttctcaacatttatagattggaggggggaaggaaaaccaaaccaggttataatgtagaattggtttaccccctattttcttgacatataacgtctggttttccacatataattttctagtagttcagtaacatggactccccccaaatcaggcctacttaggatagaagaggatttttgactcctggattttgctttaagaccagctcttggtttacttcctgcttcacccttaccttttcttgacatcctgtggcctctctttgaatttctctcactcatcaaatgttgtcaaaaataggactacttgctgctgtagtaaggatattcttgtattgtggccttagtgtattacatcacccccacgtcagacttgagtccccctggttggtttgggtgagtcagttcagtattaagctggcattcttggatcaaaattatgtggctgtcagctaactcagccatttagttgacctttgagggtactgtgctcagattggcatgagatattatgggtgtacagatatatgatgtactcaaacgttttttggtatgtttggggacaaaaacatggtttgaaattggcaagtgagaatcagagcaagataggacaccatctgggtgctctactgttttgtattctaggtgtctggacaatttagaggtgagggagttcaagagccagtttgtgtttctgtgcttcacaaagccacccttgtctaattcttgataaccagagtttggttagacagggactgaaacaatcctagtgcataggaatcacccactaaatacctgttgaattgagtaggcaggaaggcactatctgaattgactacaaaattgcgggtatgaaaaactggattgtattcaactaggttggtaaatttgtttagactttcaaattatctgaatagggtttatttggccaaccttatgcataaatctgtgtattccaaccttgataaaattaatttattgcaattaagtttgtccaggattatgtgagagagtccttcatttcatttctttagttaccaggagatgttcagggctcatctacatctcctggttaattttccttcagctttttctgtgtctcttccctaattctctttgagttcctgggagaaagaggagggatatttaaatgccctttgacatacttaattttctttgctatgggcaaagttaggaagcaaaattgactatagagttgttttttttgtttttgtttttgttttttttttttgagacggagtctcactctgtcgcccaggctggagtgcagtggcgcgatttcagctcactgcaacttctgcctcccctgttcaagcaattctcctacctcagtctcttgagtagctgggattatagggatctgccaccacacccggctaatttttgtattttttttttgagatggcatctcactttgttacctaggctggagtgcaatggtgcgctctcggctcactgcaacctccgcctcctgggttcaagcaattctcctgcctcagcctcccaagtagctgggactacaggcgcatgccaccacacccggctagtttttttgtatttttaatagagatggggtttcaccatgttagccaggatggtctcaatctcctgacctcgtaatctgcctgcctcggcctcccaaagtgctgggattacaggtgtgagccactgtgcctggcctaatttttgtatttttagtagatacagggtttcaccacgttggccaggctagtctcaaactccttatctcaggtgatccacctgcctcggcctcccaaagtgctgggattacaggtgtgagccaccttgcctggccttagagagatttcataacccaagcgattctgtgaatagatctgtatttgagacagagatgtagagatcagcagcccaaggtactctgtgaaaaaaggatagataactgcggagggcttccgtttttgtttgtgtagggaaacttggtaaaaggggaataaagaacagtgagaaaagtataaaattgtatctagaggttactttggaaattaaaaataatgttatttgtacttagtaaaacaaagtagtaaaagtttgctctttttttttttttttttttgagacagtctcactgtgttgctcaggctggagtgcactggctggcgcaatcttggctcactgaagcttccgcttcccaggttcaagcgattctcctgcctcagtgtcccgagtagctgggattgcaggcgtgcaccaccatgcctggctaatttttgtatttttagtagagatggggtttcaccatgttggccaggctggtcttgaactcctgacctcaagtgatccacctgccttggcctcccaaagtgctgggattataggcgtgagccactgctcccggcctgttaacccttttttactacagagaacttggaacctgtttcatcacttttctgcttcttccaggttcttgatacatatttgccagacttcaagatttcagaaaaggggtgaaagagaagattgcaactttgagtcagacctgtaggcctgatagactgattaaaccacaggtaaggcagtgaccataggaataaggaacattaatatatcagcttcataagtgtttaaatgactaatgtaattttataaagtaacacatattttggaaggaaatttatttattatgaaaagcaaaaagaaaataaaatcacccactatcccacctctcagataaaccatggttagccttttgatagatttctttataatttttttctatgtctatatagtcattccttgatatccatggggaattggttctaagaccttcccaggatatcaaaattctcatatgcggccggttactgtggcttatgtctgtaatcccagcactttgggaggctgaggcaggcggatcacctgaggtcaagagtttgaaaccggctggccaacatggcaaaaccccatctctactaaaaatacaaaaattagctgggtgtggtggtgcgcatctgtaatctcagctacttgggagactgaggcaggagaatcccttgaacccgggaggcagaggctgcaagtgagccaagatctcatcactgcactccagccagcaagactctgtctcaaaacaaacaaaacaaaattctcagatgctcaagccctggtataaaatgatgtgtagtatttgcatatagcttatgtacatactcccacatactttaaattatctctagattacttataatacttaatacaatgtaaatgctatgtaaatagttgttatactgtattgtttagggaataatgacaagaaaaaaagtctaggctgggtacagtggctcaggcctgtaatcccaccactttgggagacttaaataggaggattgcttgaggccaggagttcgcgaccagcctgggcaacatagtggcaccgtgtctctacaaaaaaaataaaacataaaaaaatttaaccgggcgtggtggcacctacttgtagtcccagctacttggggggccaaggtgaagggtcacttaagccaaggagtttgaggttacggtgagctgagggcaccactgcactccaacctgggtggcagaaagagaccctgtctcaaaaaaagtctgtacatatgcagtacagatgcagtttttttttttttttttgaggcagagtttcgctcttgttgcccaggctggagtgcaatggtgcaatctcagcttaccgtaacctccgcctcccaggttcaggcgattctcctgtctcagcctcccgagtagctgggactacaggcatgccacacctggctaattttgtatttttaacagagatggggtttctccatgttggtcaggctggtctcgaactcctgacttcaggtgatctgcccgcctctgcctcccaaagtgctaggattacaggcgtgagccaccgtgcctggccttgcagttttttttcccccaaatatttttgatctgcagttgattgaatccacagatatggaactcatagatacggacagccaactgtatttcatttttaaaaaaatcatacactaaaaacttttgttaatttttttaacttttttttttttttttttttgagtcggagtctcactctgtcgcccgggttggagtgcaatggcgcgatctctggctcaatgcaacctccgcctcccaggttcaagcaattctcctgcctcagcctcccgagtagctgggattacaggcacccgcaaccacacccggctatttttgtgtttttagtagagacggtttcaccatattggccaggctggtctcaaactcctgacctcatgatctgcccacctcggcctcccaaagtgctgggattgaggcttgagccaccacgcccggcctctaatttttttaacttaataatcaggctatgaatattttcccgtgtcattaataaattttcttctcttttcttttttgttttttttgagacagggtcttgctctgtcacccaggctggagtgtgcacttcagtggcgtgatcacagctcactgcagcctccatctcctgggctcaagtgatcttcctgccttagcctctcgagttgctgaaactacaggtgcatgccactgtacctggccaaatttttctacaacataattttaatggctatatggtattccattatttggttctttatattacttttaccagtgaaattgctggtctaaaagaatgcgtatttttggccgggcgcggtggctcacgcctgtaatcccagcactctgaggaggctgaggcgggcagatcacctgaggtcaggagttcaagaccagcctggctaacatggtgaaaccctgtctctactaaaaatacacaaattagccaggcatgatgacgggtgcctgtaatcccacttactcgggaggctgaggtggaagaatcacttgaacctgggaggtggaggttgcagtgagccgagatcgcgccattgcactactgcagcctaggcaacagcgagactccatctcaaaaaacaaacaaacaaaacatatttttaaaaacttttgacatgtaacaccaaattgccttgtaggaagattatgctgatttacctaaaacagtatatattcacataggcataaatgtataacttaaaataggtaatatatttgcatggtgcaaaaatcaaaagaatataaaaagcttcatggtttaaaatcttcctccagccttgttacttcttcactctcaccatccataggtaaacacttttttttttttttttttggagacagagtctcactctgtcaaccaggctggaatacagtggcacaatctcagcttactgcaacctctgcctccctggttcaagtgattctcctgcctcagcctcccgagtagctaggattacaggcacgccaccacacctggctaatttttgtatttttattagagatggggttttgccatattggccaggctggtcttgaactcctgacctcaggtgatccacctgccttggcctcccagagtgctgggattacaggcatgagccatctaataaacacttttattaggttcttgggtttgagtgtttgtgtgttattccccaaaccagataccttttgaagggaataaatctctataaaatgaaatgactgctatttgactaggattgtaatctgcagccacactgtcaaccattacaaactttttcagcttcatactattggaatatcagattactttgggtttctactaagatttccttttagtattttacaaagctctctgtcattatctgtcctagtagtaaacagcatcattgatttccatctaggtcctattagtcataggtggattatggtttgttgagttctatggataaattatagcaaaactgagtttgtaatccttaaaaaagggcaatatgaaacatacaagtttgggagagaaatgataggaaatatatttgcttgaagtttctggacagtgatgaattagaacaagtgtccatgtgtcctgtgctgacttctgagtgttggacagtgagggattgtcattggattttaaattgacccaattttggaagcttcatagatctgtttctgtaaacagatccaatttcaacatagaagttagcaaacataaatgtggaaacacaaagtccattaaacttccttcagacttagtttgtgactttgattaacagttaaaattgcatgctggattatgttgccatttactgactgctgctaatcccttatatacaagaaaaaaatgtaggtgttttctctctgggtaagatgaaagtaactccactctattttacttgtggtaatgtaacaggatctcttatcccttgtgaaagtaggagaggatgtccctggagaaatggcactgcctgggatgggaccatcttaactaactatacttctaatgaagtcttgtcttactctgtttattctattatattaccagtttaactcatgactttctctttaatagaaataggcaagtcatatctcactgactggatagcaaggtgtttgagagcatctgtcacaccaaagtctttgttttgctcaggagctggtagtcccctatttcaccctgcttagaatgcaccctcttgcagctttccccaacccggtctgaacctgcaccttttgatttatagagcttgtcaagactagttatttttggtttgagagtgaagaaagatgggaggcaatgggaggttaatttcagatgaatgtgggaacaggttacattgctttgtctgcaatcttcctaatttgtatttgtcttccccttccatttatctcttaccctagaaaaagtcaacgttcattcttagcttgtagaactccgcaggtctgtctgtatcttttaagtattttttacatcaggaaaccatctctgatcctcttttatgctgttctccttctctgcacttccagagcgctctctgttaatgccctcttgcagcaaggatagccctatattgtaattgtttgcattcccccattcaattgtgcgttcttggagggaagagatttttttttgttgttgttgtttgagaaggagtctcgctctgtcccaggctggagtgcagcggtgcaatctcggctcactgcagcctccacctcctgggttcaagctattttcctgcctcagcctcccgagtagctgggattaaaggcacgtacccaccacgcccgctaatttttgtatttttagtagagacgggtttcaccatgttggcctggctgatctcgaactcctgacttcgtgatccgcctgccttggcctcccaaagtactgggattacaggcataagtcactgtgcccggccgagattttatatctctatctctgtctgtctgtctgtctgtctgtctatctatctatctatctatcgttttagtcttcgctttttggaaacaaaaatgggctataagacacgatggatggcattgaataggcagtttttagaggaacctaattggttcatagcatacaggataggctttttccttgggtctttgtaggaatattggtcattaatagctatttttccatgcagaatatttctagttttgcaagaatctgaagctgtggtagattcagataattttgaaatgtgaagctgattctcttgcttggcaacttgatttgtttgggggaatgtggttgacgcatgtgccttttttttttttttttttttggtgagacctgttgacagaaattcaatcttgattaagggacgcaggaaggcatccagttcccaccatgcctggggctctctcatttaaacagctgcctttggctctggcctgttccatttcccactaggccctgtggactttaattttggaagatttcacatcctcatatttattatttctgggggaggtagtgtcgtgaaaccgaaattacccagtagttagcttttcgttttcttgatgtacttgtcctatcagccttaattgaagagagtcagacttctcaatggatatgtatttatttattctctttttccagggagaggggatggtctcctgagttggccattctagaccaaaatatagcttaaaagaagcttttttaaagaacaggtcatgttaggaaaataatattttgtttttaaaatttcacctaaagattaagtgtacttaggtttgcacccctcgccgtttgttccccactaatcaaatgtagtcttagacctcagaggacagcctttcttctgctgcttgaaccctcttcatagtctctttactctagaatatcactgaggttttcactaaccaccatcttatatagaggaaaaacttcatatggaaaagtatacttaaaaaaagaggaatcaatggattttttaaaaaatttatgggaagattcagatcagagctttccaaatatatttataacaggatttgtaatttgctaaagttttctttatgagcatatcagggatgcttagttttcataaagggcaggatttgtctttgttgaacaggatcttatgatttgattacctacctcctttttgaagcaatgtttataggaaaacttgtgcattagagagaccccagattttggaatcctgcagacttgttcttttaaaactcaacactgctatgtattagtttggtgatcttggaatagtgtaacttctctgagcttgtttccttgtttataaaatggtgatggtagcatttatttataaagacatctatctattgtctatattgttaatgcagtttaaacgagatgatttatgtgaagtgtctggtaaggtgcctggcctacagtagacagtatttggaagttattatctcttgctccatgacatttgttatttatctatttaaatgtgaatttttttttttttttttgagacagagtcttgctttgttgcccaggctggagtgcagtggcgcgatctcggctcactgcaacctccgcctcctgggttcacgccattctcctgcctcagcctcccgagtagctgggactacaggcatccaccaccacgcctggctaatttttttgtatttttagtagagacggggtttcactgtgttagccaggatggtctcaatctcttgacctcatgatccacccgcctcggcctcccaaagtgctgggattacaggcgtgagccaccgcgcccagcttaaatgtctatttttaaataaataggcagtggataagaacaccaccttcggtgtctattccatttggaatcctggctttactgcttcttagctgcatgactgtgaataagtagtaaatctctctgtgcctcaagtccctcagtatagaatgaagataataacagtacctactttataggattattgtgaggatttagtgagttaatacatgtaagacactgtcaacagtgtctggcatgtcataagtgctcattaagtaatagctgttggccgggcacggtggcttacgctagtaatcccagcagtttgggaggctgaggcgggtggatcacttgaggtcaggagttcaagaccagcctggccaacatggtgaaaccccgtctactaaaaatacaaaaaattagttgggcatggtggcaggtgcctgtaatcccagctactcaggaggctgaggcaggagaatcacatgaacccgtgagccagaggttgcagtgagccaagattgtgccactgcattccagcctgggcgacaagagtgaaactctgtctcaaaaaaaaagaaaaaagttaatagctgtttttatttttaactttttcaaatttatatacccttttattaagtcaatgccccaggaatcatttttagttctatatagaaatcttattatttgtttatttttaattttttaaattaattattattatatttttgagatggagtcttactctgttgccaggctggagtgcagtggcacgatcttggctcactggaacctcctcctcccgggttcaagctattctcctgcctctgcctcccgagtagctgggactacaggcgcatgccacgatgcccagctaattttgtgtttttagtagagacagggtttcaccatgttggccaggatggtctcgatttcttttttttttttgagacggagtttcgctcttgttgccccggctggagtgcgatggtgcgatcttggctcactgcaacctccaccccccaggttcaagcaattctcctgcctcagtctcccaagtagctgggattacaggcatgcaccaccacacctggctaattttatatttttagtagagacagggtttctccattttgaggctggtctcgaactcctgacctcaggcgatccgcccgccttggcctcccaaagtgctgggattacaggtgtgagccaccgtgcccggctatttatttatttatttatttatttatttatttatttatttatgagacggagtctcacactggagtgcagtggcatgatctcggctcactgcaacctctgcctcctgcattcaagcgattctcctgcctcagcctcccgagtagctgggattacaggcatgtgccaccaaactcagctaatttttgtatttttagtagaaagatggggtttcaccatgttggccaggttggtagttctatatagaaatattagaaagagaatatgtaacatttgggtaagttaatagtcaatttataggccacgtaaatgggaaggattatttccttaaatcaagagattagacaatcattgcttgtcatgaatatttaataaaaatttgagaaagctcagtttcttttgggctgcaaacatagatctagggaaataaatactgcttaactattttgttgttgttgttgttgttgtcttttaagagacagagtctcactctgttgcccacgttagagtgcagtggtgcaatcgtgggtcactgtggcctcaaactcctggactcaaatgatcctcccacctcagcctcctgattagctgggactacaggcacacaccaccatgcccagctacttaggaggggttgaggagggaggatcctttgggcccaggagttcgagtctagcctgagcaacaggctagattctttaaaaaacagagatgaaaaagaaagaaaaaaaggatgtgaagggttaaatttgaacactttccaggtagttttcagcatcatgctttggtggaatcatggttttgaggctaagtggggttgctgcatgttacattcctgcctcttccttcccccagctttagtcgtcttcattacattcatgcctgggaagccttcccagtgacctgagttaggcattaagatcatgggaatccaagattttcccatgtcttctagcatatttgttcacaagaaaaggaaaatttcctccttgcagcaaggggtttttaaccactgtcagtaccatggaatctttcactaaaaatcctttgaatagaaatgtggtcaaggagaggaaaggtatcagcagtgataataccttacaatagtgtatttcatagcacttgaagtagcttcttatttgattatggtaagaaggtaggcagagaattagtgacttgcctattgtcatatacatgtggtaaatgccagagagggcattctggacttctgttagttggaattgcttttgactacaggtgacagaaaatgtggctataatggtttatacaataattattattattttctgagatgaagtctcactcttgtcacccaggctggagtgcaatggcgcaatctcagctcactgcaaccttcgcctcctgggttcaagtgattctcctgcctcagcctcccgagtagctgggattacaggcacctgccaccacacctggctaatttttatatttttattagagacagggtttcaccatgttggtgaggctggtctcgaactcctgacctcaggtgatccgcctgccttggccttccaaagtgttgggattacaggtgtgagctaccgtgcctggcctatttttttttagtataagaagtctttttagcaggtcatggaaaattgtaaaaaacaccagaagtctagaggtatatagtagctgatatttgatctttaatagtcattagctcattgatgttaagccctatgtttattgttctcttggccatctactcatgtataccagatgactgccatagctccagcttgccttcaaggcaagaagaaggataaagggaaagggcaggaataagggctatagctgttttcaggaaagaaaattttttcctaggaatccctcagcagattcttacttagttctcattggccagaactgtcccatggctaccccaagcttggaaagtggctatcaggaggtaacttccattttaatgtacttgctactgttttggtcatggtcaatgaaaaatatttaatcgtaccttgacttcagccatgttaatttctaattctctatacttagagttcatactgtataatttaaacaaactgtcttatttattgtgtatgataggaccttagcgtctatgtagatgttaagttcctttgtgttcaggactacatctacttttttttctttttttttgagacggagtctcgcactgttgcccaggctggatgcggtggcgtgatctcggctcactgcaagctctgcctcccgggttcacaccattctcctgccttagcctcctgagtagctaggactataggtgaccgccaccatgcctggctaattctttttgtatttttagtagagacggggtttcaccatgttagccaggatggtctcaatctcctcaccctgtgatccacctgtctcggcctcccaaagtgctgaggttacaggtgcgagccactgagcctggccgcttagatctactttttgtgtgaagatatagagtgtcatccttgaatgttactgagaaacattcaagggcacacagcttatggcccctagcaagtacacactattgtgaaccactgacaaaaagcttattgagttaagcttaataatgaaagtagaaatggaggagagaggaaaatttagactggggataccaaagaacccctattccagacagaagactatggagaatggatttacttggaaataaatacagtattcttttctatgcaaatagcttaacttcatgaacacccttctttaattcacaaggtaagagggcagaaggatgtagaaagaacattgtgctgaagtcacgagcctcaggtccagatctggctctgtttttacgtaactgtgtgatactgggcaagtcatttaatctttctgatcttcagcttctaggttgggaataattgctgctttacaggattgttttgcatatcagaaagaatacatatttagtatatcatggcacctggcatgtaatgaacacctctggtaactgtttttaccatgatccttaggatttttgttgtgtgatcttggagaacccctttttgctttaagttaatatcttatagactgcaaaggttaggtgttaatcaaagtttcctcccaattctaaaatatcatgtttctacactaagtacctcaattagagcattgttataaagatacttgtggaattctggctgcagtgagcataggagagaccatgggaagatgatgttctctggggtctagattgatgtcactgtataaatgaaatatttgttataacagatgtttctggccgggtgcggttgctcatgcctgtaatcccagcactttgggtggccgaggcaggcagatcacctgaggtcaggagttcaagaccagcctggccaacatggtgaaaccccatctctactaaaaatagaaaaattagccaggcgtggtggcgcacgcttgtaaccccagctacttgggaggctgagggaagagaatcgcttgaacccaggaggtggaggttgcagtgaaccaagatcatgccactgcactccagcctgggcgacagagcaagacaccatctcaaacaaaacaaaacaaaaacaacaacaataacagatgtttctgagacactataaggaccagaagtacattatttttatttattttattttttgagacagagtctcgctctgtctcccaggctggagtgcagtggtgcggtcttggctcactgcagcctcccgggttgaagtgattctcaccgagtagctggaactacaggtgcagccaccaccccaggctaatttttgtattttcagtagagatggagtttcaccatgttggccaggctgttctcgaattcctgacctcaagtgatcctcccgccgcgtcctcccaaagtgctgggattacaggcatgagccaccactctcagcccctagtccattttgaattgccctagtccactgagagaagctgtgaaatgctggccaaaccactgaacggctatgtaggttgggagtaactaatctcatgattcatctcagtggatagcttatgtggtatagtttagagaaaatgagtgctgcagtgcccagagttggggagagtttggggaactggcacactcctggtaatgtaagtgggtgtttttttcttctgagggacattttcacagtatgtgtcaagagcttttgacccagcagttccacctcttaagatttatcttaagggaagaattatggatgtgtacagaaatttagctacaaggatgatgctttagcagtatctttaaagtgaaaatattggaaaaaggctgaaaatcaaggataagtaattatggaacagatacagccattaattgatatgtctatatttattgacatacaagaatattcataatatgtgaagcagattcaaactgtcaatgattcatttaaaaaaataatagtttgtatatatatgagggagaagacatctggaatagtgtagcattataggtttatttatttatttatttttgagccggagtctcgctcttgtcacccaggctggagtagagtggcgtgatcttggctcactgcaacctccgctgcctgcgttcaagggattcttatgcctcagcctcctgagtagctgggattacaggtgcccaccactgcgcctggctaattttttgtatttttagtagagacagggtttcaccattttagccatgatggttttgatctcctgacctcgtgatccacccgccttggcctcccaaagtgctgggattacaggcgtgagccaccgtgcccggccgcttttttgtatttttagtagagatggggtttcaccatgttggccaggctggtctcaaactcctgacctcaggtgatccatccgccctggcctctcaaagtgctgggattacaggcatgagccactgcgccacactagaaaggtattaatttaaataaacatttattcaagtgattactggcatctacctcccttctaagatacagatacttttaagtacatgtcgttccctggataaaaacaaatggctggccgggcgcggtggctcacacttgggaggccgaggtgggtggatcacttgaggtcaggagtttgagaccagcctggccaacatggtgaaatcccgtctctactgaaaacaaaaaattagcaaggtgtggctgtgggcgcctgtaattccagctactagagactgaggcaggagaattgcttgaacccggaaggcagaggttgtggtgagctgggatcatgccactgcactccagcctgggggacagagtgagactccgtctcaaaaaaaaaaaaaagacaaatggctcattgggtttcattggcaaattattggccactgagtgtggcctttaggctatttatcagattactttcagctattttattaactagattaggcttgagtaggagctgactttaaaccttcacaggtttccacaagatagagtgcaaaacttcgtacgcaggagtagggaggggcctatttaacttgttcccttatccttgcttctgttcctatgctgcatgttgtgactcttacgtgtatttcaaagttgtcgtctttatactcagaaatagtattttttgagaatatttctaagaaaagacaacttatatttgacaaaactgtgttgaactcttactatgtataatgcactgtgttaagcaccttgatggttggatggatggatggatggatgaggtatacacaagtgagtaaaatctatctttgtttttaggaacttcgagtctactgggagagacatttacatagttaatataaaattggatgataagtgttacagtggagatataaacaaagcacaattggctttggagaggcaacaattttgtatgataggtggaaattgggaaagagttcatagagatttgacctggactttgaatgatggataagattttggttggtaggcataaaaattagtggtgtattttagaaattgggttattcagggcagagagagaataaattgggctagaggaggctagaaatgagaaaatggtaaattgagggaaaataatgacatggtgaatgtaaaacacctagcacagtgtagatacttatcaaactttgcctcttttaaaaaacatttagaaaatttatttatttattttatttttatttattattattttttttgagacagagttttgctcttcttgcccaggctggaatgcaatggcgcgatctcgactcactgcaactttcacctcccaggttcaagcgattctcctgcctcaccctcccgagtagctagaattacaggcgcctgccaccatgcccagctaattttttgtattttttaagtacagaagaggttttgccatgttggtcgggctgatcttgaactcctgacctcaggtgatccacccgcctcagcctctcgaagtgctgggattacaggcgtgagccactgctcctggcctaaaatttatttttaatttcaattttttctttttggtttttctttatatttgctgattacttaaagataatttttatttttttagagatagggtcaactacttacagataatttttatctttttagagacagggtcaactgttatacttagagataattttaatttatttagagacagggtctgtctatgttttgtaggctggacttggactcctggtctcatgtggtcctccctcctcccaaaatgctgggattacagacgtgagccactgtgtctggcccacttctttctaattccaaacatatctacctcaaggagtatctttaagttacctgaaaaactaatgtttaggttgattggacaaagtaaggctattttcagtaaattctaggtggtttgcaaaattacaaacgtggtagtaaaaccaaagtaatgatgggaatttacttagatttatgtgcaaccatttctttcctcagaaggtgacctgctgagaaaagtggtacaaatactgggaaaaacctgctcttctgcgttaagtgggagacaatgtcacaagttaaaagctcttattcctatgatgccccctcggatttcatcaatttttcatccttggatgatgaaggagatactcaaaacatagattcatggtttggtaagtgcctgctttctctggctattttaaggattagtggcttgctttgtgctgaagacctttcaataatagaaggggttgcaagaaaagaactaaaatatcaacttctttctgcaccaagacattctgtcatccatgatattatgggaataattgaaatgcccagtatttggggaatggattgtaagtacaaagcatatgttgttttgtagttcagaatggcagatttaagctttagggacctatgggaaagttcagatgaaccagtgttcaacaaaactccatgctcaaatatgtctgtagtgatggcagccacataaaaactttgtctactatcattagggatagattatatcacagctaggatattgacattcatacaatctaccagttttactcagatttctccagttttacttgtatgtgtattaagttctctgtggttttatcacctgtgttggtttatgtgtctaccatcacagtcaagatcttttataattaccctcacctccctcctgccacccctccctcaattcattttttttttttttttttttgaggctgtagtctcgctctgttgcccaggctggagtgcagtggtacaatctcagctcactgtaacctccgccactcttgttcaagcggttctgcctcagccgcccaagtagctgggattacaggcgcccaccagcatgcctaactaatttttgtatttttagtagagacagtgttttgccatgttggccaggctagtcttgaacccctgacctcaggtgatccacccacctcagcctcccaaagtgctgggattacaggcgtgagccactgcgcctggccctcaattcatttttaaatggaaggattatgctactaagaacccattcccagaaacagtattgcttggccaatggtaagtaagaatgtggttacatttttacattactttgaaataatatctgagactagttgttgaggcccctttgattctttctctcatgtctccatcctccttatcgggagaaatcactatgaatatgtggtggggaacagaagtgagtccattgcagctgtacttatccgtatagtgcactgtccaaatgtgttgacaggtgccattttttggaaaaggactttaatggcatctagtggggatcctgagaggagtcgtctgttggaagtggtgtgggaggaagggtaaataaatacaagggccagctgtcctgcggggatcttccccatgcccttgcttcactggaactgtaaggaaatggctgggctgtctgaggatttctttttctaagcttttctttaaaataaaaaagaaaagaaaagattagcctaagaatactgttaaatacaatttggaagaaaaaaaatgaccccactatttttccaaaactaccttagttttaaaacatttttatttttttttctttttgtttttgccagagttcttttggctaacaaaactacctcagttttaatatattactttccaatttctttcccaaataaatagtcacatctttctacacagttgcaatcagaatgtacatgcacagggtagttattgctgtgtctcactgcattcctgaaactatcagtaggctgttggtagaacagacccttcactgctttgtactgacttctgggcacagtagaatctaagataaaatttcttgagagaacctagctctgctctaccctcacacaccccttattcctcccaccaccccactgaggaggaaactctgtaagactatacagtatctcttgtaagccctacagtttttgatggttacagttttctttcgttttttttttttttttttttttgagatggagtcttgctctgtcgccaggctgtagtgcagtggtgcggtctcagcttactgcaaattccaccttccaggttcaagcgattcccctgcctcagcttctcaagtagctgggattaaaggcatgtgccaccacgcctggctaattttttgtattttagtagagacggggtttcaccatgttggccaagacagtctcgatctcctgacctcatgacccacccgcctcggcctcccaaagtgctgggattacaggtgtgagccatcgctcccggctggttacagttttctttaagaggaacatgatatatttagggagtagataaagccagttcatatttgtatgaccctaaatgtgtaccaaacaaagataaggagttattcacaatgcagaatctgtacttttccttttttataatacattgttcaatgttgccagtttttagtgattgttcttatagtctatctcggatgtgtaatgtgtactttttcttttgattgctagaactttgcttgtacttgccacatgagttggaagtgtactggtagggagctttagtttgcattttaaatgcgtgatagtgatttgttttgcttccttgctgatcagacaatgatgatcttcccttttcacagaggagaaggccaatttggagaataagttactggggaagaatggaactggagggctttttcagggcaaaactcctttgagaaaggctaatcttcagcaagctattgtcacacctttgaaaccaggtaagaaaacatcttagaaaaaagctccttgatagaatggtgggacagtgttttagaagcctgaggttctgggaaaattacctaaatgctctatctctttgtttattattggtgaaatgggctaattcatttcatgataaatgtaaaactaatgatgtgctacacttaaaaaaaaatctcttggagcttaagctaacatagaatttttttttttttttctttaagatggggtctggttctgtcacccaggctggtggagtacagtggcacagtcatagctcactgcagcctcaaactcctgagctcttagtaactgggactacaggtgctcaacaccatgcctgactgatttttaaaaaattttagtagaggagtctttgctagccaagctggtcttgacctccgggcttcaagtgatcttcctgcctcaggggcttcccaaagtgctgggattataggtgtgagctactgttcccgggggctaacatagaattttattgccagatacgtaactgttatctttttgtgacaagatttaatgtaacctaacctgggtctgggtgggaaataaaacagcaagaaagaagactgtactgcttgccattgtacaagaattctttgagttatgtatctgattttaaaagatgatggatcgcttctcggccttttggctaagatcaagtgtaaaagatgattgacatttaaactggtgggtactggatctgcagaatattgtctgtttggttagaacataagaagcattctttaagaggtcataaaatccttcttgaaattgattcttttgaaaaaaacagctgtatttagatttaactcacacatcatatgattcacttaagataaacatttcagtgtttttaagtatattcacagagttgtgcaaccatcatcctatcagtttagaacatttgaaaagtattatgtgggtaaatctgaaactggtctccatcacaccatatgactactctcacctccctcctgtcacccctccttcaattaatttttttttttttttttttttgagactggcgtctcaccctgttgtccaggcaggagtgcagtggtatagtctcggctcactgtaacctccaccacctgggttcaagtgattctcctgcctcagctgcccaagtagctgggattacaggcgcccaccagcatgcccggctaatttttgtatttttagtagagacagggtttcaccatattggccaggctggtctcaaactcctgaccttgtgatccgcccacctcggcctcccaaagtgctgggattacaggcgtgagccactgcacccggtcaatatttatctttctatgcctgacttacttcacttaacataatgtccttcaggttcatccatgttgccatgaatgacagaatttcattcttttttatggctaaatagtattccattgtatatatatatgccacattttatctgttcatctgttgatggatacttcagttgattccatatcttgactattgtgaatagtgctgtaataaacataggagtgcacatagatatctcttcgatgtactgatttccttctttttggatatatacccagtagggggattgctggatcatatggtaattatatttttaattttttgaggagcctccatactgttttccataatagctgtactaattgactttactactaacaatatataagagttctcctttctctgcatcctcagggatgcagagaaatttttaatatttttcatagtgtccattctaactgggatgaaaggatatctcattgtgatttttaatttgcatttccctgatgattagtgatgttgagcattttttcacatacctgtttgccatttgtatgtgttcttttgagagatgtctgttcagctcatttgtccggctgttgagttatttgagttccttgtgtattctggatattagtcccttcttgaatgaatagttagcacgtattttctcccattctttagttgtctcttcactctgttgattgtttcctctgctgtgcagaaagttttaaatttaatataatcccatttgtctacttttgcttttgttgcctatacttttgaggtcatgttcataggatctttgcccagaaccgtgtcctaaagtatttcacctatgtttttattttattactttatttatttatttttgagacagagtctcactctgttgcccaggctggagtgcagtagtacgatctcggctcactgcaacctccgcctcccgggttcaagtgatcctcctgccccaacctcccaagtagttgtgactacaggcgcgcaccaccacacccagctaatttttgtatttttagtagagatggggtttcgtgatgtcggtcaggctggtcttgaactcctgacttcaagtgatcctcccacctcggcctcccaaagtgctgggattagagtcatgaaccaccgccctcggcctcccctatgtttttagttgtttcatagtttaaggtcttacatattagtctttaatccattttgagttgatttttgtatatggtaagaaatagatgtctagtttcatttttctgcatttaaatatctagtttgatcagcaccattttttgatttttcaaatttaaattttattttagagatgaggtcttactctattgcctaggcttgtctcagaattcctgggcttaaacaatcctaccacttcagcctcccaaagctagcaccatttattgaaaagactgtccctccaccaaggaatgttcttggtgctgttgtcaaaaatcagttggctataaatacgtggattttttcctgggttctctatcctattccatttgtctgtgtgtctgtttttatgccagtaccatgctgttatggttactatagctttgtaatgtattttgaaggctggtaatttgatgccttcagctttgttctctttgcataggattggtttggctatatggggtcttttgtggttccatgtgaattttaggttttttttcttgagacagagtctcactcttgttgcccaggctggagtgcagtggtgcgatcttggcttactgcaacctccgccccccgggttcaagtgattctcctgcctcagcctctggagtagctgggattacaggcatctgccaccacccctagataatttttgtatttttaatagagatggagtttcaccattttggccaggctggtctcgaactcctgacctcaggtgatctacctgcctcggcctctgaaagtgctgggattacaggcgtgagctactgcgcctgtcctgcttatacattatttatggctgttgtattcttactaatttttctttccatttgttccatcaattagagagagaggtagtgaaatctcagactgtaattatggatttgtctctttatctttataatttttgcttcatatagtttgaagctactattagatgcataaatgtttaggattgttatgtcacgttgatgaattggccactttaatttaatttaaatttaatttaatttaaatttaattttttttttttttttggctggacgtgatacctcatgcctgtaatcccagcactttgggaggctgaggtgggcggatcacaaggtcaggagttcgagaccagcctggccaatatggtgaaaccctgtctctactgaaaaatacaaaaattagccgggtgtggtggtgcgcacctgtagtcccagctactcgggaggctgaggtaggagaatcgctgaaacctgggaggcggaggctgcagtgagccaagatcatgccactgtactccagcctgggcgatagagcaagactccatctcaaaaacaaaaaattatatacatatatatacacacacacatacacacatatatatacacacaagcatatatatatgtacatacatctaatatacatgtatgtgtgtatatatgtacatatacatgtatgtgtacatacatgtacacatacatgtatatgtatatatttttgagacagggtctcactctgtcacccaggctggactgcagtggagcaatcacgcctcactgcagcctctacctcctgggcacaggtgatcctcttacctcagcctcttgagtagctgggaccacagatgccactaccatgcctagctagtttttgtattttttgtagagacagaattttgccatgttgcctaggctggttttgaactcctgggctcaagtgctccacccacctcagccttccaaagttctgggattacaggttgagccactgtgcctggccccactttaacagtttgaaatgatcttctttatccccattgaaattctgtgctctgaaacctactttgcctgatattaatatagccactctagttttcttttgattggttttagcatggtatgtctatatttaaagtgcatttttttgtagacagcatataattgggtcttgctttattatttaatattattgttgctgcattttaattggaataaatgcatctattttagccttgacatgctatgctattattttgtgtgtgcgtgtgagtctctctgccccaaaaatatttctttaggagatgaaccaaatgattgttctctgaaatgaataatgcctaaactatgttttcatggcctatcttttcttccctgtcatcttgttgcagtttaattcctttatcaggagtcagttcatatgctatgtgattaagtgctgtttcttccatgaagcctttacttgtttcttattctgttttgtttttttgtttttgtttttttttttgcagacagggtctcagtgtgtcaccccatctatagagcagtggcatgatcacagctccctgcagccttgacctcctgggctcaagtgatcctcttgcctcagcctcctgagtaactgggactacaggcacattccaccatgtctggctaactttctcagtgttcccataacactttttttctatttcgttaaaaatgtttatcaaggctgggcttgtagttcatgcctgtaatcccagtactttgggaggccaaaatgagaggattgattgaggccaggagtttgagaccagcctgggcaatatactgagacccccatctctatttatataatattgaaaagcaaaaaaaaaaaaaaaaaacgtttatcaaaataaaacatggccatggtaacatggctaacaatacttagagtttatgttaaaataacccctttctcttcccatccctaccccctgtcctttttctcaaactcatattggttttgttgttgttgttgttgtttgtttttatattttgttttacaggtgggatctcactgtgttgcccaagctggtctcaaaatcctgggctcaagtgatcttcctgcctccgtcttcccagtagctgttttaactcactattttaacttgtgctgtggttacattcataatgcctgatagtatgattatatcagcagtatttacaatgttatgattatataaatattgttcaatgccagatcaataactgtgatgcagttgcatcccttcttggtactctttggctatctttggttgtattgtcacaacccctgagccacataaagatgattctgacatcaggagatcagtggatttgcttttctttaaactttatcaatttcttaaatttctgccacactttatcttgcttcatattggacaatgatccttggaagttattactacttttttgggagagcattattatttttactatctttgctgccttgtttcctggaccttataactttcttctggatatactccttcattatgtgggagtgcatcctcaggaaactttcttaaattagtgcaggagagaaaaactttgagttctcacatatttgaaaatggcattgtttcacttttatatacaattgaaagtttatcttaatacagcattatagattgcaaattattttttatcactactctaaagacattgttcctttatcttctatttttatgtattgctgatgaaaaattcagtgcttatctaattttccttactttgtaagtgattttttttcttctttatggaagctttcagaattttatctttaccagtgtcctgaaatgtcatgagattgtgtttgggatgctttttttaaaggtagtaccttaggctggcaaataggcaagccctggatacatcatttctgtttcaaccaaagtagcttttataaactggtcttctgtataagatttaactggaactaaggtttctgtggcttagacagggtgtgtgtgtgtgtgtgtgtgtgtgtgtgtgtgtgtgtgtgtctcatctccaattattttccttggcctttgagtgctgactagcttttggtcttccgcagttgacaacacttactacaaagaggcagaaaaagaaaatcttgtggaacaatccattccgtcaaatgcttgttcttccctggaagttgaggcagccatatcaagaaaaactccagcccagcctcagaggtaagactttggaatctcaaagtggtggttatgataataatgttcaaaggatagttactggacagaacatctattatgtgtctatactgtgtttatggacacctttatgttactttttttttttttttttttttgagacggagtgtttcgctcttttgcccaggctggagtgaagtggcatgatcttggctcactgcaacctctgccccaccgtgttcaagcaattctcctgcctcagcctcctgagtagctgggattataggcacctgccaccacacccggctaatttttgtatttttagtagagatagggttttgccatgttggccaggctggtctcaaactcctgacctcaggtgacccacccgcctcagcctcccaaactgctaggattacaggcgtgagctactgcgcccagctatgttacctttaaaaatcctcataatatgggtttgtgtggttggtataaattaaaaaaaatctgtataacatttatgagttgtaggtaatatgcttaattaatttatagataaggtctcagagatactaagttgcttgcttaaggcaagtttatttcagagccaagattcaaactcttatcaatctgtttccaaaggccttgtatggatataattgttacatcttcctgatgtcaaatatctttgttcttctgtattactttagctctctttttcttttttttctttgagacagggtcttgttctgtcacccaggctggagctggagtgcagtggcacatagttcactgcagactcgaactcctgggttcaagtgatcctcctgcctcagcctcccaaagtgctgagactatataggcataaaccaccgcatccagccaatagacaaatttttattttatttatttttgagacagagtcttgctcagttacccaggctggagtgcagtggcatgatcatggctcactgtagccacaacctcctgggctcaagcagtcttcccacctcaacctcctgcgtagctgggactacaggcacaagccactgtgctcagctaatatttttgtatttcttgtacagacaaggttttacgatgttgcctaggctggtcacaaactcgagctcaagcaatccacccacctatgcctcccaaagtgttaggattacaggcatgagccactgcacccaggccagagtagagtttataatcagagtttagtgtttaccctctctgtggttttcttgcttctgaaattttgcctcaaaaatttcatcttttttttttttttgagagagggtcttgctctgttgcccaggctggagtgcaatggcatgatcttggctcactgcagcctcgacctctcaggtgtaagcaatccttctgccttagcctcctgagtagtggagactacaggtgcagggcaccaggtggccagctaattttcgtattttttgtagagatagtgtctttccatgttgtccaggctggtcttgatctcctgagctcaagcgatctgcccacctatgcctcctagagtgctgagattacaggcgtgagccaccatgcccgacacatgccatccttttttttttttcagacgagtctcgctctgtcgcccaggctggagtgcagtgggcgatcttggctcactgcaacctccgcctcccgggttcaagtgattctcctgcctcagcctcctgagtagctgggactacaggcgcccgccactacgcgcggctaattttttttttttttttgtatttttagtagagacggggtttcaccgtgttagccaggatggtctcaatctcctgaccttgtaatccgcccaccgtggcctcctaaagtgctgggattacaggcgtgagccactgtgcccggccggaaagatttcttaaacaggacacacacagaaaagcactgaccataatgggggtggaagaggttgataaattcaggcacatttatctaattaaaagataaagagatgaaaagccaacccctagagtaggagaaactatttgtaacccatgaatcctacaaagggcttatatccagagtatacaaagaattacaaatcaattagtaaagaattgacaagccagtagaaaacaggcaaacgacttaaactagcacttacgaaaagggacaaccaaatggccgatacacatgtgaaaatgtactcagtttcactgatcatcagagaaaagcacattaatttcctatgacccagcaatcttattttttttagaatagttaaaatgaggagataacccatcaatagtagactgaataaatagttgcacatccctacaatgaatattatacagcaatgaaagtcagtgaattagagctgtgtgaattgtcgtggttgaatctcacatacataaagttgagtgagataagccagacagaaaagaatacttgtagtagtgtggttacattatacaaaatttttgggtgcagcacaccagcatggcacatgtatacatatgtaactaacctgcccattgtgcacatgtaccctaaaacttaaagtataataataaaaaaaaaaaaccacaaaattttttgtttttcttcgaaactaacataccatgtttacgtaatacgtgcttatttggtaaaacaataaggaaattatctaatgatcacgctttttttttttttttttcaaggcggagtctcgctctgttgcctaggctggagtgcagtggtgcgatctcggttcactgcaagctccgcctcccgggttcacgccattctcctgcctcagcctctcaagtagctgggactacaggcgcccgccgccacgcctggctaattttttttttctgtatttttagtagagacggggtttcaccatgttatccaggatggtctcgatctcctgacctggtgatccgcctgcctcggcctcccaaagtgctgggattacaggcgtgagccaccgcgcccagcctatctaatgatcactcttaaaatcaaggtagcagtggttgtcagtgttctgtattttggcctaggtggtgatttcataaggtcttccactttgtagtcatttaagtatttttgttttgtgcactttttggtatgtattagatctgtcattatgctctttgttttgtattcatcttattgatttatttatttttagacagagtcttactctgttgcccaggctggcatgcagtggcacgctcatggcttactgcagccttgacctcctgggctcatgtgattcttccgccccagcttcctaagtatctagcaccacagatgcgcaccagcacgtagggctaatttttaaaaaattttttgtagagacagggtcttgatatgttgcccatgctggtctgaactcctggcctcaagcagtcctcctgccgcagctttccaaagtgctaggatggcaagcatgagctaccaggcccagccaagtttttctttttaatcattttattgaggtcacatttatagacaccggtgtatttaagaactaaaatgttatggttgaatttcaaaaactatcaacaagagagattagatttttagagcagagataatagcactccattttattgccctttgtagtttgacatcctttcacatttctcaggaacatttggatatctgtagtatatatatttattatatattttgtcaatttctctaccatagaagatctcttaggctttctgctcagaaggatttggaacagaaagaaaagcatcatgtaaaaatgaaagccaagagatgtgccactcctgtaatcatcgatgaaattctaccctctaagaaaatgaaagtgtgagtagccacaacttcttactgccaagggcagacatattgtaccttgtataccacttgtaagtttcttttctgaatttacactttagattgaatagattaaaattaaaaatggtacatctgtaatatgtttggtgtacctcaagcttgagaaatgcctaaaactgtgaccatggtgaggtgaattgttacgtgtgtcctggagggcactcacatcttagttggcataggttttacctctttttgtttttacggctaataacaagctgcatacatgatgtttgtttatatttttattagttaagaatgtattttgctgcaagtaatagtcttcaactggagtggtttaaagaataatgaattatttgtttcacagaggtctaaaagtagtttgctgctggctttggttcagtggctgatttttagctttttttttttttttttcgtacttgttcttcaagatgctgctctgtgtttcttagattttttcttttgcttgttgtctcactggcacaagatggctggtgtatctctaggtgttatatttatgtttaagagaagaagaagagtacagtaaaggaaaaagggcagcatctatatcaggaaacttaagtctttcgcagcaacccttaaatttcatttcattcgcctagacttgtgtcacttggattccctagttgcagtagaggctgttgaggcaagtacaatacttacttgtagcttagtgcgttgctgctcctcccgaaattggggttttgttaatgagaaagagacagaatagatattgggatggcaattaactctgccatttgatcatttgatggtgagcagttagagtccctccttactcttccaaaccaccactagataactcttatcttgatagcggttggctttctcaaagtttactcattgaagccattaatatatatgatctaatgatactgttggaagaatcatgtggtcgaagcatgcttgttatcctatagaatgagaaaatttaatccatatgcagtagatttggggaggagggtacaggctatgcttcagggaattgaaaacatattttttgtccttttgaactcaagttctaacaacaaaaagaagccagaggaagaaggcagtgctcatcaagatactgctgaaaagaatgcatcttccccagagaaagccaagggtagacatactgtgccttgtatgccacctgcaaagtaagtttctttcctgaatttaaactttagaatgaatggtataaaattacagatttacatctacaacctgtttggtgtacctggaggttggcaaactcctgaagctttgaccatggtgaggtgaattgttacatgtgtcctgatgggtgctcagatttttaaa

SEQ ID NO: 286 - DNA, 32744 bp, Homo sapiens
  source 1..32744: mol_type = other DNA
cccactcccgctgccccgtccggcccgcgccgcttcctcgcagcagctgctcccggctccgcggccgcagcccgcgtggacgctccgagcgccccccgacggacgggaccggctccctggcggtcgggcgagcgggcggcaacgctgcccggccggcagcgctggggttaagtggcccaagtaaacctagctcggcgatcggcgccggagattcgcgagcccagcgccctgcacggccgccagccggcctcccgccagccagccccgacccgcggctccgccgcccagccgcgccccagccagccctgcggcaggtgagcgccccggggccccggggaggctcggccgccagctgcttcgagggctgctaggggaggggacggcgggggctcccgaagctgccggggagagaccctctccagggacctcccgaggaggggctctcgccgggttggagacccggctgggtttgcggggtgaggaaacgtccacggaccctgcttggggtggaacggggacagcgggtgggacgcgggggacatacgtctgacggggaccggagatactagaggaagggacgcgtctgctgcctccaggagcccgaagaggagagaagcttgctcgcagggagggggacgcgctggcttcccggggtccagactcgaggaggaggaggtgcccgtcgagagcatgaacaggggctttgctcatgggcagggggtgtaattacctggcctctgccttgggaaaagttaaggggcagaggaggtgaggaggggtttctgccatgcaggtgggcgtccgccccttgcaactgggatgtggggtcttcaggcgaggcgctgtcccttcccccaatcccagctttaggaaagagctcgtgagtgtgggcttagactcgcgcgggctggggtgtgcgccgtggagggcgtgaggcagagggcgacctcccggggtgctcctgagctgagccatcaagcgcggggagcagcggggctgccctctgcctgtgcacacctggcccgggaggagccggccggaggggcggcgcctccctgtcccggccacgccgcctaccctggggtcttaccttccattcttagcctaactcccgtgtgcggctggccccacttcccagactcgcacactaaggcctcaaaacctctagcaccagctcctggaagataagcttcccggctcgtggttgcatggggagggtgtattgagctccactttatcggggagaaagtggaagcggagaaagacctaacaagttgtaagactgcgctgcccttgggcccaggcttcccgctggaggatctcacctgtggatggagttccgagcccaggtcttgcccgcgcctccagctttccctgctcccttttcctcccctggtctaggagagaggctcgctgggcctccgtgtttccaccctcccccgaagctgggaagtgtttgaattaaagggaattaagggcagagtatgaactttgagttgcctcctgagttctggatgcggtgggttgtggcagacgggtggcagtttttgggaaacagctgttatctcctctaccaggcctgctggggcttcttgttcacccaccttggaaacgccaggtgcggacttgatttttccagagttgagatgatggtacttagtttatagggttggtatacagtaagcactcaatacatgtttgccattgttggaatcactagctagcacacgggctaagcaagcttccttccttaaggaagcatagttcttagttcatcatgtgtttaaaccctgtctcgccaagttcattgctctccgtgccttaattattacatctgtgaattagcaatagtcctactaatagggttgtgtaaggatgaaaccagtcttatgcgtgaattaacctcttcagcccttgatcttcctcagatgtttaggcataatagcctctaccacattgggcctgggtaaagaggcagtgggatagtgcctgtgtagggtcagcacatggtgagtgttgatgtctgtacttaataacgaatagcccctcattttagggtggccattcctgagatttggggatggagggaggcacccctgccagcctctccttttcctgccttcatgaaggcagctctgaaagcttttctcaatcattgtccacgattagggagttggcaggaagaaccgcctttgttccctttcgaacggagtcttggttttgttttataagggttggggccgtttttaaagccctcccggccacgcatgggggcctactgcaaaggtgtaattgcagaactaagtgagatcctttaccttttcccattggggtggagagtgctgagacaaagggacaaggactggggccagtggcatcctgctcttaaagtcatagacataacccccaccccttgcaaaggatggggggaggggaagacggtagctgggagctgcaggggtctaagggaggagcaagggaggtggggttgagaggctgcttccttcccttcctccagccacgtggggcctgtgatccagaggcgcctgtcgcccctcattattgcagccccatggacctgctgccagtgggggcttgggcaagttcttcaaggaaaacttaccttgggattccttttcctagaccagctcttatgccggctgcctcacctccaggctcagacgccttttccagtttcagctaaatgtgaaacttttcagaggtatgaggttgtgtgctcttcctcacacaccagtccttagcccaggcacatactactaattgagtggagttttttcttttaaatcatgaattttcaggatgatttccagtttcacggaggaccagggctggtgaagtatggaattcatttcatgtgcaggccactcttgtaaaaagagactgagcagatatgtctcccctttgttggggggctcatgttctcactgggacccttttacaggtgatagaactgaggctctggaagatacaggtactattacgtcttggtggtgagcattttctttctctttttttctttcttttttttttttttgagacagttttgctttgtcacccaggctggagtgcagtggtgtgatctcagctcactgcaacctctgcctcccgggttcaagcaattctcctgcctcaaccttccgagtagctgggattacatgcgcacaccaccacgcctggctaatttttgtatttttaattgagacggggtttcatcatgttggcaaggccggtctcaaactcctgacctcaagtgattcacccgcctcggcttcccaaagtgttgggattgtaggcgtggctgttacacccggctgctttttatttatttatttatttattttttctttttttctttttttttttttttgagacggagtctggctctgtctcccaggctggagtgcagtggcgcgatctccgctcactgcaagctccgcccctcgggttcatgccattctcctgcctcagcctcccaagtagctgggactacaggcgccggccaccatgcctggctaattttttttgtatttttagtagagacggggtttcaccgtgttcgccaggatggtctcaatctcctgacctcctgatccacccgccttggcctcccaaagtgctgagattacaggcgtgagccactgtgcctggctatgcttttatatgggtgctgcctcacacccataatcccagcacatgggagactgaggctggaggatcacttaaggccaggagttcaagaccagcctggccaacgtgataaaaccgtgactctacaaaaaatacaaaaagtagccaggcgtgtttgtgcatgcctgtaatccgtgctactgggaggctgaggcacgagaattgcttgaacctaggaggtggaggttgcagtgagctgagatcctgccactgttctccagcctgggcgacagaccgagaccctgtctctatgtgtatatatctacgtagatatagatagcttaagtttttttttttataaggacaaggtcttgctgtgttgccaaggctaaccttgaaagcctgggtccaacgatccttctgcctcagccttccaaaggcttgggattacaggtgtgagctaccacacatggcctctaggtcacttttcactcagattttttcattcattcaaacaaaatagcataggtatgacctctgctctagtttattttttatttacttatttatttatattttgagacagtctcgctctgttgcccaggttggagcgcagtggcggttgctcactgcaacctctgcctcccaggttcaagcaattctcatgcctcaacttcccgagtagctgagactacaggcatgcaccaccatgcctggccaatttttgttttgtaaagatggggtttcacctcattgcccaagctagtctcctgggctcaagcaatctatcctcctcatcctctcaaagtgctgggattatagacatgagccaacacacccaaattcaatttttttttaattatttttattttttgagatggagtttcgctcttgtcgcccaggttggagtgcaatggcgtggtctcggctcactgcaacctttgcttcccgagttcaagtgattctcctgcgtcagcctcctgagtacctgggactacgggcgtggtggtgcatgcccggctaattctgtatttttttagtagagatggggtttctccatgttggtcaggctggtctcgaactcccaacctcaggtgatctgcccacctcagcctccctcccaaagtgctgggattataggcgtgagccaccgtgcctggcccaaattcaatttttaatggggtccttgtcttgttttatgggtacaacatcatttatctgcctgagaatattgtagggtttagtgttccctcgtgttcccgccaatattaagggatactcaattttccagtaccttgccctgtaggtctggctacagggccaggagactggtgaggtctcagtctggtatctgttcctccacttgtcccagtctgtaagctcttgtgtgtgttttttttttaattatttcttttgagacaagtctcgcattgtcacccaggctggagtgcagtggtgcgatcatagctcactgcagccttgaactcctgggctcattccagtatcctcccacttcagtctccaaagtagctgggaccttagtcacgtgccaccacgcccatctaatttttaaaattgtttgtagaaacattaaagtctcactatgttgccccagctggtctcaaactcctcggctcaagcaatcctgcctcagtctccgaaagtgctgggactacaggtgtgagcctgtgcgcccagctgtctcatgttcttgtccagagcctcagcctgcatgtctgaagaagagtggttgtctccagagcagcaggctgagggaggggacttgggagtcaagggtctaactcttcctttggaagaaggcctctctcttagtaggcttttctggattccagcagcatttatgtcctgttgtatgtgtgtgttctggggccagagctggggctggaacccaggctgccactgggccccagctcctgcagaagtgctgatgcctttgtagggcgtttgctgcagccagaacagtgatgggccctggcagcatggcaacatggctcactctgttgcttaggctggagtgcagtggtgcgatcacagcttactgcagccttgaactcctgggtcaagtgatcctctcacctcagtcacctcctgagtagctaggactacaggtgagagccaccaggcttggctaattttaatttttttttttttttttttggagatggagtttcactcttgtcgcccaggctggagtgcaatggcgggatctcggctcaccacaacccccgcttcccgggttcaagcaattctgactcagcctcccgagtagctgggattacaggcatgcaccaccattcccgactaattttgtatttttagtagagatggtgtttctccatgttggtcaggctggtctcgaattccccacctcaggtgatccacccgcctcggcctaccaaagtgctaggattacaggcatgagcctctgtgcctggctaattttaaaattttttatagagataggctctcggtatgttgcccaggctggtctcaaattcctaggctcaagtgtaatcccaaagtgctgggattacaggtgtgagccaccatgcctggtcccttgcctgcctttgattcctaattactatcatggttcctgaagcctagtagaactcatctgaatggatacaggaggctctggagatgggaatggggaggcactaactagggtcccactgagccagctacaggcccccgctcttttgtgaaaagatggttgtgatgaagacttaagtgttcattatattccaggcaagccattttctctgactctgggagttgtttggcaccatgggtaaggaagccctaccccgacaatggcactggaggaagagcctcaagcttaggcactggctttcccaagtccttgggtgaatttgcaaacctcacctgtgtcctcatgttgccctaggatgttacatgctgagctgtaagcaggatgctgaattaggggaattgctcagtactaaatatgattgttactacaaccacaaaactagcaaggagtagaactgcattaaaacactgttgcaaatttttttattttttgagacggagtcttgctctgtcgcccaggctggagtgcagtggcgagatctcggctcactgcaagctctgccttccgggttcacgccattctcctgcctcagcctccctagtagtagctgggactacaggcgcccgccaccttgcccggctaattttttgtatttttagtagagacggggtttcaccatgttcgccaggatggtcttgatctcctgacctcgtgatctgcccgcctcggcctcccaaagtactgggattacaggcgtgagccaccatgccgggcccactgttgcaaatttctttccaaaacctctgccagcacatggctgaacccacagaactggcaggacacacaagatgcgctgggttaagatgctttggtgctctctgtgggttcagctgactgttttacaggcctgcttcttgaccgttggggtgggcagatctgagcccccactaggtaattgtggacagtttttgaaaagtggtttttatgtgagatcatgggcttcttttaaagccatttgtatatatgcagttcccttatctgcaggccttaattttgacatttctgttttccttctcgagatttgttttctgtccctgcagtactgctttttccagaatgtcatataaatggaatcatacattattattatttttgagacagcatctcactctgttgcccaggctggagtgcagtggcacgatttggcacattgcaacttccgcctcctgaattcaagcaggaaccatacattatatagcccttcgagtctgggttcttttacttattgtgagatatttgagatttatttgtgttatgacacgtactagcagttatttcttactttttaaaaaattttttaagacaggtctctggagttcagtactacaatcacagctcactgtagcctcaactccaatgctccagcagtcctcccactgcagcccccactgcccagtagcttcgactacaggcacttgtgcaccactatgctcagttaatttaaaaaaaaattatttttgagacagggtcttgctctgtcactcaggctagagtgcaatggcatgatctcagctcactgcaacctccacctcctgggttcaaacgattcttctgcatcagcctcctgagtagctggaattacaggtgcccgccacctcatcaggctagtttttgtaatttttttttttttctgaggcagagtttttcactcttgttgcctaggctggaatgcaatggtgtgatctcagctcaccgcaacctctgcctcccaggttcaagcgattctcctgcctcagcctcccaagtagctgggattacaggcatgtgccaccaccaccagctaatttttgttggtttgtttgttgttgttgttttagtagagatggggtttctccatgttgatcaggctggtctcgaactcccgacctcaggtgagccgcccaccttggcctcccaaagtgctggaattataggcttgagccaccatgctccgccttactttttttttttttttccttttgagacagagtttcgctctttgcccaggctggagtgcaatggcatgatcttggttcaccacaacctccgcctcccgggttcaagtgattctcttgcctcagcctcctgagtagctgggattacaggcatgtgccaccatgcccggctaattttgtatttttagtggaaacggggtttctccgtgttggtcaggctggtcttgaacccctgacctcgggtgatctgcctgcctcagcctcccaaagtgctgggattacaggcatgagccaccatgcccggcctaaattttttttttgtaatgttggggtctcactttgttgcccaggctgatcttgaactcctgggctcaagcaatcctcctgcctaggcctcccacattgctggggttacaggcatgagccactgtccctggcatctttttttttgctgtgaatataacatttctagcttttctttgtgttgtgatttttaccttttcaatacatagtgtgcaaggacatattttctggttacgatagaaataatttatttgaaagtctatccatgttgaaacaactaaaaatgctgtgcctttatctgttggtagaagaactaagctcccttaaagaaatctagagagcagaagagaacaggaaatgagagaccacaaactaaagggagaaaatgaacttttcaataaggcttgcaggcttgctctagcagttgtagtgattaaaagtagtggcaatggctgggtgcagtggctcacacctgtaatcccagcactttgggaggctgaggtgggcggatcgcctgaggtcaggagttcgagaccagcctggccagcatactgaaaccctatctctactaaaaatacaaaaattagccgggcgtggtggcatgtgcctgtaatcccaaggaagctgaggcaggagaatcacttgaacccaggaggtggaggggttacagtgacccgagatcatgccattgcactccagcctgggcaacagagcaagaccgcatctcaaaaaaaaaaaaaaaaaaggagtggtaaaggataaataccaaacaaaagtgagcctcaaaacatattacatatatatgggaagttcaaataagagatagagttgggatgtattcataggtgtctggctttacttacggggaaaaatattaggtccctatctcataccatatacaaataatcaaataattatgttgattaaacctgagtggcctaattcaaataaatgtttctcagacaggcgagttatgttttccgattgtaaaagttacatgggcttaaggtagttaccccccaaaccttccttctgagtatgaatttttatagttagagaagaaatgctgcagagaaatggcttaaacatcaataattgatgttgcattatgcaggtttcttgttttcactttacataactttgtctaacaataagtactgcactctttgccccctattgtggaagcaggtaatttagtcaaccagtcctcttgaccgtgatttgattgcagtgtttgctatgacaaatgggactgcagcaacccccttgcacagaggccttggcgagagctttgaactgggtggtttctgagcagtagaatcctgtgtaacaggatatagacattaggcattttagatgacacagtgaagattactatcccaaagactgaaccagtatccctgctgtgtaggtatttaggcttaagatgactaaatactgtgtagataggtagacttgagatttaaggcgttcttagttgaagccacaggtgcagcctgctgtgagggaggggccaaggttgagggggtctctttccagaatattgacctcctttgcccccttgggaggggacagggctgttggctctgattttgccaaggggtaggtggccacaggaattgggcatagcagtgcctaggattctgctccaatgctgcccctcattctctgagttaccattgaccactccttggggctgccacacccttcaaggggttctcaaagtggatataggggaaggggctgggtgtttgtgatttctgtataaagggcaaaaagtttagactctaaagttactgtcatatcttttcagatctttatggtcctagttttttttttcctgttacttatctaaaaggtaatgacattattttattccagtgcgttgacaaacatctgagtatattttggtgtcatgcacagtctgcagatagccacttgtctggtttttccctgtttggacacattttttttttttttttttgagatggagtttcgctcttgttgcccaggctagagtgcaatggcacgatcccgagtagctgggattacaggcatgtgccaccaccccggctaattttgtatttttagtagagagcggggtttctccatgttggtcaggctggtcttgaactcccgacctcatgtaatccgccctcctcggcctcccaaagtgctgggatcacagacgtgagccactgtgcctggctttttttttttttgagagggagcctgagcctgtactgttgcccaggctggagtgcagtggctcactgcgacgtccacctcccgggttcaagcgattctcctgcctcagcctcctgagtagctgggactataggtgtgtgccaccacgcctagtttattttttgtatggacacactcttctgataattctgcttactatgccaagggcccagcttctactgtaggatgacagtggtacatgtactcatgacctagaggcactgagcaattccccaaacgcattctgaattgtggagggtgatggggtggatacttcttgattggccctgtggtgtggtgctgtggtgggtagccagatggcacatgagaataagtgacttcaggtatcatgactgtgtcatctatgtaggggtccttggtaccaacttcccagtgaattgggtgggttactttatttcacagattataaaactggggtttgagagaaatattgggctttttttttttttttttataacagggtcttgtgctgtcactgggcctagagtgcagtggcatgacgatagctttactgcagcctcaacttccgaggcttaggtgatcattccccatcagcctccgaggaggtgggactacaggcgagtagctaggactacaggggcaggccgacacattcagctaattttaagaaatattttaatagagaagaggttttgctgtgttgcccaggctggcgttgaactcctgagcccaagctcaagccttggcctcctaaagtggtggtattaacaggcatgagccactgcgcccggcagtggttttttttttttttttttttttttttacgctttcctgtaaatctgatgttttctggaatttagggtaagttccttatcagacagagcaaaagcacagtactgggaccttgtgttctgtcatgtgttctgctgccgccgccagtgtggacagcctgagtctggccccctttcctttggatgtgctgtccctgctgcctggatccttcccgctctctacttcacctaggtgtggtgtccctccctgggcttacttactgcattgttttatggtgtcttttttttcttttttttttgagacggagtctcgctctgtcacctaggctggagtgcagtggtgctatctccgctcactgcaagctctgcctcccaggttcacaccattctcctgcctcagcctccggagtagctgggactacaggtgctcaccaccatgcccggctaattttttgtgtttttagtagagacggggtttcatcatgttagccaggatggtctcgagctcctgacctcgtgatctgcccacgtcggcctcccaaagtgctgggattacagacctgagccaccgcgcctggccttttttttttttttttttttttagattcaagaagtacatgtgcttgtttgttgcatgggtttattacttactggtggggattgggcttctggtgtatccattaccgaaagagtgaacgttgtacctgataggtgatttttcaacccttgctccttcccatcctcccgtctttttggggtctcccatgtcttgtcttgtcttgtcttgtcttttttcttttctattttgagatggagtctcccccttgtcgcccaggctggagtacagtggcacgatctcaacctcactgcaacccccgcctcccgggttcaagtgattatcctgcccagcctcctgagtagctgggattacatgcgcccaccaccacgaccggctaatttttttttgtatttttagtagagactggttacaccatgttggtcaggctggtctcgaactcctggcctcaagtgatcaacccgcttcagcctcccaaagtgctgggattacaagcgtgagccaccgcgcctggcctaatttttttatttttagtagagatggggtttcaccatgttggccaggctggtcttgaactcctgacctcgggtggtccacctgcctcagcctcccgaagtgctgggattacaggcttgagccactgcacctggccctagatttctctaacataggctgtggaggtggaatttttatttattttttctttaaatcaatactctccactgaatgtaggattttagtttttaattttttactgcaccccaggggttggggcagataccaaagtgaccccccttcctgcattgtgaggtttaattaatgcaattaacatttacgaagtgctctgaaacagctctgctgctggtatcagcctggaggaagtgagtgacatcagttctcagcattactgctgggttggggcgagtccctgagcctcctctgagtctaattgggggttgccacctacccctctgtctgccacattgcatttgagtacatctgacctggttcagtcggggcacaggcaccctgctgcactaatgaggaaggcccctcggggagaagcttgtgggtgggcccacccagcactgctgcccactctgaatcacacgctggaccccagcctctgggaaagggtcagagttcacctctcatcacaaggttaggcagccacctcctgtgaagggaaacgctcagctggtatatcatgtcccagccacgaagctcccttcatccctgggatgggtgatgcattcattgttcataacttctgtaattcttgtctgtcttgtctcagttacggcaattccaggcacgtgccctggattgcctgggcatgagatttggcactgccacttctctgggtgacttaactcatctgagtctgttgaaggcagggggataataagacctgccccaggatggggtgggggttaaaggaggtggcagacaggctgggtgcagtggctcacgcctgtaatcccaggccaaggcgagtagatcacctgaggtcaggagtttgagaccagcctggccaacatggtgaaaccacgtctcttctaaaaatacaaaaattagccaggcatggtggtgcaagtctgtaatcccagctactcgggaggctgaggcaggagaatcgcttgaacccgggaggtggaggttgcagtgagccgagatcgcgccactgcactccagcccaggtgacagagacttgatcttaaaaaaagaaaaaaaaaaaaaaatccatggtggtagacagtgttcagcctacagtaagtagggccctgggaactgttagctacttaatgttacagtggcagtgtgggatgatgcagttctaaatccagcatgtctgccactctggataggtcatattagataaagcagttggcttgtgatgggggccatgttatctggaaatgccagccttgaatcatgaagtcagtgagatacatagaaaagaggtgggggagatttgtatccactggtacacacctgatgctaatttaatttctcttgtcctgattctaagaacatgtagttaaatttgtatgttatttactttccctatatattgatcaaggaggtagtatgtcagtctctgtcttggtttctccatctgcaaaacaggaataacagtacttaccacatttaaaggttaaatgagttaagataagtaaagccaaaacagtgcctgacacatagtaacactgaaaaaaagatgaccttattggggggatttttatatatttatatatgtgggaagaaaggcctaggagagaagcttttattcctggattttgagctgtgggttttgaggtctgagaaaggaagcaggaggtgtagggagttggggagggcttccaggctgagagaacacagcagcacatgcctcgaggctagattgtcttggcctgcgtgtagactgaagcggggtgggggaggaactgagctgggcatctttagtcatgggtgcaggttctgaagttggtgtgcgctgtctacacagctgtggctataaggcaatgagggtagttaatttcactacaaacgtagggtcgtgataaaaacagaaggaattttaaatgaaatcacattgaattatgcaacgagaagaaagcatatataagtgctcagcttgctcctgggggacacccaggtagctagtgccatttattgtgggttttcttcctggactgtctctccagtacccacaggtcttgttctaggggcttgaggcttttcctgaatgttgagatatgggttttggaaggtgtgctgcccacacgttgggtaggctggtggccagttggcactgctgaggccctgggggaaggcccagggtggttaatcattgtcagcctgggtctgtctaggaggtgagactcctgtctggcttcttgttgacccagttagggcctgtctgaggaatggggttcaatgttgcctgcgaaacccagcacacattagaaccccaggccctggatgaaggcgaaggaggtcacatccttcactccaggcctctggtctgctaccagctcctggccacaaacaaaccctgtgtgtcctccccccagagcactttggggaggtggaccctcctggagacaccaggtacaccaggtagccccacctcccactctatgccaggcccactaggttacttagttcactgatttggcctgaggtgaaacgcttgaaattaatgattattctgaaccgacaccgcagcagctttcctgggattctgactgctttgtctcataggaactggccataggtcagccagcctgttcttccgggtcagggcttgggagaaaaagggctgagaagcagctgattggtctgattcaggcacgtcccttgtccttggtaggggaaattccttaacaggtgctgatacacactctggatcatgtgaagcacagaaagcctatgtgttatgtatcagcgcacatgtttataatctgaacaatgctgctttaacatgcatattaatcacctaggcatgacttgtgtgtgttaaaatgtcttgtgaaaatcccgcttcaggccgggtgtggtggctcacgcctgtaatcccagcactttggtaggctgaggtgggcagatcacgaggacaagacatcgagaccatcctggccaacatggtgaaacctgtctctactaaaaatacaaaaatcagctgggcgtggtggcgcatgcctgtaatcccagctactcaggaggctgaggcaggagaatcgcttgaacctgggaggcagaggttgcggtgagctgagatcgtgccattgcattccagcctggcggaggtcgcaccactgcactgcagcctggcgacagagggagactctgtctcaaaaaaaaaaaaaatgaaaaccctgcttcaggacatctagcttagtggtggagatttctccagccagctcccacttccaacagttcttccaagcagctctcagttcatggtactgtagcctgcgtggctcctgggccacacagggagtagcagcagaggtccagttgccccatgccatgggcaggtgcagggtctggaattgggagctctcaccacagattgcacctctgcctgggggcgccactgggctcatcagactgagctcacggtgccccctggtgggcgatgccagtggcgccagtgcagcttggagcccgcaatacaaggtgtggcttctagaaggtaccctggtttgagatgctgaggtgggaggatcccttgaggccaggagtttgaggccagcctgggcaacatagccagactctgtttctacaaaaaattagccacacctggtggcacacacctgtgggcccagctggaggatcactgaagccctgggagttgaagcctacagggagccgtgatcacgccactgcactccagcctgggtgaccaagtgagaccctgtctctaagatagatggatggatggatggatggatggatggatggatggacagatagaagataaactgcgaggctagcacgggttgtctggcaggggctggtatgtctccacgatggagcccgaggcagggaggcccggtgcatatggcagcagcttattggggaagcttttcccaggcacggttccaggacacaagggtgtggtgtgagtgacctggagctgtttgtggttcagggatgggggcctggaggtctcattatgcctaggcttttataatatttttgccaaccaaaggtggaacaaaaagcaaaggcaagtgacttggaaaactcggtttcagcggggatttatgccctgaagttttttactcgttctctatctaatcctggccctacctcttagatgggctatatgaccttggagaataacctagtctggatgtcagttttctttttctagaaggtgagctccccagtctccctagggggagatacaggttgttgcatccaacaaaatctgtgtgcccataatgttgcaggcaatgggccagcccagaggttatagcctgccaacccatccgtatggccctggccctgtgtgttagctgatttacctgaccaggaggggcagcagtggggaggccaagtcccagaggtgagggtgaggctacaatggatctggggagtccccctcctggtaactgcccccaggctttctgcctgtgcctccatccttccctccttgggaacttgggactctgagccccagctggtgagggaggaggggagtgagcgacaggccagcagaccaatgggccctggaggatggggtgaggcggggcttgtgctgccatggagaggagagaagcggttctgtgggggaggagggggtgggtgggaagaggacctggagattgaggggaagggagagagcaaacaaaggggtcaggagggaaaataatgcactggcttcctgagcccctgcagaggctgagcagggagagggggccagggccagaggggacagaggctggcggcagacgggccgggacaggcaggtcctaaatggcattgtttgaaggggccggctaattgcacagagcagtctgagcctgagaccccagccctggcctccccactctgtcctgggtgctggcgtctgagccttcgggacagcctgtccacatggaaccaagtcctgagcctccaagcttggtgagggggaggctatggggggcagcctgggtggggtacttgggcaagagcatcaccctaagaatgcatcctggggccttggcctgagaacacagagcccatggcgggggaacactgtccctctcatgtccctgcttccctttcaccccacccattctggcttctcccacaggaaagcatgaagggagacaccaggcatctcaatggagaggaggacgccggcgggagggaagactcgatcctcgtcaacggggcctgcagcgaccagtcctccgactcgcccccaatcctggaggctatccgcaccccggagatcagaggtggctgggcagtggggactggggtggtgtcaggcgctgacatagtgagcggtcactgcagacaactggaggctttggggagagtctctgacaacctccaccacaattccccgggagggaagagagctctagcaaggagggatgcagggtcgagcccttcacacctgcccgcagcccttggcctcccctttgggactctcatctcagctgggactctgagcgtgacacaagggtgatggttccctgtcctctgccagtcatgacaggggtggtctcagcatgggcccttggagagcccttctgcagtgggaccctctccccactcagagctgggctggggttgggagggggaggtctggagtgtgcttcctttccaccctgccctgagcagctccagccagctcacttgggatcccgccccagctgggttggaaagccctgcattgtcctctcagctgtgccatcccatggaacttcctgcgagcgtgaaagggttctatttctgcattgttccccacaatagccacactctacatgggagcacttgagaagcggctgacacagcaggcagtgaattgttcctggaaatgtagttagtggtccctggatgggcagcaccctgctggaaggaatcggagggctccccttggtaacttcagtgttggtttgggtcctgtcacgtgcctggcccagggctctgttgtcttaggaataaaatcagtggagaagatgaacgatactgacggactgagagcaaatccctgtggctgacaatagtgtaggggagatcccaggccacgccacggagaaaagcccctattagcaaggccgttccccagactggtgcctgcccccacaaaacagactcctggctgtttcctctacaggccgaagatcaagctcgcgactctccaagagggaggtgtccagtctgctaagctacacacaggtatggtctctgctctccctttttcagggctcagggactttgtctttggctttcatcacgtgggctgcctgaggcccataaaaactggcatctgcaaatgtatggagggttgccgagctagatgctttctgcatatatttggcattattttttcaatctggacgatcagttacattgctaaatctctaatatggtagtcccctcttatctgtcattttgctttccacgatttcagttgcttgcagtcaactgccgtctgaaagtattaaatggaaaatattaaatggtaaatcccagaaataaacaatttatacattttaaattgagtgccattctggtagcatgatggaatcttgcactgtcctgctccgtcctgcccaggatcagtcctgtctttgtccaacatctctatgcttaggtgctacctgcctgttagtcacttgtagccgtctccgtgatcagatcagttgcagtatcacagtggttgtgttcaagtagtgcttgttttacttaataacggctccaaagtgcaggagtgatgacgctggcaattcagttatgccaaagagaagccatgaagtgtttcctttaagtgaaaaagtgaaagttctcaaaaaggaaagaagaaatcatatgctgaagttgttagatctgtggtaagaacaaatcttccagccgtgaaatcatgaagaaggaaaaataaatgcatgctagttttactgttgcacctcaaactgcaaaagttatggccatgttgtgtgataagtgtgtagttaagatgggaaaggcattaaatttgtaggtggaagacatgaacagaaatatgttctgattgacagcagtgctttgtgccagggagcattgagcctatagcaagggatcccctgacaccaaaccatttacttcaagtaagggatggttacatagattcaagaataggtttctactgaaaactataaaaatgactggagaggctgcatttgccaatgaaaaacctgctgctacattttcagaagagttgaagttgattgagaaaggaaacaatccaaaactaagactgcagtgaaaccagactcctccagaagatgatgtctaatagaacctaccttcataaaagtgcaaaggaggaagacactaggtcataaaccatggaaggacagattaaccctgaatagagtacaagaagatattttgagagagaaaccacattcatatggcttttattaacagtatattgtaattgctctattttattattagttgttaatctgtgcctaatttataaattaaactttatcataggtatgtagatatagacaaaaacagagcacatatagggttccatcttccaaggtgtcaggcagccatggggggtcttgcatgtatcccccctggataaggggagactactgtatagcaaactgtctttttattcctggaatgagtccaacttggttatggtgcattttgaagttgattttattcatgtattcatgaatgaaatgggtatttttttttattcatttatttttgagatgaagtctgttgcccaggctggagtgcaatggcatgatctctgctcactgcaacttactgcctcccaggcccaagcgattcccctgcctcaggctcccgagtagctgggactacaggcaatggaccaccatacccagccaatttttttgtatttttagtagagatggggtttcaccatgttggccaggctggtctcgaactcctggcctcaagtgagccacctgtcccggcctcccaaagtgctgggattacaagtgtgagccaccatacctggcccattttatttctttaaatatatctatggttttgatgttaggattaggtgggctcaaggaattttttttacaagctggaagaaacttgtctaagcttattttaatgaatttcaaacaattatatcttctaagacttgctacattatcaagctttctacttcatttacttttccaaggttggatctttcccatcttgttttgtgttccttcctttactgacaccgtctgtttcctaattattcttagtagagtttgtcaattgggttggttttgctcagagccagtatcagtcataaaagtcctgggcaatgaaaactcaccctcagcttccattctcttggtggtggccaacctacttaggggactcagaaggtggggaacctaagccctgggaggaattagggcagctgcaggatcagaggctcagcactgctgttttgtttctggtagctagttaccagaaacagtaatgaaatctcttgcccacacgtttctttttgtttgtttgttttgttttgagacagagtctccagtctgtcgcccaggctggagtgcaatggcacgatctcggctcactgcaacctccgcctcccaggttcaagtaattttcctgcctcagcctcccaagtagctgggcttacaggcgtgcaccaccatgcccagctaacttttgtatttgtatttgtatttttttttttttttgagatggagtcttactcttgttccccaagctagagtgcggtggcgcgatctcggctcgctgtaacctccacctcccaggtttaagcggtactcctgcctcagcctcctgagtatgagtagctggaattacaggcacatgccaccatgccctgctaatttttgtatttttagtagagacagggtttcgccatattggccaggctggtcttgaactcctgacctcaggtgatccacccgcgtcggcctcccaaagtgttgggattacacgcctggcctaatttttgtattcttagtagagatggggtttcaccatcttggccaggctggtctggtgacctcaggtgacctcagtctgccccagactcccaaagtgttgggattacaggtatgagccaccacaccctgcatattatttgattcttgatgtaaccctgttgtgctatgagggaagtactgttattccaattttaaaatgagggaaatggactcaaagccacacagttggtgagtgaaggcaagtgcttaacactccagccagacctagctgctcgctgcttcagcttttgtgtttggcttatgctgggttttggtgtgaggtgtgaggcctgcacgaggaagccctgatgacatggtgcaggtttcatgccattgcttccggggcatctgtcgtggttggtctgtgtctgcacccatatgcagtgtgttgtgatgagtgacccggtctccctgccaggcacaggcgatcagtctttcatattgcaggtgccttgtttctttgacttgctgataccctggggtcttcatcatgttcatcatgtttccttataaaggacttgacaggcgatggcgacggggaagatggggatggctctgacaccccagtcatgccaaagctcttccgggaaaccaggactcgttcagaaagcccagctgtaagtagccacacctcgagccaaagcacttgtggccaacactctacatagcatacatagcatgctacatacatagcatagctccttaggggagcttttaagagaaagtgatgaaaaaatgttttgaaactagaaaatataagcaaggctcttggactattgttggagggttttcttttttctttttttttttctgagacggagtctcactgtgttgcccaggctggcgtgcaatggcgtgatcttagctcactgcaacaacctctgcctccttggtccaagtgattctcctgccacagcctcccaagtagctgggactacacgcacctaccaccacacccggccagtttttgtattttcagtagagatgaagttttaccatgttggccaggctggtctcgaactcttgacctcaggtgatccacccaccttggcctcctaaagtgctgggatttcaggtgtgagccactgcgcccggctggaaggttttctctatgtgccatttctttcaggtggtttttaagttctttcttgtaacactcttggaggtgcctaggggtgatagagtttgcagggtggatggctcagctgctaatgacctagggagtccaccatttctgtgggtggattttgtgcctcagagttttgaggtatggcaatgggaaggcagttattgcttatggtcacccagccctttagagaccagactgacagttactatcccaggtgtgggttacagtcttcccttcccaggatatggtctgtatcatcccctttgtggagatgagagaagattccagcaacttaactgaggttaaacatcaactcttctatgcataatttggacacaggttctgcaacaaccaaattcatgccatttttgacaatgaacatggagcctaaggaattctattccatcttgatgatctggtgccttcctgaacccagtaattggccttatgcttctttgacataaaagtttattttagagtgaacacgaatttttctttctttctttctttctttttttttctttttttttgagatgcagtctcactgtgttgcccaggctggagtgcagtgacgtgatctcagcacactgcaacctctgcctccctggtccaagtgattctcctgcctcagcctcctgagtagctgtgactacaggcacccaccaccatgcctggctaatttttgcatttttagtagagatggggtttcaccattttatccaggatgatcctgaatttctgattgcaagtgatctgcccgccttggcctcccaaagtgctgggatcacaggcatgagcgagccactgcgcttggccagatttttatttttcaatcccaattggcaggtgccatttcagctggccatgtctgtctgctgtgacaggcagagcaggacctgctgggaattgtcgggcatcctagctggccaccctaccacctctattccaagaactggggaattctggctggactcagtccagagtcccacctcatcacctgttcacttccagttgtcctgaagctggctaccaggtctccttggccacctgaaggcctaatccttctggccccgccagaccccaggcctccagtcacctaaggcccagtgagtgtcctctcttgcttctaggtccgaactcgaaataacaacagtgtctccagccgggagaggcacaggccttccccacgttccacccgaggccggcagggccgcaaccatgtggacgagtcccccgtggagttcccggctaccagggttggttccccagatgcccagacccctgcccgcagtctctaactgggagatatgcctcactcactgcactactggttgtggctggtagataatctgtgtccttttttcacactgcttttcaggttcttgctttttcttttctctcctgggtaagcttcccgtaagcctgttggcttctctcctggtctgatctcagatgacactctgttgggaatggaagctttccctgttgacttggttcttgctctaacttggaaacaaggtagaaaacactgacatccagaactgtcttctccctcatgtcttcttcacctgtcttgaggcaaccctagcgggtatggcaacatttcactctctgagagtccctcgtcattacccatcatttgtgcctttgtcatctttctgtctctgggacagttacaatgactttctccccccttaagggatacgtgttcctggaaaagtttcttcagcggtctctgttctctttaacttcagtctttcctctttctttttgcctaggagccatatgggggtgccgttggtctctggtcaccgacatcctttgctctggcccaaactatgtgtccttctgtccacagtccctgagacggcgggcaacagcatcggcaggaacgccatggccgtcccctcccagctcttaccttaccatcgacctcacagacgacacagaggacacacatgggacgccccagagcagcagtaccccctacgcccgcctagcccaggacagccagcaggggggcatggagtccccgcaggtggaggcagacagtggagatggagacagttcagagtatcaggtatggccgagaggggctcctgcccagggtgactgaggaccctgaacacggggaaaaaccagttacctgctactgttggtaacagagcgacaacagttgttagaagtttcgtaattgtaataattgacatgtttgaattctaagtatcttccatatgcaccacggacctttctttaccttaatcctctcccagacataagtcaaatgccagtatttaccacgtgaatactgtggtttttcccaacatgacatttatgtaaggactgcaactgcgtacgttatacatttcatgtacgcccgtgtgaagagaccaccaaacaggctttgtgtgagcaataaagctgtttatttcacctgagtgcaggtgggctgagtccaaaagagagtcagcgaagggagataggggtggggccattttctaagatttgggtaggtaaaggaaaattacagtcaaagggggtttgttctctggcgggcaggagtgggggtctcaaggtgctcagtgggggagttttttgagccacgaggagccaggaaaagggatttcacaaggtaatgtcatcacttaaggcaaggaccggccatttatacttcttttatggtggaatgtcatcagttaaggtggggcagggcatattcacttcttttgtgattcttcagttacttcaggccatctgggcttaaacgtgcaagtcacaggggatgcgtgcaagtcacaggggatgcgatggcttggcttgggctcagaggcctgacaatacatattgtgattctgttcatcagagtgcacatactgtatatattgtacgtatgatacctttgtagacttgcttttttcttctattaagaactagagttgcctgaggttcatgtctggataataaatccagtggtctgggtcatagcttaattaaccgattcaggttgtttatgcttattcaagcattgctgcacgaagactccttacacatgtatgtatttatgtgttgttaggatcccttttttctatgtccattattacattttactttgtatagaagggatctcactatggtgcccaggctagtctcaaactcctggcctcaagcgatcctcctatctcagcctcctgagtagctaggactacaggcgtgcaccaccaagcccagctactttataaattcttttgtggaaatggagtcttgctgtgttgcccgggctggtatccaactcctggcctcaagcgatccccctgcctcggtctcccaaagtactgagaattacaggcatgaaccacggtgtctggctacatcttgcattttatggcaagctttttgttgccctcagggacagtggagtggacaggacttggcccaggatggcctctcctcactgggatttcttcatgtgggttttcttccaggatgggaaggagtttggaataggggacctcgtgtggggaaagatcaagggcttctcctggtggcccgccatggtggtgtcttggaaggccacctccaagcgacaggctatgtctggcatgcggtgggtccagtggtttggcgatggcaagttctccgaggtgagtccggggaagggcaaggggttctgcaggcctgaggctgtgcctgcctgcctccctttgaagacaaaggcctgggattgtattctgcagatgtgtgagcctatgccttcacactgtctgggaggaaggacaaaacttcctgtgttaaccagctacagcagattccactcacacgggggacaaaagtgctagaaagttctggatccatgggcagttggattttatgttatttcttagatttatcttttgggggcagaatcatcagtgtggactctgaggggccaggagtggccacgtgagcaagtacccaaaagtgttcagtggagaagcctggaagagaccggaagcatggccgcggcctcttgtcatttagccctggggagagaaaggcatggagttgggtttagggtcacctggtatcagttgtgaaaagggtttttagtagaattgggtatttcagagtctcttgatgattgattctagccttttaaaatctttcttggtaatgacatttagctggggaagagctgtgttgggcataactaggctgttttgattcttacactctttcaacaaagatttttttgggggcggtgagaatggagtctcactctgttgcccagactggagtgcagtggtgcgatcttggctcactgcaacctccgcctcccaggttcaaacaattctcctgcctcagcctcctgagtggctggggttacaggcacctgccaccgcaccctgctaatatttgcatttttagtacagactgggtttcaccatgttggccaggctggtctccaactcctgacctcagatgatccacccgcctcggcctcccagtgctgggattacaggcgggagccaccacgcctggcctcaacaaagattttaatcagacagacctatcctgtgatggtctcttagaagtaaatgttagtcctaccctcagagccctgagagaggctaagttaggtgcctaaggtcattgggcaagttgcagcagaagcaagccaggcaggattgaaggaaggactgtacattcctgggattcagctcaagcagagattctgtttttcccaggaattgagctaccatggggccatttgccatgagctaattgaagtttcccaagggctacaataatatattgggtgtggagtctcctttgtaggagagcccctgcatgcagttgcctgctgtgaccagcagagggaggacaagtcctgggcccatgctggcagtgaggcagctgcttccagggatgggagagcagtaactcaagtgaaggaagatggattgtttgcaattgctttgccccatcgagacataaaatgcactttgcaagatagagtctgaggctaatacaatgcagtgtggggctgtcagcattaggggatgagatgacaatatgggacctgggtctggcctgggcaagtgcctgctcagcatgtgtacgctgtttgggttgtattggagctattgggcgctggaaccagcacttgtgttggagcggtttccccccaccagagccacagtgttttctccccagtggtggtcacacccccatataggaaatcaggcattccgtgataaaatggaggtttgcatgagtgtgagcactctttacggagactagaacattccctgtgtctttcagttcctttttttttttaagagatgaggtcctcactgtcacccaggctggagtgcagtggcactgtcttggctcactgcagcctcaatcacctgggctcaagcaatccttctgccttaacagagcagctgagactgcaggtgcacaccactgtgtttggctcttaaaagtttttgtagagatggggtcttgctgtgttgtccaggctagtcgaactcctgggctcaagcgatcctctcaactcccactcccaaagtgctgggaatataggcctgagccactacgtctggcctttcagttctgattagcatccctgaatggccattttctctctcactggcaactcagtcagttcatgcttggtccagggacttggtacatcaggagacttgtggaatatggattaaatcacaagaactaaagttaaataatcacaacaagtgaaaggtgctgtgtcgagcactgttttctaaacacattcattaggtgaactcattttaataaaagggtaaagagtaaacaattatcatgcttaggaaagaaggaatatgtgcaaaccctcaatgctggagcagccacagagaatattaggactgagcctcaggggtccacaccagggacacctgcttggaaaatgtatacaaacacagggttcgcctaattgccttcattcagagtatcctccttttccacagtggaagtgtcgtacctaacaaggttctggatatctgtgtgttgagactctgccatttctatttttctgcttttttctttccttcctttcaaatagatgtctgtggactttatccccaggaatggtctcttggttaaagtgtgtgaaaatcttctgcatctgatggacaacattgtgatagacatggcacctgggacacacctgtaggtggatgttgatgatgtctttctcttttaggtctctgcagacaaactggtggcactggggctgttcagccagcactttaatttggccaccttcaataagctcgtctcctatcgaaaagccatgtaccatgctctggaggtaacatgggatgagggaatgagggctaagccctgagagcagggatgaagcaagagacccacagaaacctagctcagtgttgccaagggtggtttggaggggacagggtggccagggaggaggtaaatgacaacataacatgatggccaccggattgggcctcccaacaaagggatttgagacatcccagctgccacttattgggaccactaactgaatcagaaggaaagagcacgggcagttaggggtgcaatattcgtatcagtgaatgtgcttttccagagacctcagagccttcttatgagggttggagttcacagcaagacagcagtggaggccagctgtcttctatctgtgggccgtcttatcccctatgaaccattataccctgtttctcccttcaccttgattttttccccccacctttgttcagcatttaagagccaacctcttctcattgctaaaggcttcattagacactgaaatccttggtccttcatgtaggacacaagttaatgtccccatctttagggagataaaacaagaaatctagtgccgccttatataagatacagaggagatgagatagtgctggctggggcttctatatcttggtggtagagttaattctgatatgtctgccttttgagtgggaggtgaccactgacattccctagggggaagagatcctatttggtgcctgcatgaaaagatttaaccacaaccccccttccgaggcctctccctgcacaggcccctccttcctctgtcacataccacagcccaggacagctgtctggctatgaaagggcccagtgtgaaggggaatgtaggccctggctgggggaatccctgggtgtggcctggcgagcacctcctccccacccccccattcatcacagactctgcctttgcagaaagctagggtgcgagctggcaagaccttccccagcagccctggagactcattggaggaccagctgaagcccatgttggagtgggcccacgggggcttcaagcccactgggatcgagggcctcaaacccaacaacacgcaaccaggtgggaatgagtccccatggcagcacccgctgcctctgctggtgggaccacttcttgggagagtcagccacccctgctgccccacaccccacccagctttctagcagctggtctcaactctgaatgttggaaaaataggagcaggcatacgaaggctgtgccagctctatctggcttccccggccactttcttgctgatggtcacgtgcatataatttgtattgaatctgacatctgtcttgaagtcaggatgcagtgttgactagcaccttttttattaaaggaaaaaatagttaagctatgctcatttgagaaaattggaaagtgttaaagaagaatatgccacctgctaacattttgaccagtaccatatttctcccattataagataactctggtttctagaaatccaggacttgtcttacaatccatagatttaaaggccaggcctagtggctcatgcctgtaatcgcagcactctgggaggctgaggcgagtggatcacttgaggcgatcacctggacaacatggtgaaaaatagaaaaattagcctggtgtgcttggcatgtgcctgtggtcccagctacccgggaggctgaggtgggagaattggcttgagcccaggaggcagaggttgcagtgcgccgagatcgcaccactgcattcaagcctgggtgacagagcaagaccttgtctcaaaaaagaaaacagtccatacatttaatgtaatgttttttctgttttgttttgttttcccctcaaaagtggttaataagtcgaaggtgcgtcgtgcaggcagtaggaaattagaatcaaggaaatacggtatttccttcctgtcttttgactgtgccctgttttctatgcactttcttctgatttctttgcatataaaatggtcactggaaaagaatcaaatttcttgaaaagtcaatctgaactccctccccactctcccctcacatcccaccctcacaaataccctccaggttaacgttgggttgcacatccttccagatttttctgaacactagttggattcctgctttcccctttattaatattaatactgtaagcactgtctgatgtcattttgtcactaaagggtccttaagatttttaatggctgtacaattttctttcctagggtcagagtcaaatttaaccatgtccattaagattttctgtgtagatggaatagaaatacaaatgggttttacaaaatcccatttatagaatgggagccatattatgtaaaattaaaaagtgctgggctcagtggctcacgcttataatcccagcattttgggatgcaaataaccatctcttggatttcccagcattttgggacgctgaggtgggcagattgcttgagctcaggagttccaagaccagcctgggcaacaggatgtaaccctgtttctaagagaaatacaaaattagctgggtgaggtggtgtgtgcctgtggaggctgaggtgggaggatcacctgagcccaggaagtcaggctgcagtttgctaagatcatgccactgcactccagcctgggtgacacactgagaacctgtctcaaaaaaaaaaaaaaaaaaaaaaaccaaaacagaaacaaaaaagaaagaaaaaaacgaggccaggtgcagtggctcatgcctgtaatcccagcactttgggaggctgaggcaggcagatcccttgtggtcgggagttcaccagcctggccagcatgatgaaaccccgtctctactaaaatacaaaaattagccaggtgtggtgctgcatgcctgtaacaggctgaggcaggagaatttcttgaatccaggaggcggaggttgcagtgagccaagatccacgtcattgccctccagcctgggcaacaagaaaggaacaggtgaaattaatacaaatcatgatttttttagcgctaaatttccaagatgttagcattttaatatccagctattataaaaactgagatagtctacatttatagtgctggtttcaaaatttcacttattttatatattttacatattacatattttacagatctcaattttgatgctaaatttgcaatgaaaatacttgatctgtattaactatatacagattcttgactaaatacagatgtagatggttaaacacaaattaactaaattcataaaacgtgcatttgagaaagcagactcatatgtctaggctagtcttaatgagccagttagttgacttacttgtcagtgttttaattaaccttaaatgcagaattcatttcctcaacagtttcaagttctcagtagccaccccctatgcctactgcccagcatgtcagatatcacagacatgggtatgccaggcttttag

SEQ ID NO: 287 - DNA, 31537 bp, Homo sapiens
  source 1..31537: mol_type = other DNA
ctggagggaggggcgtggatacagcgggaaaggagagacccctagcggggtggacaagaagggaggaactccacagaactgcttaatccggctccatccccatcagcgggctttctcagcgcctgcacccctctctatcccatctcgaagcctccagttaatccagagtgagacgcaggaccgccgggaggcgagcggggatgctgaagctagggcaggctaaagccccgcggccaaagggcaggcttgtgcgccctccgccccctctccgccccctctccgcccctccgcgcccaggacctaattgtttgcaaaagcaaacacggaaaaggcaggtacaaaggtcgggaggagggaccgggacctgcttctgcctggggtttcgaccttcccgccagaagctccactggggcctggacctggagaagggacatcaacagttaacgtccagggcagctttcagcggcgtgggcggggatccccagggaagcactgttagcagtttcttgtacatccagcctggtatattttctgcatgtataggcaaatacctgtttgtgtgttcttttctttcttttacataaataatcgcatactaggcgcaccgttctgcactttgctttttgtccttcattatatgttttgttgttggttttgttgttgttgttgttttgtttgttttttagacagagtctcactctgttgcccaggctagagtgcagtggcacaatctcggctcactgcaacctaccgggctcaagcgattctcctgcctcagcctactgagtagctgggattacaggtgtgtgccaccacgcccgcctaatttttgtatttttagtagagatgggatttcgccatgttggccaggccgatctcgaactcctgacctcaggtgacccgcccgaatcagccttccaaagtgctgggattacagacatgagccaccacgcccgactgtcgtttttttaaaatacggacagggtctcgctttgttgcccaggcagagtgcagtggcgcttaggcctcaggcttgggccatcgcactgggccaccatatcttgaagatcattctatattgttagataaacagctcatttaaacaaaaaaatggctatctgcatattccatcatgtggactgtaccaatatttatttaacaagtcttccatggaaggacagtcttttgttcttaacgtcattttgctcatgtgtacaaacatctttggaataaattcctagaagtggaactgcttggtcaaagggcatgcgggtttgtaatcttgttagttattaccagagtgttgttcattaaggttgtgccaatgtacaatcccaaaaccaaagtatgaggaggcctgtttccccacactcttaccaatagtatgttattaaactgtaaactttttatccatgtgatagtaaacttaaaaataaaattaatcagccgggcatggtggctcacgtctgtaatcccagcactttgggaggccaaggcaggtggatcacgaggtcaggcgttcaagaccagcctggccaacatagtgaaaccccatctctattaaaaataaaaataaaaataattagctgggcgtggtggcaggcgcctgtaatcccagctacttgggaggctgaggcaggagaatcgcttgaacctgggaggtggaggttgcagtgagccaagatcgcgccactgcattccagcccgggtaacagtgtgagactctgtctcaaaaaaaaaattcatcattcaatttccccaagccacatagggagcctggactttcacccccaacctggcactaagaaggcacccctccacctccatggttcttctattgtttccttccttcccttccctccctccttcccttccttccttccttctttccttccttcctccctccctccttccctccctacctccttttctccctccctccttccttctgtcctgctcctcctctctcttttcttttctcttttttctttctttaattaattaattcacttatttattttgagacagagtcttgctcttgtagcccaggctggagtgcaatggcacgatctcggctcactgcagcctccccttcctgggttcaagcgattctcctgcctcagcctcccaagtagctgggattacaagtgcctgccaccacgcccggctaatttttgtatttttagtggagacaggggtttcctcttgaaatcctgaccttgtgatctgccagcctcggcttcccaaagtgctgggatcacaggcatgagccactgtgcctggcctaattttttattttaagagaggaggtcttgctgttaatatattgctcgggctggccttgaattcctgggctccagcgatccttccaactcacaagtagctgaagttacagggcgcaccaaaactcctggctcattttcattattaatgataaaaggtcaatccactaagaaaacatagcactccgaagtgtgtatgtatggaaaacagagctgcaaaatatgtgaagcaaaaactaatagatagaaatagataaatccggccaggcgtggtggctcacgcctgtaatctcaacactttgggaggccaaggcaggtggatcacttcaggtcaggagttcgagaccagcctggccaacatggtgaaaccctgtctctactaaaaatacaaaaattagccgggtgtggtggtgcatgcctgtaatcccacttatttgggagactgaggcaggagaatcacttgaactcaggaggcggaggttgcagtgagctgagagtgtgccactgtaccctagcttgagcagcagagggagactccatctcaaaaaaaaaaaaaaaaaaaaaattggccaggcgcagtggctcacgcctgtaatcccagcactttgggaggccgaggcaggcagatcacctgggctcagaagttcaagaccagcctgaccaacatggtgaaaccccgtctctactaaaaatataagaattagctgggcatcgtggtgggtgcttgtaatcccagctactcaggaggctgaggcaggagaatcgcttgaacccgggaggcggaggttgcagtgaacagagatcgcaccactgcaccccagcctgggtgacagagcaactctctgtgtcaaaaaaaaaaaaaaaattgccaaattaattacccttcagaaatttggttcctagtcttgatactctccaaaattgggtataattatggatttcaaatacttaaaaaaaattttctttttctttagacagagtctctctctgtcaccaagtctggagtgcagtggcataatcttggctcactgcaacctccacctcccagattcaagcaactgtcctgcctcagcctcacaagtaactgggattacaggtgcatgccaccatgcccggctaattttgtatttttagtagagatgcggttttgccatgttggccaggctggccttgaactcctgacctcaagtgatccacctgccttggcctcccaaagtgctgggactataggcctgagccaccacacctggccaaatcttttaaaatttaacaggtactattcacaatagcaaagacatagagtcaacctaaattcccattaatggtagactggataaagaaaacgtggtacatatacaccatggaatactatgcatgcataaaaaagaacaagatcatgtcctctgcaggaacatagatgcaactggaggccattatccttaacaaactaacccaggaacagaaaaccaaatacagcatgttctcacttataagtggaagctaaataatgaaaacacatcaacagagagagggaacaatggacatgggccctatttgagggatgagggtgagaaaagggagaggtttagaaaaaaaaaaacttaggtgctgtgcttcgtacccaggtgatgaaataatctgtacaccaaacccccaactcaccagtttacctatgtaccaaactggcacaggtacccctgaactaaaataaaagttaaaaaatttttttaatttaatgggtgacaaaactttgccatacactcaccaacaatgaacattatcatttgtaattaaaccttttattttgagataattgtagattcatgtgcagttgtaagaaaacacagggggctgggcacggtggctcacgcctgtaatcccaatactttgggaagccagggcgggcggatcacccgaggtcaggagttcgagaccagcctgaccaacatggagaaaccccatctctactaaaaatacaaaattagctggacacggtggcatgtgcctgtaatcccagctgctcaggaggctgaggcatgagaattgcttgaacttgggaggaggaggttgcagtgagccaagattttgccattgcattccagcctgggcaacaagagcgaaactccgacaaaaaaaacaaaaaacaaaaaacaaaaaaacctcagcatgttgggaggctgaagcaggtggatcatttgaggtcagaggttcaagaccagcctggccaacatggcgaaagcccatctctactaaaaatataaatattagccgggtggtagcgacatgcacctgtaatcccagctactcaggaggctgaggcaggagaatggcttgagcctgggagaggtggaggttgctgtgagcctagatagcagaccctgtctcaaaaaaaaaaaaaaagaaaaagaaaaaagaaacaaagaaaacacagagaaatcccaatgccctttgctcgctttctcccaatggtgacatcttgcaaaaccataataaaacatctcaactaggatactgacaatgataaagcaagatccagaacattccatcaccacaaagtttcctcatgttgcccttttacagccacatttacctctctcttgctcccgtcccctacctaatacctggcaaccactaatctgtggttcatttctataatttggtcatttcaagaatattatagaaatgaaataatatactatgtaatatattggaattggtttttgtcactcagcataattctctaaggattcatccaggttgctgcatttatcaaagtttattccttttgctgagtattatttcatggtatggctgtaccaatttgtttaactgttcatccattaaaagaacctggctgggcgtggtggcttacacctgtaatcccagcactttggaaggccaaggcgggaggatcacttgatgtcagaagttcaagaccagtctggccaacatggtgaaacaccgtctctattaaaaatacaaaaattatccgggtgtgggagcgtgtgcctgtaatcccaggtacttgggaggctaaggtacgagaatcactttgaacctgggagacagaggttgcagtgagccgagatcacaccattgcactccagcctgggcaacagagagacactctttctcaaaaaaaaaaaaaaagaagctgaaataataggaaattggctatatcaattgcaatatatccataggctagaacattctgctgctagagaggttgcataaggccagactaaggtgcttagaccttctcctgagaccagcagtctccaaagttttgttcatatgaacttaacggtacaaatattagcaaatatctcattagctgatatctcaaagcacgatatacagtgaggatgagagtcatcattaattaatgagagggcatgtaaattcacatttctttttttttctttttttttttttttttttgaggcagtcttgttctgtcacccaggctggagtgcggtggcgcaatcttggctcaatgcaacatccgcctcctgggttcaaacaattcttgtccctcagcctcctgagtagctgagtttacagacgtgcaccatcacgcccggctaatttttgtatttttagtagatacagggtttcactatgttggccaggctggtctggaactcctgaccccaagtgatccactcgccccggcttccaaagtgctgggattacaggtgtgagtcactgcgcctggtccgtaaattcatatttcaaagtgtctttttcattgttttctcaaattttattacattccttacaacatggctgacaaagaccagcattcataccagaaagagacctgtcagctgtgtccttttctacttgtttgctgtgctggtaattttcacagtatctggaacttgccatttctttgcaggaatattttgaagccatttttctgttctcgtaggacaacctagtaacatgatcctacgtttagttagactgacacgactcactacacactgcaatgcactgcagaatgctgaaagggatgcgtgaggaccctgctgcccacctcccaggcgtggaccctcgttccctcaggaagtctctgcttgacatcggccctcatgactctcagacagaggtcagatgtacagatcaagtgagaccaatacatttactatgtcatagaagaccttaattcttatttttattttttattttttgagacaagagtctccctccgtcgcccaggccggagtgcagtggtgcgatctcggctcactgcaagctcggcctcccgggttcacgccattctcctgcctcagccttgcgagtagctgggactacaggctcccgacaccacgcccagctaatttttttttttttttgtatttttagtagagatggggttttaccctgttagccaggatggtctcgatttcctgaccccgtgatccgcccgcctcggcctcccaatgtgctgggattacaggcgtgagccacgcgcccggccagaagagtttaattcttttctcatttttaggttaaaaaatgagtagaggccgggcacggtggctcacgccagtaatcccagcactttgggaggcagaggctggcggatcacctgaggtcgggagttcgagattagcctgaccaatatggagaaaccccgtctctactaaaaatacaaaattagccaggcgtggtggctcatgcctgtaatcccagctactcgggaggctgaggcaagagaatcgcttgaatccgggaggcagaggttggtgtgagccaagatcatgccattgcactccagcctgggcaacaagcgccaaactctatctcaaaaaaagaaaaaacaaaattagccaggtgtggtggtgcgtgcctgtaatccaagccactcgggaggctgaggcaggagaattgcttgaacccgggaggtggaggttgcagcgagcctagatggtgccactgcactccagtgtgggcgacagagtgagactccataaaaaaaaaaaaaaattcaggggaaaaaaagcaattaaaaaaacataactataaaaataatacaaattacaaaacaaccatttgcatagcatttacattatattagttataagtaatctagagatgattaaagtgtacggaggaatgtgcataggttatatgccaatactgcctcattttatatgagggacttgaacatagaagggttttggagtccacagaggtcctgaaaccaatttccccttcccatgcctgggatgactgaattatacagcagcaaaaatgaatatactcaagctatatgcatgagtctcataaatataatgctcacagaaaaaagcaagttgcagaagggtaaatacggttgatatataaaggtgctaaacacagaactatttaatgatatacggatgcagtaaaagtataagaaatgtatgcaaacttacttaaattcagggtgttggttacttggagtaaggcgaatgtttgggatgtcagtaggtacctgacaaatggcaacttaactttgttttggtttttttgagatagggtcttgccctttcgcccaggctcaagtgctgtggtgggatgatagctcactgcagcctcgatctccaggctcaaaagatcctccctcccgcctccgcgtcccaagtagctgggaccacaagcgcgcgccaccacgcccggctaatttttaatttttttttgtagagttcaggtctcactgtgttgcccaggatggtcttgaactcctgggctcaagcgatcctcccgccttggcctcccaaagtgctgggattacaggtgtgagccaccgcgcctggcctgcaactttacttataataatctgtgtggcagatgtcatttggcccattttacagatgaggaaattgaggcacagggaagtgaactggcggaatttcagttccgctgggttttgacactgaatcaactggctgaaccagcgagaggacggcccggctggctctcaggcctctcccggcgctcccttccggaccggtgagtgagactcctggggccacgccttgtgaaattctgaggcttcttttcagggatcgaaatcccctccggctccgccctgcgcgttgggccccgccccagcgggtcatgaatatgcaagtgcgaggaagatatttaaaggcgtcggcgccacgcgcatatccctgctcggcgctgcccgcccagttcctgttcccagactgaggcccagcccccttcgcccgtttccatcacgagtgccgccagcatgtctgacaaactgccctacaaagtcggtgagtcccaggacctgcagccggttgcggccgcccggcacccgcccggggcttgttcgtggcgggggctgcagggccgactcggggctctctggaccccctggaatcgcagcctcggcgcgtttctggccgcgcgaagccagctggaagttggagttctcgcgcggccatgagcgggccgttccgggtggccgtggactacaagtcccagcatgccccgcgacgccggggccgccgcgcggtctgcgagccgcaaactggcggcgtgctccgcgggagagcacacctggccacggcctgggacggctggcacctgccggaccctgctcggggggcctgcgcccggcctcctaggcctggaccggaccctgtccagctgggcggccccgacgagcgtccacccctctctgggcctcctacagggacggcgagggcaccccggagggtgtatgaggagaggcctggaaagcgagccccaggccggctccgatcctcctctcccctgggactttgggccagttacccaacctgtggggtcccccacccctccagcaggggcagccttgcagaaatctcgaagaaaatttggagtggtttgaaaaatcctgctgtcccaccgattgaagtgtaatacagggatagttaacgtttacttagtgtttcctgtgggatcggcactgccttctagctttattctagtctcatggctctatagggaaactgttctcattttatgatgagaatcctgaggcagaggtaacttgccctcagtcttacagctggtggtgatggagcaagattggaacgcaggccatctagatctctgagcgcaccctttcaccactgtgtgcaagcgaatacacgcggaacaatcctagtgaattttcagcaaaaaccagttcagtttggctggtagcttttcaagtaactttgacactattggaccgggtgtggtggctcacccctgtagtcccagcactttgagaggccgaggtgggcgaatcacttgaggtcaagagttcgagaccagcctggccaacgtggtgaaacgctatctctaccaaaaatacaaaaactagctgggcgtggtggcgggcgccttcattcccagctactcgggaggctgaggcaggaggactgtttgagccggggagacggaggttgcagtgagccgagattgcaccaccacgctccaacctgggcaacagagcaagaccctgtctcaaaaaaaaaaaacaaacaaaaaaagacactattaagtctggagaatgccatccacatttatggaaacacttgctgtatatctggtgatttacgtgtgtttacacaataatcttcatagaggtggacgtaatcccgttatatagagcatgaaactgaggcccttgggaggtgacttgcaaagattctgttgaagtagttcatcaagttgctaccagagtagactgtctccattgtgtggatgctgaaactgaacccagaaaggttatgtgaaggtcacatcaatagtagagctggaatgggggcttgtcatactgtggagagattagtgggtcaggattggggccattgggttgtgtgggtggagataaagctggatttggggatggggagcttagctgggtggggctggaggaaggaggccctgctgtatgccagatcttgatcatatggcattatctttacttaaggcgcatagcaagctagggatgattatccacactttacagatgaagaaactgatgtttacaggggctcttgctgttcctcttggcttgtcctggggacaggtgttcctgtgacttttgcaagtccttagctccagagattgcagcatctagcctctcctgtgcctttggagttgagggtcccagggaaaactgtggggctggcacagtgtcctcgagggcactgaaggagttatttttagctggagggacatgtggtggtggaggggtggagcttagcagcacagggcataacccattgtcccatacagccgggcccctcccaggaggggccttgagaggggcctctgctctagccctgcctggctgccagttctggttctgcggttaattggctatggaacctgcagcaaactcctctctgggtcctctctgggtcattagtaaatgctgggactcagactaggttcagatttgtgttgtttttctttgccacccttgtcacgtgccagcccctctcatggatctttcattcagttctgaggacagatatggtcggtaaacagttgctgaccccttctctgagccaggtcatgctggagacacaaaggtgacccagagacaggggtggcacagacatgcatacagataaagtagtattgtctccattttatgtgagcagatctgccacttgtctgtctccacggtcaccaccccagtctggtctctctccttgcaggtctccctggatctcttgctccgcagatccacacagcagccaatggggtcttttcaaaagacaaatctggtctctgaatgctggcccctgaaaactgtaggttccccacttcactgggactgaagtcccaactcatcttatgcctctatttgagtcaccctggtgcactcttggttcctctagcagggatatactaggttctttcctgtttccaggtttttttcagcacctactgtgtgccaggtactgtattaggtgcttgagaggagccttccaggccgagaactgcttgggttaaagccctgaggtggaaatgagtggagcttgcctgaagtcagtcaggaagcctgtgtgttgaacagctagtgagtggggaaagtggagagatggaggaggggcaggcagtcatgcagatagggcccgaagattgagggaagccattggagggtttgcttgtttagttttgtttactttagtagaatgatggaggtgatgtaacttaaatttttaagagcctccctcttctggctgctgtggggagaatggcatgttagagcatgggaccagtgaagagagtgtggcagtgtccaactgagaagtggcagtgtatttatttctttattgttttttttggagacagagtctccctctcacccaggttggagtgcagtggtgctattttagctcactgccacctccgcctcccaggttcaagcaattctcctgcctcagcctcctgagtaggtgggattataagtgcccaccaccacgcccaactaatttttgtatttttagtagagatgggatttcaccatgttggccaggctgctctcgaacttctgacctcgggtgatccgcccaccttggcctcccaaagtgctgggattacaggctgtgagccaccgcgcccagcctgagaagtgacagtttagatgaaggtggtgagatgcagttggattgcttatatatttcacttgttgagccaaaaacgtgctgattgaggtgaaagaggaaaagaggaatcaaatcttaagtttttgggcagagtagctggttgaatggtggtttcatttcctaaaatgggaagattgggagagtaaccggtagtgggggcaaaggagccatgaggactccaacatgacacataatagatccaactggacatccaagtggaggtgctgtggaggcagttggatcacatcgagtctcaagttcaggggagtagtttgggctggatataaatacgtgggagtcatccccgtagagaaggtatgtaaagccataagactggatgagcttaattggtaaacataagagaactgggagatgatggagccctgagggcccccaaaccctaaagtctgttagctaaagaggaaccaggaaggtaggtggaaaagcacaggacagtcacagaagccaagtaaagaaagggtttcaggaaggagggcaagtcattcatgcaatctgtgctgctggtagaaacatggtcttaggtaattttgcatcaggtatggagatcaggctggtctttggacggaagagcagttttagtggagtatggaagtccttaaggaggagaggggatatggaatcaggccccatggagcagggatagtgtagtgaccagccccatagggtcggtgggtctctccctgtgtgcggcgacgagagagtgtagaaataaagatacaagacaaagagacaagagaaaaggcagctgggcccgggggaccactaccatcaatgcgcggagaccggtagtggccccgaatgttgggctgcgctgttatttattgcatataaggcagaaggggcagggtaaagaatgtgagtcacctccaaggataggtaaggtcatgtgggtcacgtgtccactggacagggggcccttccctgcctggcagccgaggcagggagggagaggagacagagagaaagacagcttacgcaattatttctgcatatcagggactattagtatttttactaatttactactgctatctagaaggcatagccaggtgtacaggatggaacatgaaggcagactaggagtgtgaccactgaagcacagcatcacagggagatggttaggcctctggataactgtgggcgagcctggctgatgtcaggccctctacaagaggtggaggagcagagtcttttctaaactcccctggggaaagggagacacccccccccctcccgccgccgccacttcccagtctgctaagtagcgggtgttgttccttgacaccttttgctaccgctggaccacgatccgcctggtaacgggcgtcttcccagacgctggcgtcaccgctagaccaaggagccctctggtggccctgtccgggcataacagaaggctcgcactcttgtcttctggtcacacctcactatgtcccctcagctcctatctctgtatggcctggtttttcctaggctatgattatagagcaaggattatcataatattggaataaaaagtaattgctacaaactaatgattaatgatattcatatataatcatatataagatctatatctagtataactattcttgttttatattttattatactggaacagctcgtgtcctctgtctcttgcctcggtgcctgggtggcttgccgcccacaggacagctcatctattttattttatttttttgagaccgagtctcactctgtcacccaggctggagtgcagtggcatgatctcagctcattgcagcctctgcctcccaggttcaagtgattctcctgcctcagcctcctgagtagctgggattacaggcacccaccaccacacccggctaatttttgtatttttagtagagacggggtttcaccatgttggtcaggctggtcttgaactcctgacctcaagtgatctgcccaccttggcctcccaaagtgttgggattacaggtgtgagccaccgcgcccattcaactcatctgtggtaacaggaaagagtgcctggtctgaagctgtagatgactgctataggtgactagtggattccataggggaaaagtggcctggttctgaattcatctcagtgaattgggaagtgagattgtcattcaatggggaaaggtgttggagggttgaggagagtagaaaatgggagtaaatttactaggaaaatgtcataggattgctgcaatgtgctatgtgtcttttatggtcttaataaatatgatatcttggccaggtgtggtggctcacacctgtaatcccagcactttgggaggctgaagcaggtggatcacgaggccaggagttcaagatcagcctggccaacatggtgaaaccccgtctcctctaaaaatacaaaaattagctgggcatggtggcgagttcctgtaatcccagctattggggaggctgaggcaggagaattgcttgaaccgggacctgagaggtggaggttgcagtgggccgagatcgcgccactgcaccccagcctggtctacagagccagactatgtctctaaaataattaattaattaattaattaaatatgatgtcttggtggggttgtgattgtcctcctgctgggttcagtgggtccggtgcagtggagggtcgggtttaattgggctgagagttttgccaagtgagttctcaaagggaaagggggtagaagggacactagaaattggtaggatgaattgaatagaggttctcacctgacaggccacagccttgttggagcttggcctctggaaggagaaaaccagaaagatgaggcgtggctagagttgggtgcttgaagtccagatttccaaggagagctatcactggtgatggcctactagggtaggagggctggggtgggtggcttgagttgaggcacagccggagtggtctctcatgcgggaggcgtgtttcatctctgaaattgttaaaatgcactgtaggaagctgactgacagacaattttattgattattaaattcttagattattaaattctctacagagtcctttgcctcccaccgcctacctctttgggtgtttggcaggatctcagcttccctaaagataaaaatcaccaggagtcttagacctgctgaatcatattttccaggggagatttacaagcatgccagaggaacatcccttaccggggaagtctgcaaactttgacctagggactgacctagggtatgaccttggaagtggaccagtgtggtaggggagagtattgagatagtgagttagctcataataatatccttctttcctgcctgagaatttgaacaaattcgagacattttaggtggcagatagcacctgaaatactttttgttactagtaaccatgaagccagaggatgtagattagtattttaggtggcaacacctgaaatattaccttttattactaataacctcaaagccagaggatatagattaatatgaaatccaaatgatcctgcttattgaacccccagattcagcagttacccaatcagttgcaggcaaggtgggccagggtaggttggtctctggaaaagcagagaacaccagcttcctgcaagtgggcaggtgagtgcttgcttgcaaaaagaagggagagctaagctgagcacaccattttttcctctcagttttactggtcagacaagctcaccccacctcccctggggcagagaggccaagagcattcgttatacggatgagttcctccaggtggaaagaaacatcaggagtggggaagcatttttacatctaaaaggagatcaaggaactgtcaaatccaaaatgttagatagtatttataagtgttgaatcaccgagagtgatgactgagagaggaagatggagaaccagcagctaacatctttagggagtctttagggagtgaggagtggcctggaggttggtaggtgtcagcagaaaggcagggtagtgggaagtatcatgtgagctatttttcaaagggacgcttctttatgttgtaatttttgtgtccctgtgtgattaaatgtgttctcccacaagtcagaaaggtgcaggtaggcagggaccgtgtctttcttgagtactctggcttcataaatacttgttgcatgagtgagagaatgcggtgacagagtgctaagccctagtgtgttgagtccacacgtggatcggggtccatgcagtgaccgcccctcttggttggtgggatgaggggactcacggaactcccacctgtttcctcccgtagccgacatcggcctggctgcctggggacgcaaggccctggacattgctgagaacgagatgccgggcctgatgcgtatgcgggagcggtactcggcctccaagccactgaagggcgcccgcatcgctggctgcctgcacatgaccgtggagacggccgtcctcattgagaccctcgtcaccctgggtgctgaggtgaggcccacagctgtatcaccccagagtccttgccctccctgggttcagccagggaagaagacgactgtgccagggtggggaccttccaggtgtggagctgaccgcgggcctggaggggttcctccctctcactcggtttcctccgtttcccagtgctgccaccccttgtggtgagtgttctgcagattttctccctggctgggaaggtcactgttggctaccctcaaggcatcctcctgatggatgctctggcaggaaaaattcaacacccatgtcctacttagtctcttaagggccagcttgccttggcccttcgggggtcacaggcctaccctggacccatcatggctgctggatgatggcagctctgattggttcagcctgggtcatgtgtgccaatgattaacagctctcctaaggtctcagagagtcaagaagcaagctggtttcccaaagcagggtagggcaatggagccaaaatccacagaggggctcagggctgagtccttggacctcttctttcttttcagcattcactcttggcggtctgattttatagctttagacactatctggtgatgactgtcacatttttgtactagcctggacttctcctggaactcaagactggcatatccaggagcgggggcgttgacgctccctggaggtctagtactcatctcaggcagaacgcgttcaaacagactcaggattttctgccccctcttcttcccaaagccttccccacctgagtaaatggaacctctgttccagccttctgggttctctcaattcacgaatctgggagtcatctcctcccctccctttcctccccactcccaactccctttactccaacaactcatccctctgcaaatcctgtcagtgcagccttcagagtagacccaggatgtgacaacttctcatcatctccactgctactgtcatatttcttgtctggagtcttctccaacagtctctgcagttgtccccttgcttccaccctttcccttccacacagcactggagtgaggttttaaaacctgagttggatctcgcccctgctctggctcccatctgcccacccagcatccccagcctgtgatcctagagcttgctgtgcctagatcccaagcctctccccactacccgaagctctcccttttcctcgcccagcgtccctggtgcttttgagccatcagtgaccaacagccttgttttgatggctcttctaggtgcagtggtccagctgcaacatcttctccacccaggaccatgcggcggctgccattgccaaggctggcattccgggtaagtcctgcttgcttctgagacgtggaatttgtgaagggattctgccctctttgcttcactgactgctagagcaacagacttccttacatatcagaaagggagaggagtcaccgccacaaaatcctagcccagcgaccccacaggaaagagctgctttgtcccatcatcatctaaaatcctgtggaagttgtttattgacccaggtcaagccgtgtaaccaggaagagcaagatcttatgattgggaactacatgatgaagcggaggggaagttcattaaaggaaggatgtggatctctttccaaagaactggggagggctacggggcagaaaaagaggttcactgcctagggtatggcggtctaaaggactgaggaaggaccaagtctaacgagaatggagttttcacaggctgggcacatgtctgcttggacttggggaggggagtggttagatctgacccagtgattaggacattcaagattgcttctaaccaaccacaggtggacaggagggggtggcacagcactccttcacagactgaccagggctgaatgggcatgatccccattcctcagccttggcaccgtggctttcttcttttttttttttctttttgagacagagtcttgccccgttgcccatactggagtgcagtggtgcgatcttggctcactgcaattcttaagactattgtctgctccagttgtgggtagaagcagctggctctgcttggccagcgtcctttgctcacaagaggctcctgggaaccccacacctgtgccctagtcatgccacatgggaggagtgtgggctggtggtcagtagccctcagttctggtgtctattctggaatttcatttagagtggcccaagtgcgtcttagctcctctctgggcatctgtaagtgatgataatggtcatggctgcctcacagggtttctatgaggaagaatgagatggggtatggaggatttagagtcatgtctggcagaaagcaagtaccccacacatggtagctgctcgtagtcattttttggccagactttgcctgagattcccccacacagaggctgctagtgctccagtcctttcagtgcagagcaaaccctggatcctgccgtgtggatcctgctgagggggaggcgttgtggggtatcaagccctggtcactcagggttgatgcctcagtccttggcgcccaggcagaaggggatgggaaaggaaagaatgatttcctgatatctatatctggggcggggggctgtacatggcttctgtctcacttaatccatactattgtgagccctatttacagaggagaagactgaggctcagagaggtgaagtgatttgcccaaggtcacacagctggcaagtggcagagccagggtttgaactcagatctatctggctccaagttgtgtcctgaccactgctgagttttcagaggggccggaggtggctggggatgggagttgggaaggaggtagttttggctctgccagagttgttccctggagcaggtaccagttgggaagtccaggccctgatgtgccactcaccctccagtgtatgcctggaagggcgaaacggacgaggagtacctgtggtgcattgagcagaccctgtacttcaaggacgggcccctcaacatgattctggacgacgggggcgacctcaccaacctcatccacaccaagtacccgcagcttctgccaggtgagcagggcggggcaggtgggctgggtgctggtggcctgggtggggcctgtttgcccacatgatggccgcaggcctggcaggactcccatcacctcaagcagcaggatctggaagatgggaggatggcaggctctggcattcatgctggggcctcctgacttctgagggtgcgaggctagggcagctgagctgatggcccaagggcaggcacagacagggccatggttgggaatagctgggagggagccagctttgttcaaagcaggtacgcagagtgcagaggccctgaggcaggaatggctggagtgttcaggaaacagaaaagaggcccacaggatagcagtgagcaaagggagccttcactgcgggtatggtgtgaacttcgtgaagaccagatgtgtcagggcctaataggccaatagaaaagtgtttgacctgatttgcagagcaaggggaaataactggagggcgttgagaagatttctctgagaagatacatgttagaaatggctgctgcatggaggatgggttgtggtagggagactgggaagaagcgacagggtcacggactagagcagcggcagtgagaatagagaagctgggagttgttcggaggcagagtcactaggcctggtggtggcttccctgtaggagggcgttggggactcctccctcacgcgggtctgggtgattggggggcctgtgggatcagtcacagagatgggaacccagaaagaggaatggctttagggggtaaagatgaggaatttgcatgagcacaggtgtggcatctctgaggcttgtcctgtcccctcttgtttaggcatccgaggcatctctgaggagaccacgactggggtccacaacctctacaagatgatggccaatgggatcctcaaggtgcctgccatcaatgtcaatgactccgtcaccaaggtgagccgaggggcagtgacagctcccgctacagtggctgcagctcaggacgaggcctctgaagaagagtgcccaggaaggctgagattagggacatgaagccctcatttgagggggcaaaagcggttatagacaggctaatgagtgcgtttaaaaggggtgtcagagctgggtgttaggagctttatggctttgggaagaagagctttcaagttaagcaaggtctttgaccgggcaatctctcctagtaactgatgcctaggaaggctccacactggcagagaaagattagagagaagctctttgagccgatcggggtgaagggcttgtgggggcattgggtgctggaggggttcagcccaggccgggatgcttggtgggcccatgatgcctgggctcttcagaatactctgaggccaagttgtcctggccccagggccttgcctgcccctattgtctccttaccccctttcctttcagagcaagtttgacaacctctatggctgccgggagtccctcatagatggcatcaagcgggccacagatgtgatgattgccggcaaggtagcggtggtagcaggctatggtgatgtgggcaagggctgtgcccaggccctgcggggtttcggagcccgcgtcatcatcaccgagattgaccccatcaacgcactgcaggctgccatggagggtaggatagggcaagggttggttgtcagccactggggccagagggaggggcaaggccaccgtagatgacccacagccactgtctctgcacaggctatgaggtgaccaccatggatgaggcctgtcaggagggcaacatctttgtcaccaccacaggctgtattgacatcatccttggccggtaggtgccagatggggggtcccggggagtgagggaggagggcagagttgggacagctttctgtccctgacaatctcccacggtcttgggctgcctgacaggcactttgagcagatgaaggatgatgccattgtgtgtaacattggacactttgacgtggagatcgatgtcaagtggctcaacgagaacgccgtggagaaggtgaacatcaagccgcaggtgagaagctcccgccttgccagtgggctgggcagatgggagtgcagaggagtgctggctgccagggaggagagctgaggagatggtggcaacctgtgcagggggatggggagaagagggcctagcatcagagccagccagacgtggcaaccttatcctgtgggcagccggcatccctgaaggtatcaggcaggtgagctgtatgtggtgaggctgtagttttagaaagatcactctagctactgtgtgcagaataaaagcaacaatggcgggtggtggggagagaggcttttagaggaggctcgtagaatccctgcaggggatgatggcagcctcagcttagggagtgctggggtggatggacggcatgtggggtcaggatggaggcagagtaacaaaggacacagctttggccgggcatggtggctcacacctgtaatcccagcactttggaaggccgagatgggcggatcacctgaggccaggagttcgagactagcctggccaacatggttgaaaccccgtctctactaaaaatacaaaaaaattagctgggccgggtgcggtagctcatgcctgtaatcccagcactttgggaggtcgaggcgggcggatcacatgaggtcaggggttcgagaccagcctgaccaatatgatgaaaccccatctctactaaaaatagaaaaattagccgggtgtggtggcgggcacctgtaatcccagctatttgggaggctgaggcaggagagaattgcttgaagctgggaggcggaggttgcagtgagccgagatcgcaccctcgcactcctgcctggttaataagagtgagactccatctcaaaaaaaaaaaaaaaaaaaaggccaggtacagtggctcatgcctgtaatcccagcactttgggaggcctaggtgggcagatcacgaggtcaggagtttgagaccagtctggccaacatagtgaaaccccgtctctactaaaaatacaagaagttagccgggtgtggtgatgtgcacctgcaatcccagctacttgggaggctgaggcaggagaatcacatgaacccgggagatggaggttgtagtgagccgagattgttccactgcactccagcctgggtgacagtgcgagactctgtctcaaaaacaaacaaacaaaaaaatcagctgggcatggtggtgggtgcctgtaatcccagctactcgggaggctgaggcatgagaatcgcttaaacgtggtaggcagaggttgcagtgagccgagattgcgccattgcactccagcctgggcaacagagcgagactccatctcaaaaacaaaactaaaaacaaaaaacaaaaagggacacagcttgaatcactgtgtgaggagcaggcccatgcactgagctgggaaagaacaggtttgcattgggcattggggcactgaaactggaagatgagttcttatagggggtgtgaagttttacttgagttgcaattattatgagtttatttttttctctgattataaaagtagtatgtttctggaagacattttggctttggatatcaagagctttaaagttaagcaacctctttgactgggcaatctctcctataattggtccttaggataattaaatatgtatgtagagatgttcatcattttttttttctttttttgagatgggctcactctgttacccaagctagagggcagtggcatgatcatggcacactgcagccttgacctcctgggctgaaggagctgatcctcctgcctcagccttccaagtacctgggactacagatgtgcactactacacctggctaactttttattttttgtagagacgaggccttgctgtgttccccaggctggtctcaaactcctgagcttaagttatctcccaaagtgctgggattataggcgtgagctgccacaccaggtccaccacattttttaaagggagaaaagcccacctatgtgaggttctttgagttggtgctgtgccgtgtttgagatatgataaggaagatacagacacagagttggccaaagccctgacacccacccagtcacagccacaccagaagcccaagtcccagagaggcagacaggcagctctatgaacccacatcccctacactgctcctcttgggtgctctgctcctgcgtgggagttctccttggctaggtcctgcactagtctagggtgtcagttcccggctaggcagagggcacctccatctctgcctagaaggcctggcactcatcacagtgtgggggtggccagggcgtgcttctgtggcagccacacccctgacagccatctgtctagacctcctttttgcaaaggcatcacaggtgaaacctgctacattggggtgatgggcacctttctgccaagctgccctccaaagctggactctatgcccaccctcaacatccttgacagtcttgccaaccttctgcccaacattatctcttgtccgtcctctcaagggcctctgtactcaggccataattgaccactccctgaatacccactgcagctcctacttctgctcatctgtccagacagctgcatttgtctggaacagaacacatgcccttctccttgttcatcttctcagcccagctcaagagacccccttctggccaggcacggtggcacacacctgtaattccagcactttgggaggccgaggcaggcggatcacttgaggtcaggagtttgagaccagcctggccaacatggtcaaaccctgtctctactaaaaatacaaaaaattagctgggcatggtggctcatgcgtatagtcccagctactctggaggctgaggcaggagaatcgcttgaacccaggaggtggaggttgcagtgagctgagatcacaccactgtactccagcctggatgacagagtaagactccgtctcagaaaaaaaaaaaaaaaaaaaattaataaaataaaaaagagacccccttcctggccagctcctctggcagaggcaatgcccacactcttagtacagacccctagtgcagcatccatcactggctttggtctctgaccccactgttgtaccaggagggtagagtccaggttgacgtgtccctgcaaggggcttagatgggtatcagtgagtgcttattgattgaagcatcaatcaatgcctgatgggcatcagagacctttccttggatcggtactaggcctctggagcagcttggaaacctgggcttttggggaaatgtttgggaggctgcctgagggtggagggatggcaagggaagagctgggagtggggagaaagcaagtttgtgtgttcagacagctgggacagacggaggactggggcactgaggctggggatttccatgtcacgttcactcactaaaccgggagttctcaaccttggcagtcacctgggagccacactgtgggccacaggaataggagtctctgggaatgaggccaaggtatctttttttttttttttttttttttttgagacggagtttcgctcttgttgcccaggctggagtgcaatggcgcgatcttggctcaccacaacctccgcttcccaggttcaagcgattcgcctggctcagccttcctgagtagctgggattacaggcatgtgctaccatgcctggctaattttgtgtttttagtagagacagggtttctccatgttgttcaggctggtcccgaactcccgacctcaggtgattccccccgccttggcctcccaaagtgctgggattacaggcatgagccaccgcgtctggcctgggtatcctcattttttaaagcttctgaggtgattccaatgtgagcgccacggcattcagcttttgctaagctgcattcaaaactatttcatggttattgagaacatgggatctgtcctcagaccgtccagactcaaattgcagcctcctcttagtgtgtggctctggacaagtgacctaacccttgtaaacttcagtttctgaatctgaaatggggatgacagcagtactgaaatcacagggttgtttctgggatgaaatgtggtagttacctgtaaaggacttagtacagggcacatgacagtgatcataacgataacattagctgctgcttactgagtgcctcatatgcgccaagcaagtgtgagcacgtgaagttctcacagcagaactgtgcagtctgcagctcagcatttctttgttgtttttttgttttttgttttttgagacagagtctcgctccgtcgcccaggctgcagtgcagtggtgcgatctcggctcgctgcaaactccacctcccaggttcacgccattctcctgcctcagcctcccgagtggctgggaccacaggcgcctgctaccacgcccggctaattttttgtattttttttttagtagagacgggctttcactgtgttggccaagataatctcgatctcctgacctcatgatccgcctgcctcggccttccaaagtgctgggattacaggcgtgagccaccgtgccccggccagctcaacatttcttaataaatattggctgttatttttgtgctaagccatgtgctggaggttgttttggagcagttcggactcctcatgggcactgttggaggcagagaggcctgccagatcagagggtgggctgtgggagcggggccctgcctgccttcactgttgccctgcctgcgtgtaggtggaccggtatcggttgaagaatgggcgccgcatcatcctgctggccgagggtcggctggtcaacctgggttgtgccatgggccaccccagcttcgtgatgagtaactccttcaccaaccaggtgatggcgcagatcgagctgtggacccatccagacaagtaccccgttggggttcatttcctgcccaagaaggtgggtttattcttctacctcaagccaagggtcacgtgtctaatcctgggatccccacacagggcttgccagagtttataaagtgcttgcctgtctgccctcttagaggccctcatggggtcctctacagtgcagaagtcattctccccattgacagaagaagaaactgagacccacagtagggagtggctccctggagcacagcagagcggcaggaccaggtggtgaggagagcctgggccttggagcgggacacaccccagtttgaatctcagccccaccacttacaggctgtgtaatccaggcaaattctttctctgtcttcattttctcatctgtgaaatgaaggtaatagcaacccccttcaggattgtgaggatttcctgagatcatgaacccacacacccacaggggctaggcaggtaaatgagtgatgccagctgaacaaggactggaagagctgaaggggtaaagggctggttgccacctaggaacccaggtccgtctgaccagggcttctaacctttcaggagagccagagataccaagatctctatacaaaatgattttcaaatacaggcaactcattaaaattttattttgattttgatttttttgagatagagtctcactctgttgcccaggctagagtgcagtgacgtgatctcggcttactgcaacctccacctgccgggttcaagcaatcctcccacctcagcctcttgagtagctaggattacaggcagatgccaccacacttggctaatttttttgtatttttagtagagacggggttttgccatattggccagactggtctcgaactcctgatttcaagtgatccacccgcctcggccactgcacctggcctcattataatttaaaaaataactgggtgggttaacttggacatgtgtataagctgagtgcagtctgcaggctgcacgttgtggccttgtaataagatgatacatccctggccaggcgcggtggctcacacctgtaatcccagcactttgggaggccgaggtgggcagatcatttgaggtcagaagttggagaccagcctggccaacatggtgaaaccccatctctactaaaaatacaaaaaaatgagctgggcatggtggcgcatgcctgtagtcccaggtacttgggaagctgaggcaggagaattgcttgaacccaggaggtggaggttgcagtgagacgagattgtgccactgcactccagcctggtgacagagtgagaccctgtctcaaaaaaaaaagatacatccctaagcatggcatctcactatggttgtatggtctgcatactcatgaagatgaagtcctctgacatgaaatccagtgctcaccctaacaccccatgcagtccacccttccctggggtcaggacagatgttttagtcctggcttttcttggcagttttacaggtgaactttgctttgtcccttaccctgtccaatcctcagtctccttatgagctaaatggtaagagtagctcttgctcttccagccttttgctgctggagaagctgtgatggggtctacataccatcccttcatcttttgaaaggctggttctaccaattgaggaagacgcaggaagaggcctggggcatctgcctccagggccagccaacaactaatctccctggagcaatgtcttgctggaccaaacattttactcataaggacctcaaggcataccttgttctgtgcagctggttgtggggttgaaagattctcacttgatccccatctaatcccagttgggagaaatatggctatgagtttggtgagaaattggtcaggcctttgaaatgagggcagggttggaagtgaaagaggcaaagctcccgcctcagcacctgaccctgtccttaccacttttcttcatcattgctaacatgtggcttggggacaggacactcttggcatcatgcctcacatgctgtatgcaggcaagggactaggtaccttggtcaacaatgacagagaaggcagccaccatttattaagtcacctactgcacgaatgactctgagtagcactgatctttgtaacagccttgagagatgagtgatccatccatcctgcgaatggggaaagtcaggtgtagagaccgacttgctctcacagatgttaagtatcaggccaggaatagaacctagctctgtctgtccaaggtgttgaccttaggacgtgacacacaccttctggttcagggtgctgggagaaggaaaagttctgggctagtccgggccaagcagaaggttgatttcaatgtgtactgtgggggttggaggccatcgttctacctctggaactgacgtggactcagttctaggctgggccctggtcctactgttgcccgcctctctgctgagcacatcaccttctgcaggctctttgcttcatctgaagatacaaggataaaccgcacccatcctacttcttaagggtgtttgggaggctctaatgaaacagtagatgtgaaaccacttgggaatgtaaaagctgtgggctgagctgtggtcagaggccgccatgccatcatgggacaggatggggtcccttaggggtagggagaggcctacctcatgagagagttagaggcttgcttgtatttaactcttgcctctgtcctcctcggtttctgcataatctcttcaaagctgctctagaggccataagctgggatgcttgagacacattttggggctttgaagccagatagacctgggttcaaatcctagctctgtcattcactagcttggtgaccgtggacacgtcatttcacgtttctgaaccttgatttcctcattttataaaaggaggatggcagtggattagaatccttttggtcacaagtgatagaaacactattcaaaccagtgtatcagttatcttgctgcataacaatctaacccccagacttactggcttcaaataataaatatttattatttcagtttctgtgggtcaagaatttgagatcagcttagctggctgcttctgactcaggctctttcatgaggttgcggtcaagatttctgccagggctgcaatcatctgaaggtttgactgggtctggaagatcctcttcacatcgctgttgacaggaggtctcaattcctcatgcatgggcctctccagagggctgcttatgcatcctcaggagatggcatctggcttcccccagagtaagtcatccagaggagagcaaggaggaagccacagggtctctatgaacttgtgtccaaagtcacacaccatcacttctgctttcttctattcattagaaaggaatcactcggtggggtggggggaggcggtggggattaggctctaattcttaaaggagtatcaaagaatttatagatacattttaatcaaaaaaagcaaccagtttaatccaaaaaagaactttattctcgaatctgccaggcacggtggctcacgcctgtaatcccagcactttgggaggctgaggcaggcagatcacctgaggtcaggagttcgacacctgaggtcaggagttcaagaacagccttaccaacatggtgaaaccccatctctactaaaaacagaaagttagctggacgtggtggtgcacgcctgtaatcccagctcctcgggaggctgaggcaggagaatcacttgaacctgggatgtagaagttgcagtgagccgagatcgtgccactgcactccagcgtgggcgtccgaatgagactctgtcacaaaaaaaagaactttattctcggatccaaacactggaaacctaggattccgtgtcatcatggctctgtccttctgtctctcggatctatcttcatttcacttgtaaaatagacttggaactggtgagctgagattgatagatacccttccctgtttaggaatcccagtggggttggagcaccttgtctctgcctgtcatggaaaatatgtcctgtgcatagatcaattccagagaagcattttggttagctgcttgagttgaagaatgaggaaggagatgtgattgatggtcctgtcaagccacatgtaggggagggtgtggcatggttcccttttgaggggggctgggcagccaaaacaacacattaactgaggctgggtgtgaggatagaaagagttaacatgagtaccacacatggcagaaaccctaacagaacacttctgcctctattggcagccagacgcgtgtaggggtcccagaaaatggcactgattcccggtcttcctttgtttctccccagctggatgaggcagtggctgaagcccacctgggcaagctgaatgtgaagttgaccaagctaactgagaagcaagcccagtacctgggcatgtcctgtgatggccccttcaagccggatcactaccgctactgagagccaggtctgcgtttcaccctccagctgctgtccttgcccaggccccacctctcctccctaagagctaatggcaccaactttgtgattggtttgtcagtgtcccccatcgactctctggggctgatcacttagtttttggcctctgctgcagccgtcatactgttccaaatgtggcagcgggaacagagtaccctcttcaagccccggtcatgatggaggtcccagccacagggaaccatgagctcagtggtcttggaacagctcactaagtcagtccttccttagcctggaagtcagtagtggagtcacaaagcccatgtgttttgccatctaggccttcacctggtctgtggacttatacctgtgtgcttggtttacaggtccagtggttcttcagcccatgacagatgagaaggggctatattgaagggcaaagaggaactgttgtttgaattttcctgagagcctggcttagtgctgggccttctcttaaacctcattacaatgaggttagtacttttagtccctgttttacaggggttagaatagactgttaaggggcaactgagaaagaacagagaagtgacagctaggggttgagaggggccagaaaaacatgaatgcaggcagatttcgtgaaatctgccaccactttataaccagatggttcctttcacaaccctgggtcaaaaagagaataatttggcctataatgttaaaagaaagcaggaaggtgggtaaataaaaatcttggtgcctggaaga

SEQ ID NO: 288 - DNA, 32744 bp, Homo sapiens
  source 1..32744: mol_type = other DNA
gtagctcccggaataggagcgttgcgagacggtcggttccaagtgggcctgggcgcgggggagaggcgggtctgtcctcgggaactgcaaggccctgtgagcgggaggactgggatcccggccgcggctgctggaagcgtcgaagctcagcggggccgcggacactgacctgtgcttagaactcatcctggcccgcagagcctgccgcgagtccctggcgtcccctgtggcgggctcttggagccactttcccgagcggaagtcagcccgcggctcggactccggcgggacctgctcggaggaatggcgccgccgggtgaggagttgcgcgtggctttggggagagggctgtcgcccgcgggaggttactagtcgccgctcgagagccggccaggcgggatccccttcccctgcgggacaggggcatgggcacaagctctggctggggcgctctcggatcgagggtccgaaggagggctgcgagctggtgggagtgcccgcgacctggcggggttggtgcctgggggaggggtgcagcgcggagctacgggtcgccccgaggctcagccgtggggaccgcggacgcgcttagcctaggtctggcctcattcatttcactcgcgcgggcttctgggccaggcggcctaaggttctggtcccggcgctgccccttactccgtgtgaggttttgggcagattgtccttctttgtgctgtagtttcccattcagtgaaaggggcaaagaaaaccctcacttctctctgggagcctggagcataagttctcaagtgacactctaggtgcaaacttgcagtcggccacgtattcattgtgtaacccaaagcaggttacttaacccctctacacctcagtttctcatctgtaaaataagttagtcaaattagtcacgttatctgcctcgttgagttgctttattaagtgaaataatcttcgtgcttagtttagaacagtgcatggccctaggtaagaactaagttaactgcattggaagttactgagtagacgctgtgcagggtggaatttcatgtagcctcatcgtaactttggaagcatgtactcttgttactaccatttgacagatgagaagttggaatcccacggaagggaacttacttgcccagggtgacacatgaatgagtcagtggctcaccgtttcattatttgagaagttcaggatagtaaagtggttaaaagcagactttggattcaaattgcctgaagtttgattttcagtgatgtgtcctagggcaggtaactacttctgagccttactttcctggtctgtgaaatgcagaaaatagccaccttgcttagatgttgtgaggatttaatgatttggtgtgtgcaaagcacagcatagcgtgggcatacctaacatattaagtgctcaacttttagtcagaaaagttactgctctcgttaacatggagtgagaagattaggattctgacacaggtgctgttttaggggaatttacggtctaggtgggaaaatgctagtcgcagccattcactagatcttcatatattgggtacccgcctgtgcacaaggcattggggattcagcattagtatcttgactccgctctctcttaggtctttctgtccattagcagtttctgataggctttgactttgaattctagccagactaactctcatcacttctcatcatgttcactgctgttgccctggtttgggccaccatcatcttctggcttggattatggcggtagtctcccaactggtgtcccctgctctgtccttgcacctgcatggtctgttctccacacagtattgtttattctcaacacagtaataccattagagtgtaagtcaaatcactcctctgcttagaactttccagtggtctccagccgggtgcggtagctcacgcctgtaatcccagcactttgggaggctgaggcgggcggatcacgaggtcaagagatcaagaccatcctggccaacatggtgaaaccccgtctctactaaaaagacaaaaattagctgggcatggtggcacgtgcctgtagtcctagctacttgggaggctgaggcaggagaatcgcttgaacccgggaggcggaggctgcagtgagccgagatcgcgccactgcactccagcctggcaacagagcgagactctgtctaaaaaaaaaaaaaagaactttccagtggcttccactacggtggtatacaaggccctctggatttgtcctctgctacctctgttacctcatctacttcttaccctttgcttattccactcaagctgtactgtccttgctgatctcaaaaaacactgtatgtgtacatactcctgattcagaatgtttgcatttggtttttcttttcttttttttttttttttttgagacagagccccaggctggagtgcagtggcacgatctcagctcactgcccactctgcttcccagatcaagtgattctcgtgcttcagcctccctagtagctgggattacaggccaagtcaccatgtgcggctcatgttttgtatttttagtagacatggggtttcaccatgttggccaggtttgtcttgaactcccgacctcaggtgatccccctgccttggcctcccaaagtgctggggttagaggtgtgagccactgcgcctggccatattgggtttttcttcttagcatagtttcccaccagatatctttatgacttgcttcttcttcagatctgtactcaatatgtttatttcttagtccttcatagactaccgtatttaaaatgcagcccttcccaaatatctcttctgtactttatttttttccatagcacttactttgtaatgtgataaataatgttatttcatgtgatgtcttttgtcactagaatagaagctctttgagggtgggagttttgtttcttttgtttcctgctgtatttttaacacctaaagtagtgtgtggcacatagtagctcagtatacatttgatgaatacaccacgtgatagattttttctttttttaatttaattttatttatttatttttatttttttgagatggagtctcactctgtcacccaggctggagtgcagtggtgcgatctcggctcactgcaacttccgcctcctgggtttaagtgattctcctgcctcagcctcccaagtagtttggattacaggcacccaccatcacacctggctaatttttgtctttttagtagagacagggtttcaccatgttggccaggctggtcttgaactcctgacttcaagtgatccgcccacctcggcctcccaaagtgctgggattacaggcgtgagctactgtgcccagctgtcttttatttttttgagacagggtctctctttctcacccagggtggagtgccatggtgtgatctcagctcactgcagtctcaacctcctgggctcaagtgatcctcctacctccgcctcccgagtagctgggactacaggcacacgccaccatgcctggctaatttttgtattttcttttttgtagagaaagggtttcgccatgtcgcctggtctagtcttgaactcctgggctcaagcatccgcctgcctcagcctccccaagtgttgggattacagaagtgagccagtgccgctggccaatagtgccttttttcaaggattctagttcaagcttaatttaacactaaaggcaaaggatttagggccactcatgttagcctagtgattatttgttactgctgttacttgggtgccagacaatgcactttatcaagaagcagcccattcaaaagtgttttttgttttgtttttttaaataaatgaagtagaaatgtaccactcctgcagcttcctgtcccctggggcatcatagatggggattaatttttcttttcatttattcagcaaatatttattcagtaactatgtgccaggcagtgtgcaagacttggaaatactgggatgaacaaaagaagcagtctttatcctcatggaacttacagtttagcagagaaatcagacattacgctgttaaagttgtagaaaatcccacagagaagtacagattgctatgagtggatataagcacaacaataataatagtagtagaagtagtagctaacattgatatagcatttgttatgtgccagtcattattctaagatttttttttttttgagacggagttttgctcttgtcactcaggttggcaacaatggcgcattctcagctctctgcaacctcttgtctcccaggttcaagcgattctcctgcctcagcctcccaagtagctgggattacaggcacctgccaccacacccagctaatttttttgtatttttagtagaggcggggtttcaccatgttggccaggctggcctcaaattcctgacctcaggtgatccacctgcctcggcctcccaaagtgctggcccggccagatctttctgtattaactcgtgtaattgtacctgaggtagatactattatcactttacactttaggaaactgaggcaccagctggttgaataactgccaagggcacattgctaataaatggcagaggtgtgatttaagcctggccccagagtctgggttcttccttacattattgtactggggaactaatcctagggagagctgcttaaggaagaggtgcttgagctgaattctgaaagtaaaaattaagccaagttgaggtaaaaacatggaaaaatgctgagcaggaaagaacctggcttcttagaggacagagaagaagccagagagcaacagatagcgggaagcgcgagggaggagatctggttgagaggctggcaaggtgtgaggattcaggattgggtttgtccttagaggcagaggacttacagacatctttcagatgggaatagtaggataaggcctgtgctttagatgcttggaggctgctgggaggactgtccttccaccagttgaagagcaggctccctgccttcccaaggcttctcctcaggttaaacccctggattccctcgcccttccccatgtgatttggttcccagatcttggtgtgcatcatcattgggactgtgtatagcaccttggaagagtgtagagtgtactgaatggttgtttccccccaaggttcaagcactgtcttcctgttggccctgacaatcatagccagcacctgggctctgacgcccactcactacctcaccaagcatgacgtggagagactaaaagcctcgctggatcgccctttcacaaatttggaatctgccttctactccatcgtgggactcagcagccttggtgctcaggtgccagatgcaaaggtaaggctgcttttgtcctggtggtcagggtggttcaggagaaccttcatcccctcactatattcctttggggtagttcaaaactaactcttgctcatttgaggataaccaaggttaatccaatataagaaatatttggccaggcgtggtgactcacgcctgtaatgccagcactttgggaggtctaggcaggtggatcacgaggtcaggagttcgagaccagcctggccagtgcagtgaaaccctgactctgctaaaaatagaaaaaattagctgggtgtggtggtgcatgcctgtaatcccagctactcaggaggctgaggcaggagaatcgtgtgaacccaggaggcagaggttgcagtgagctgagatcccgccattgcactccagcccaggcaacagtgtgagactcagtctcaaaaaaagaagtttatttcagtttgacagatctgtttttgtttttgtttttttgcctaatgtatgttaaggatcataccagatcagttatttttagtgggatgtcaagaagagcaagcatagatcatctagaaacttttacttcagctctgggagtgagactgtccaataacacatgtacttactaagtgcccccctatgtgtgtggctaataataagggaattcaaggtggaaggcactcacatgtattaaataatggtagtcactacatcaggcaattttgatacatgtttttggacttctggtgaggaaaatgcattatgattaaaacctttcctggattcgggacagtctttttttttttttttttgagacagagtctggctcacccaggctagagtgcagtggcatgatcatggctcactgcagtctctgtctcctgggctcaagccatccacctcagcttccctagtagctgggactacaggtgtgcaccaccatgcctggcaatttttgtattttttcgttagagatggggttttgccatgttgcccaggctggtcttaaactcctgggctcaagtgatccacctgcctcagcctcccaaagtgttgagattacaggtgtgagccaccacctgaccaggaacagtcttaaagtgaatttacattttattcattatagtagtatggacaactagactaaacaattttcctttgccaagtttctcatatctgccttagttttctttgactgaagaacaaattaccataaatgtaggggcttaaaacaccaccgacttattggcttatatggcttatagttctttattttattttatttaagagagggtctcactgtgttgcccaggctggagtgcagtggctattcacaggcatgattatagcacactataacctcgaactcctgggctcaagtgatcctcctgtctcagcttcctgagtacctgggactatgggtgcatcccaccgcaccccgctgttagctgataatcctgcaggtcagaagtctagacaggcttgcctgggccctctgcttagtgtctcctgaggtcaaagtgaaggcattggccaaactgggctcctcccggaagcactggagaagaatctgcctccaggcccattcatgttgtcgtattgtcagcaaaatccagttcctgtggttgtgggcctgaggtctccatttccttgctagctgtctgctaggagttgctctctgttcctcaaggccattggtatttcttctcacatggcccctccacctttaaaccagtaatggcatggtgagtccttactcttcaattctctctgacttcctcttcagccaccagccagagaaaactgctattaaagggttcacctgtttgggtcagcccacctggataatctctgaattgtaaggtcagctgacttggggctttaattatacctgcaaaatcactttataacagttcctaaatttgtgtttaaatgaataatcagtggatggaaatccagggggaggagtatgaatgtctttagaattctgcctaccatttcttgtattagcatggaaatgactccaaatctgtagggactttaggcatacactactgcacctggcttgctggatggagtgtcttcaagcaaatatcagacatattgttgtacttgtatctcttattctatttatttatttattttgtagagatgaggtctcgctatgttgcctaggctggtgtcatgaactgacctcaagcaatcctcctgccacggcctctcaaagtgttgggattacaggcatgagccattgtgcctgaccaacagtaattctttaatgtcatttaattctcagtctatgttcagttatcttgagttatctcaaaagtgttttttacagttagttggcttaaatcaggatctaaagaaggtctacacattccattttttgctggtatctcttaagactcttttcaccgataatagttcccattccctcttttctccccataccatttatttgtggaataagtcaggtcatttgtcctggaatattttccacattctgcctttgattaattgtatcttcatgatgtttttgaacatatttccctatcctttgtatccctgtaaactgatagttagctcttgaggctaaattatattcagggttggttttcttggtgaaaatatttcacaggtggtgctgtggacttcctattaatagatacataatatctggttatttcacttttagtgatgatgaagttgtaaattaaggtgttgtcagactaatctatcgcttataaatagtatatagtagggatttgttttttcatccagtctgataatttctaccttttgattggggagtttattccatttatttttttattttgattctttttttatgtttaagatcaatcatttggcggggcgcggtggctcaagcctgtaatcccagcactttgggaggccgaggcgggcggatcacgaggtcaggagatcgagaccatcccggctaaaacggtgaaacaccgtctctactaaaaatacaaaaaattagccgggcgtagtggcgggcgcctgtagtcccagctacttgggaggctgaggcaggagaatggcgtgaacccgggaggcggagcttgcagtgagccgagatcccgccactgcactccagcctgggcgacagagcgagactccgtctcaaaaaaaaaaaaaaaaaaagatcaatcatttatgtttaattatattgttgggtttacatctgtcatcttgttatttgtttcctattggcttacctgtttttccctctcttttcctgtcttatttttatattttattttgttttattttatttttttgagacagggtctcactcttgtcacccaggctggagtgcagtggtgtgatctctgctcactgtgacctctgcctcccgggttcaagtgatcctcccatctcagcctcctaagtagctgggattacagacgcgcaccaccatgcctggctaattttttgtattttttggtagagatggggtttcaccatgttggccaggctggtcttgaactcctgacctcaagtgatttgccctcctcggcctcccaaaatgctgggattacacgcgtgagccactgcgcccagccccttgattatttttaaatattctgttttatatcttctattgactgttcagatctaatttttttttagtgtttgtctagttttgtttagagattttaatatgcatccttaatttctcacggtatatcttgaattattattttgccatgtcacaaatagtaaaagaaccctataactgtatttgcatttaaactctcatcatttctgctatcattgtcatactttttgtttgtttgtttttgtttttgagatgaaggcttactctgttgccaagctggagtgcagtggcgcgatcttggcccactgcaacctccgcctgctgggttcaagcgattcccctgcctcagcctcctataggtgcacgccaccacacccagctgattttttgtattttggtagagacgaggtttcactatgttggccaggatagtctccatctcctgaccttgtgatctgcccgtcttggcctcccaaagtgctgggattacaggtgtgagccaccgcgcccggcccattgtcgtactttttaaccttctttcaaggatcccagcctttgctgtctgttgttcagtgtctcaatttcatatatttcatacagttttatagttatttttggtaggaagggaagttcaatatatttaattctgtcaagggcagaattgatagtcccaattggtgtctttttttttttttctgagacaaggcctcgctctgttgcccaggttggagtgcagtggtgcgatcatggttcactgcagcctcaaacttctggactcaggtgatccttcacctctgcccctcgagtagctgggactacagtcacctgtcaccatgcctagctaaattttttttttttttaatatttgtagagacggtgttgccatgttgcccagggttgtctcaaactcctcgggtcaagccatcctcctgcctctgcctcccaaagtgctgggattatggacatgaaccactgtgcccagcctccaattgatgtctttttttgttgtttgtttgacatggagtcttactgtcatccgggctggagtgcagttttgtagtcttagctcactgcaacctccgcctcgtaggttcaagtgatcctccagcctcagcctcccaagtagctgggactacaggcattctccaccacgcctggctaatttttgtgttttttggtagtgacaggattttgccatgttggccaggctggtcctgaactcttgacctcaggtgatccacccgccttggcctcccaaagtgctgggattataggtgtgagccacccctctcagcaattgatatctttcaatccatttcaattgttatcctttttggtgctcaaaatgttccatttttgccaatgggccaaactgtgtgtgtgtatgtgtgtgtgtgtgtgtgtgtgtgtgtgtgtgtgtgtgaacatccattcatttacacattgggtacaactggttttcagtttaactgtagagttaaatagttactagactggccagaaagcctaaagtatttaccaactggtcctttacagaaaaagtttgctaatcgcagctatatgagatccagcttactcaaattttttcctgacaaccagctctccgtttctgcccaatgttttcttcctgtgtgtgactctattaaagatacagacgtttcctcatgattacactcttataaaccctaaaggtgaatgtacctcctgataaaattagttctgctcaaaagtaagagtatacccatcagagtcagttaactcaagcttttaattctggctccacctctctgcaaagggagttatgaagcctacctcactgaatcattgtaagaagaaagtgaaattacagtatgcccctcaaaggaaatggtagctattatcgttcttacattgaaaaggtttgcttctatttatactttgtttaggtgagttcagacaatgcctggcacagacactgtattcgcagtgccttttgtagtgatgcttcgtacttctgctctggtttttggtgatgtctttagaggccctggggagagagaaagagcaaattgactagaggttttgtattgtgaggtataggagataacattgaaatagtaatgttaacctctggcaggatttgaatgcaggatgaaaagtttctcctgaaggttttcaaacttttgtggaaccacaggattcggtgtagggggtcacggaggaatgaggtgctcccacttcatccagagcatgtcttttgatctgtgtcgtgatttggagttctataggagatttaggttgaacacatacccccaaagctattctctgccatcatcacaagtttgcgggatgttggttagggctgaagatgtagattgagaggcatccggccagctgccatgcagtgtgacttgggataattacatgattgggctggctgtggctttatgtttacaatacagacgctgaagtcagagtggttgccttcaaggtgttaacttcaaaacttcacacctgagtcacctgtgcagcttatttaacctttcaaaattgttgttctgtcatcggtaagatggagataataatactcagctcacagataatgtgtgcagggtagttagcacgttgatggcatgtggtaatacgtagtattacccttatgagtagtatgactatatataaatagtagtagcagttggtacacattgattgacatttttttttcagactgtcatcctcactgcttagcatacatctgacacacgggtgtctaacaaatatttgaactgtagactttagctcaatcaaaatgggagctctctaaatgtgcctgctaatcagaaaataaataggttaatcacatactccattctaattgcttatgaaatgtgctgtgttgattaggtggtgtgtgcattataagtaatggaagaaagggagttgtatgcatgtttcagagctgttgaatttcctcattagatgtgcaaactacataaatccattgagagatttatgtcattactgtcacttccgtgtagcggtgcatgtcctgctcagctgttgctgccttcagctcagtagagagaactccctgggctcccctagatacactgttgcctattctcacagatcgatatatttggagagattttggttattatctcgtaagaggttttagcagcaaaactgggagaaatggggtttaatgagaatagaaactatggagacagcagtgtggaatgagagttgattttaggtgttataaagtgtgagcatcggctgggtgcggtgtctcaggcctgtaatctcagcactttgggaggctgaggttggtggatcccttgaggtcaggagttcgagaccagcctggccaacacggcaaaaccctgtctttactaaaaatacagaagttagctgggcgtggtgggcatgcctgtaatcccagctactcgggaggccgaggcaggagaattgcttgaacccagaggcagaggttttgcagtgagctgagactgtgctgctacactctagcctgggtgacagagcgagaccctgtctcaaaaaaaaggccaggcgcggtggctcacacgtgtaatcccagtactttggggatgccgaggcaggcggatcacgaggtcaggcaatcaagaccatcctggctaatacagtgaaaccccgtctctactaaaaatacaaaaaaattagctgggcgtggtggcgggtgcctgtagtcccagctactttttttttttttgagactctgtctcaaaagaaagaaagagtgagcatttttcatttgagttatatttatataaaacataagcatgtcagaaaggtgattttacagatatcattatttagctttttacaagattaagaacatgctgggcacagtggcttatgcctgtaattccagcactttgggaggctggggtgggaggatcacttgaggtcaggagttggagactagcctgggcaacatagtgagacacccgccccccacccccgatttctgcaaaaagtaaaattagatgggcatggtggcatgcacctctagtcctagctatttaggtggctgaggcagaaaggcagggatattgcttgagcccaggagtttaaggctgcagttagctgtgatggcaccactgcagtccagcctgggcaacaaagcaagaccctgtctcaaagaaaccaaattactttaaaaaaatgcctcccttataaagcgttgtgagcattaaatgagataataagtgtaaagtgcttagtgtagtgcctggcacatgatgagtgcatatagtagtaagtatatttgtttgtgggtcaggcactagttcattcctggggatagcagagaatgaggcaatccttcacgcagtaatcatttatggagcatctgctgtgtgccagacattgtgctaagtgcagagaagacaagagagctcattatccattgagagtaccataatacagtgctaagtgccaagaggcagacaggctgtttgtggaaagtaccatgggagtccagcagagggagccggcactcaccctgtctgccaagaaagccacaatcttgcactggagtgctgccatctgtgctggctgctgcaggcttcatttggtcactcagcaaatatatagtgagtttctgctgtgcactaggtatagtgctaggcactggggatttactcttgagccataaagagggagagggcccctgcactcttaagaatatgttgtctaatagctgagacaggcattaatcatgtaatcaaatacatgcacgaatatttgcaacaatggtaagttttatgaaggggagatatgtgctgttataaataggggattttataggggtagaataggggactttgatttgccaggaaaggctttcctgaggaaatctccgaatttaaatctcattgtgggctgagtgtgttggctcacacctataatcctagcactttggaaggctgaggcaggaggattgcctgaagccaggagtctgaaaccagcctgggcaacaaaatgagaccctgtctctacaaaaagtaaaaaaaaattatctggtgtagtggtgtgtgcctgtagtcccaactactcaggaggctgaggatggaggatcgctggagcccaggagttggaggctgcagtgagctacgatcatgccactgcactccagcctgtgtgagagggcaagaccctgtctcaaaacaaaaacaaaacaaaccccaaacccaaaactcaaacctctctgcatcaccctaatctcactctactccttaagggcagggactttgtctattttatttgttgtgtatccccagttcctagaacagcacctggcatgtggtaggcactgaagtgaaggaagatgtgattgatctgaattctaaagggagaggaggagttaactgtgagacgaaggagagaagggacttcaggcagaggaaacagcctgtgcggaggatagagagcaggttacatttgagattgaaaggaggaggtgtgtggaacagagtgggagggagggagaggagtgaggcaggctggggccaagccatagtgccttggcccacataggaagagttctgatctgtttccaatgagcaatatattttaaatagctagtatcgtgattcaccttgcattttggaaagacttctctcttgctttttggaagacagactatagcagggggctacagggcaagattgaatgcaggaggggtacaaaagataatgcctggactttctgcttctgctgcatggatgggtagttgggccattccatgagatagcaacacaggaagacaatgaggtttgtctgggaaagatcacgaatttggtctttaccatggtgagcttgaaatacctttgagtcatgtaagtggctgttgagagaagtctgggctggaggtacgggtctgagaattatctgcatagaattttgggatgaagccatgggcatggatgggatggcctagggaggcagggggtggtgggatgagagccaggcctaggagctgagaaacagcaggagagctcaaaactgagggaggagctgccagagaagtaggagacccagcagggtgcggtggcatcccagaaggctacgggcgcgcatgtttcccagtgaggacgtgatcggtctgtccattgttgaggagtgagcactggaaaatgtcctctgcttcgacaatttggaggttgccactggcctgctgggggcagaagccaaattggaatgagtggaggtgaggacatgaagactggagcagtgtggctgtgtgggaagagagaaggtggcactggaggggagagaagggttgagggaaattgttgttgttgttgttgttgttgtttgaaagtttcgctcttgtcacccaggctggagtgctgtggctcgatctcggctcactgcaacctccgcctcccaggttcaagcgattcttctacctcagcctcccaagtagctgggactacaggtgcacacccccacgcctggctaatttttgtatttttagtagagatggagtttcaccatgttggtcaggctggtctcgaactcctgacctcaggtgatccacccgcctcagcctcccaaagtgctgggatcacaggcgtgagccatcacgcccagccaggaagttgtattttaaaataagtcttgagttttgttaatacattataggagaagttgaattgacgaggtaatgggcttccagatggagagacagggtgtacaaagcctggaggcttccaagtgcttgttgtgctttggggcagtgaggtgcttgtgcaactggagcagagatgggtggggaagtgcagtaggaagcacctggggaaaagcgggcctggttagaaagggtctggcgtggggccccagccagtgtgtgcctgggcagcacatcacagtaacaaagtctgaagagatgacaaagcacagtctgagaggcagccagagtagcggggagctgtttatggaggaaataggggaggggagggcagatgagagagatttgcggtcttttctataggcctccgtatttgattaggttcagggagttgtaggggaaaacctatgatggaagaaagcactggtgttctttgctcaagagggtgtttgattaattggggtattagcacagaaagttggaagcaagcagatcgggggtggacatttagggggcagttttcagccttcagtcgggaagatgagtctagaacgttggagggcagctggagtcagagtttccagtcccccgacagtagctggctgaagcctcagcactgggtgggctcactgagcaggctgagcatgttctgggaggtgtccctgcttctgctgctgtgtaaactccgccgtcaacatcttgggctttgaagccactgaacgccggactggtttaccttgatttgtctttgcaaagtgtaggaatgatgcttgtcttactccagaatagattgtttttagtgggctcttgagaagtggaggttttatagctcagacaccagagccaggctcttctggagccagggaattctagttcccctagttaaaagctgagtgactttggacaagttactttgcctttataatgcctcagttttcttacctgtaaacttaaggtgataagagtgcctgatccatgagatagattggggattaaatgagaaatgcacataaagcacttagaacagcgtttgacacattttaagtgctcagaaagaggtaatgatagaggtagaagtagaggtagtcattgttttggggtctccagtgttgtcgttccattgttaaagcaccagatggcgacaaagcacacattttcagctgccttgcattcccctgcttggactccttgagtagctttacttattctcttcagatccctaattgatgcaaagtgaagtattttgtttgtttcctttctctctctggcttctttaaaacttctggttgaaactcatttgttttgagactcttatttaaatttcattcataaaattaaaaaaatgctttggttggagtagcatgtacacacagtaaaacattggacaatacaaaatagctgttagtgaaaggcagcgtgctgcccttgccctccaccctgtcctactctccaggagcaccccgcgctttttttttttggtgggagaggagtctcactctgtcgtccaggctggagtgcagtggcacgatctcggctcactgcaacctctgcctcccgggttcaagggattctcctgcttcagcctcctgagtagctggaactacaggtgagcgccaccgtgcctagtctcccccccacctttttttttttgagacggagtctcgctctgtcgcccaggctggagtgcagtggcacgatcttggctcactgcaagctctgcctcccgggttcacatcagtctcccgcctcaagcctcccgagtagctgggactacaggtgcccaccaccacgcccagctaattttgtttttgtgtttttagtagagatggggtttcaccgtgttagccaggatggtctcgatctcctgaccttgtgatctgctcgccttgacctcccaaagtgctggtattacaggtgtgagccaccgcgcccagcctttttcttttttttgagacaggatgttgccctgccacccatgccagactgcagtggtgtaatcacagctcactgcagcctcaaacgattctccaacctcaccttcataaagtgttaggattacaggcgtgagccactgtgcccagccagcacccacttttaactgttattattaccacatctttttgaatagctgaattttatattacttcagccaaaatattggcagtctattgatttgatactgtttcttggagtcgaggagagtcgtagtagcgggggcttggcgattttgtgatgtgtttcctttgtgccagtcactgtgatgggcatttggcaaagtccctgatcttgggccactagtcactgggggaactagtaagtgcagtgtggtacgtgctttgggggagcacttgagagggtggatacctggcctctcctgggaggactgtcaggaagaggtgaacatctgagcagagttgaagataggacctggtttggcaggcaggaaggacaaggaaaaggtgctcccggcagggtgggtagcagggtcaaacacgtcaaatggcgagagcgtggtatagctgcaggaggctagagggtaagattttggagttggagttagggctatggtgatgcaggcagcatggagagggagggtcagtcttgagggcatttcatgctgtgtcagaagttggatcttgtctgagaaaaacagggaaccactgaagggttttaaaggtaaagcaacacggttacacttgtattttgtgaagatcagtcttgaagcagtgtgcagaatggattgcatggctttagaccgcttaggagatgactgactgggacaatgtaggtgagaaatggcaagggcctgctgtaaggcagtgacagaaaccagaggcgggactgggcctgagaaatgaaaaagaggtagacttgataggcttggagggtggggaaaagtcaaggatggttcccatgtttctggtttgggttgctggatgcatggtattacctgtgcatgagctgggaagtcctggtgaagaaatagaaggttttaagctcattttcttttttatttttatttttttgggggactgggtctcgctctgtctcccagactggagtgtagtggcatgaacatggctcactgcagcctcaacttcaagcagtcctcctacctcagcctcccaggtagctgggaccacaggcatgcgccacctgctctgctactttttgaattttttgtggagatggggtcttaccatgttacccaggctggtctcaactcctgagctcaagcagtcctgcctcagcctcccaaaggcctgggattacagatgtgagccactgcacccagcgttaagctcattttagatttgttgagcctgacttggccttggtgacatctaagtggagatgccagtaaagttggaatcagaagagactgccacttggtagctttgtcaccttcatcaggttacttgccaatttggagccccagtttctttttcaggtaaatggggatagtgataatctctaccaaaggatcatgttgttaaaaggaagagcttcctaaatacccagcacagtccatggccagacaggtgatccgggaagtggtttccttctttcctttctaaggttcggaaggactcaagcgccttcaggcttattgctctttgtacgaagtgagcaattttgggtaataccgtgtcctatggaaagtaactacttaactaaattcatgtagctcattccttaagccatctataatggctgagaatgttatctaaaaacgcctttgcttttcctggttcactacatgtgtcaccacttaacattgacttttccccactgtgtagaaagcatgtacctacatcagatctaaccttgatcccagcaatgtggattccctcttctacgctgcccaggccagccaggccctctcaggatgtgaggtgagtccgggttcctacgctgacaatgactttaactatttaaagtacatttttaaaggggaggagtcatgtcaaacatcctttttttaattatgagagtccattattgtgagtgggaattccattcctgtgattttttttttccttaagaaagtatagtttatgtttctcctaagtttttacttttcaagggttttaaataacctttttgtacagtttttgcttttcttctggtaggtcttgattttttcctttccatctgcctttaacacgtaaaaatgttcaaagtgtacccccacacgaggtttctggaagtcattttgttgaacataggagaaccatataagtagaaaggtaacttgtcagcatcttttcacatgggagtgttgtaccgaagttttgcaaacatttcatcctggtgtctggggattagagggggatgagcatgtgcgaggcggaggtgactttggcagctgctccgcattctgtctttgccatgcctgccacaaattgccaagacctgttctaaaactctgtgtctgccaattctttcttagatctctatttcaaatgagaccaaagatctgcttctggcagctgtcagtgaggactcatctgttacccagatctaccatgcagttgcagctctaagtggctttggccttcccttggcatcccaagaagcactcagtgcccttactgctcgtctcagcaaggaggagactgtgctggcgtgagttgtcatctcgagcatttctcaggcttcatttgtctcgggtcctatccgaagagggctcattcattggttcagcaaatactttctgggcaagtacttgcagtaaatacttccgtgtgccaggtgctctgcaaggcaccgcagacatgattgcatgaaggcaagtaaggtccgtgtcctcgtggagctcacatggacacagtcttctgcaagcctcgcagacagaaggcaagcgctgagccagagcatgagcacaccaccacctagagatccagttgccttgtgcggttggagggctagagcaagggcagataactgagaaggagccacgtgcatgtcttgttgaggcttggctagggcaggatgacatgttggcagtggaggctctgcaaagtgggggctctcaggatccctggaagttgtgaaagacagcatctggtgggtgaggtggttgctcagagggtggagtattctaggaatcagactctactactctgcaaaaggcttaggtgaaggagaagcacctttcctatttgttataaatggaaatattgtaacttcagggtgttttttgctaagctcttaagtgataatatatgtagttttaaatttttatttatttagagacaggatctcactctgtcacccaggctgaagtgcaatggtatgatcaaactcactgcagccttgaactctgggctcaagtgattttcctacctcagcctcccgagtagctggactacaggtgcaaactaccacgcctagctaatttttttttttttttgagacgtggtcttactctgttacccaggctagagtgcagtgacgcgatctcagttcactgcaacctccgcctcccgggttcaagcagttctcctgcctcagcgtcttcagtggctgggattacaggcgcgccaccacgcctggccaatttttgtatttttagtagagacagggtttcaccatgttggccaggtcttgaactcctgacctcaagcaatctacctgccttggcctcccaaagtgctgggattacaggcgtgagccacagcgcccggctgcccagctaatttttttagtttttagtggagatggggcctgtctgtgttgtccaggccggttgtaatttttttttttttaacacttaaactgctcctttaaaacaatattttttttgtcattttatttgtgttcaccgtttcactgcaaaccctgaaggagggtgtggagcaccgttctggaatcccgttcgttgtttagcaagaggttggtgataccaaatccccctttcaaaacagtgagattgtttcccaggtttttttgtttgttttttgtttttttgctgacaaccagattttctgtaaacttaaagctttgttaaggacagggttcacaggcaattgacattccctctctgtccctcctcacaccctccctatattcacatggtcaatcatcagtgactctagggctgacattttgtacacactttgtccagtgcttggcccttttgggcctttgatttcaggtgacatattttgatatctgcttttaatccctcatggggaatgcttctccagtcaccatcatctcatgccatgatgccactgttagtgcctgtgccttactttgatgctaccttctacaaaaaaaattcccatttccttccaagcagaagggaaaatccccttcctcaaaaccccagaaccccaggaagaagtacaagggaagtacgtccactttggagtcagacagacttaggtttgaacaccagctatttcattccttgtgtctgactttggccaaatttctaacttctctgagccttgcctttaaaatgaaacccataattcttacatcaaagcaactgacaggattaaatgagataataggtgtgaagaccctagcgcagtgcctggttcttggtgggcgtgtaggaaacggagttccttttctggaccatttgtttgttaggtccctaacaaacaggtcccccttcttagagagtttgttacttccttcgttgttgttatttgtatgttaggtcataagcttttttttttttttttttgagacagggtctcactgtgtcatctaggctgcagtgcaatgcgatcatatttaaagctcactacaacctcaaactcttgggcgtgagcgattctcccaccttagccttctgagtagctgggactataatcacatgccaccacacccagccataagctttacttgcagtgcttagagagcctggcacatggtctgtacccaacggagttaataaaggatgaaactatacttttgtgtttctgttgtcttgtagaaagctcataggtaggaagaacatacgctttggagcagaaagaactgtgttcaaatccattcttctactcaacctctgtgaccatgagtgggttgtttagcccgcctaaacctcagtgttctcatatgcaaacctggagaatgtctcgtagggtcattgtgaaatccaactggtaggttgccttatattactactaatttgcgctattaaaggcaagctgatataaattagaactcttctgaatgggccttctatatttaaatgggctttttctaggaagtgtatatttgtaaacttgtcttgaatggaaaaaaagaaaatacttgtagatttgaatgaaccacctgagaagatctcattgtagtctgtcataaatcaatttctctgaatcatctgctatatattagcaagataagatctgctttcttagtgttcgaatacagtactatgctccagagaaaaagaaattgctggctggggaataagtaattaaagccagtgacaaaactttctaaaactcagtggattaatttcattctaaaacttctgaggttgttaccagcacggcactctctcattccaaagagaaaaaaatgatatcttaattgagaagttctttctaggctatcttaactgccttttctgagcacagcgtttatcacgggcagatgtgtgatttttgtcttgtttggaaattcaggtttcattttctcaagtgtatgataacagcaagcatcccataggtgtcgttgaatactctggggcttgtctctctgtaaattgcgactctgctgttttccaacttgtcatcttaatggaatgagtttcccatggagagaatctaaattgttatgttcttgacataagcagacagattcttgctctacattccctgacatattgacttgataagtggtggttttacacaagggcccagtcatctcttaggaattaggaaaccattcggggtggaagcagcaatctgtttaaccaccagggggcctctcctctcccagtttcacccagaaaagcaccatttatattttccaaattatctgtattaagataatagaatctaataagtcttacatgtatacatctatcatgttccatcttaaaaagcttatcttccagaattatagataaaaatatatgaataagccataaaaaagaatgaagtgcagatacgtgctacaacatggatgagccttgaaaacattctgttgagtgaaagaagccagacataaaaggacacagattgtatgattccatttctatgaaatagcagaataggcaaatccgtagagatagaacatagattgctggttgctgagggctaaggggagacacaatggggagaaactgctcggtgggttttatctattttttttggagacagggtctcactctgtcacttaggctgagtgcggtggtgcaatcacagctcactgaagcctcaacctccctagctcaagtgatcctcctacctcagcctcctgagtacctgggactataggcatgtgccaccatgcccagctaatatttaaattttttgtaaagatgaggtctcactgtattgcccaggctggtttcgaacccccaggcttaagtgatcctcctgcctcggcctcccaaagtattgggattacaggtgtgagccaccgtgctcaaccaatgggttttattttagactgatggaaatatttgggaactagacaggtggtagttgcacaacattgtgaatgtagtaagcacccctgaattgtttgctttttaaaatggttaattttatgtgaattttgcttcaatctttttttttttttttttttttttctgagacagggtctcactctattgctcaggctggagtgcagtggctcactgcaacctctgcctcctgggcctcagcctcccaagtagttgggactacaagcacacgctaccatacctggctcatttttagtatttttagtagaggtggggtttcaccatcttacccaggctggtcttgaactcctgggctcaaggaatttgcctgcttcagactcccaaaatgctgggattacgggcgtgagccactgcgcccagcccaatgcccacggttcttcttgccagttctgttgcctgggttgccttctcagctgtgatgatcttttccaggttttgtcacatctgtcctaactggattataagtaaactccttaaaggctgagaccaacttgtacttctaaagaacaagagtaggatatttgtgaaagtgtccaagtacgggaaggggtgagtggatgaaacaagacttgccattcattggggttctactctttaccttccagaacagtccaggctctgcagacagcatcccacctgtcccagcaggctgacctgaggagcatcgtggaggagattgaggtgtgaatcttttgccaaatgcatctcccagctcctgtctttgacactctgcagaagaatcttgcagatagccatgcatgatctgttactacaggttacattgcttcttatatccatggcacacttgtgttctttgtattaaggtattgtgtcctgaggaatatttgtgcctattacataataggtcctcaggacgtggtgactgtggtttttattattgctctatccttgcctttgcccagaatatcatgctcctctgggacctctgtcatggactgcctggcaggagtgacaagcagtcctgatggtgttctcactggatgcttcacaggcacgttggttgcctagtcatgttgcctaggagagcagtatgtctctctttgtcttttggagcattaagaaattctgggaaacgctgtgctttgtaggttgtattcaaatggatggccatggactccatctgtgtcatgatgcttcctgggtgcacagcagcctggcccactggctttccacccaaagcagctggcgtgttctgtgccatgactcctgggcttgggcctgcatacaaggggccaaggaaggagccctcccaaaactgcagaagatagtgctctcctcaaatgtctgtttgatatactttactctgcctaagcaccatttttgagaaagtatgaagtgactgagatggtcttcagatttagagtgagagatgtcacgaagctgtctgcagtggggttgacagtggttcgtgcatctcatttctgctgttacttgacatccagcatatttctgttttgttatggcaggaccttgttgctcgcctggatgaactcgggggcgtgtatctccagtttgaagaaggactggaaacaacagcgttatttgtggctgccacctacaagctcatggatcatgtggggactgagccatccattaaggaggtacctatctaacaattttcaggcatgaaacccaaaggggtcatcagctgtatctgctaaggatggcttttatcagagaggaatgttcagacagtaccttgggatgctgtcactcagtgtcctgggttagggattaagaatgagaaatagaaagatgtaatgcctgtcttcaggaaatgggttgctagtgaggtagacgtgtaaacaaaccatgcttgctttaaatggggtatgtacatgtcacgaggtagtatcaaggaagccacgtgtattactcctgtttcatctccctttcttcccagtacccttttctgcttgtcgcctgaatgctttccactctggtggctcattcagatccttctctgggctcacaattgcttctcctcccttcccccttatgctcagcaacggctaaatcttagctaatctttgctgatggacatagttcactgagaggcatgtgtgtctatcacacatccgccaagagttcattctttttctcaagaggaggttgttaacctgaaagaatctttagttggaatgcatgtgggaagcctttttgagtaggaccgtctttgtaccccttgtttgtgagaagttaccagcccttaatctaaagtacttaaaatacaagctgcttttatttaaattttaggaggagagatttgggttttaagtgagaattttcatttctttatgcattatgagttttgtgccaagtttctttaagtaaatagttatctgtcttggataattggaattaatttcatattttctccatgtggtcaaataagttattcatgtgtttgcattctttttgtgtctcttcctttgtcctaagtgtaggaggtctagaaatatactcccttttaatttctgttatgggtgaaattgcaagagtgtggggtcttagggtacagattgtttgctgattgtcctatacacagtaaagtagatgaattaatgatattgtacttatacaacttaaacattttcttcctttatttccaagctgctgctaaccaggtacttggctggagtaatttcgctgtcactgcttttgacaaaacaattctggtgaacagtcacccattttaacgtgtcaacagagtagtgatggaaaattgtaattggtccaattaaagaaaattctttcatgttgactgtgaataacactgtcaggaacaagagagcccttttgttggatggtagattttaaaaaacaaaactgattgaaggggaaaatgtttcctcctaagcaaataacctccagaattttaataatgccttttaggttccacttttttaaaaaattgcttttagttttctcctctaagcagcccattagttcttaatggagagttattttagtttctttttaatgtacattttagctataaagtttggtcttataaataaaaactttgcctcaatgtactacttacaagtaggttgggaggaaaggtagcttagctgggaggataatgagaatcaggaaagaacagattttcttgtagaaggactttggagacaaacagtcctacatttgaatgttggtcttgctaatgttgtggtaacttgcagaagttatttagcctcctttagcctcagtttcattttttgggaaacattgataatagcaatcttttatagtttttgtcaaaatttgagttaatgcatgtaaagcacctatcatgatgcctggcatatatagacattaacaaataattactattatatatatttcataatatagtttcatatctcagtagttatctggaagtaccctgcatttgtgtagtaagcattattatgatttttttttcagacagagtctttctctgtcgcccaggttggagtgcagtggcgcgatcttggctcactgcaacctccacctcctgggttcaagcaattctcgtgcctcagcctcttgagtagatgggattacaggcgcatgccaccatgcctgactaatttttgtatttttagtagagttggggtttttctctatgttagtcaggctggtctcgaactcctgacctcaagggatctacctgccttggtctccaaaagtgctgggattacaggcgtgagccactgcacctggcctgtataataagcacttattaaataactgacaaatcatgaatttcagtttataaaggaagatggaaaaaaaaacaaccacatccaagttctaagtttaaatgcagaatatttgcgttttctccatctacgaatttggatcattgaccaaaagacctcccatgtgaacacccgaaacagataagggtgactttcctctacagcagtggccctcccaccttcccagcagaggaagagaaacagctgcatttcgcatttctttcaggatcaggtcatccagctgatgaacgcgatcttcagcaagaagaactttgagtccctctccgaagccttcagcgtggcctctgcagctgctgtgctctcgcataatcgctaccacgtgccagttgtggttgtgcctgagggctctgcttccgacactcatgaacaggctatcttgcgggtaagacatccatgcccaaagtgtgcccctctgattatcattcctagtggaaggctttcagaaatctggactatggtcacagccaattacagcccctacaaggacatacccattaaatggagggcaaggctcatttccctgagccttgaaatggagacatgaccactcggtgaactagccacagaacccttcaaatctattaaaaaaatttttttcccctcgtggatttttaatttttgtttctttttttgagacagagtcttgctctgtcacccaggctggaaagcagtggcatgattttggttcactgctgcatccacctcctgggttcaagtgattcttgtgcctcagtctcccaagtagctgggatcacaggcgcacaccaccatgcctagctaatttttgcatttttagtagagatggggttttgccatgttggccaggctggtgttgaactcctagcctcccaaagtgctgagattacaggtatgagccactgtgcctggcctctccctagaggattttaaatagtacaggcttggctgggtactgtggctcacgcctgtaatcccagcactttgggagactgaagcaggcggatcatgaggtgaagagattgagaccatcctggccaacatggtgaaaccccatctctactaagaatacaaaaattagcagggcctggtggtgcgcacctgtagtcccagctactcaggaggctgaggcaggagaatcgcttgaacctgggaggcagaggttgcagtgagccgagactgcaccactgcactccaacctggtgacagagtgagaccctgtctaaaaaaaaaaaaaaaaaaatacaggctttcagtaagtgcaggaatattgcatttctaggtctataactccagatgtatagagaagtcttgcatctaaaatgcacttcccaataccaaactttctttttcatatttttttggttttgttttggttttttttgagacgcggtctcgctatgtcgcgcaggctggagtgccgtggtgcgatcatggcccactgcagcgtaggcttcctccagtacccaaattttctaaatatgttattttacgacagctgttttaattctcaattaattctggtgtttatggttgatcagttctctttttccctggtccttgatgggatatctttttgcctctttatagcacagtcctccctttcactcagcagtaagcatagacttctcctttgtgttaactcgttgaacagagcacatgcacagatcttgaatatgcttagaacttttatctcaaatgaggcgttttgttgctgttgtttggaaccagtgataagctaagatcttcatgagaaattagcattttattaatgtctaagtgttgggtttccacttaggacagttctgtctgtcccattagttctactttggtggcccctgcagatatcctcctgagcgagtaccctgttcttcaaaattgcccattttctccctacatacaactcatataccctcaacaaagacttgggtagaaagtaacctgagtaacatggtttcctgtgagtcaagaggggctaagagaacaaagtggaaaaagaattgactctgaagttaaatagatggtttgagtcctggctcaactgcttaactggccatgtgacctttagcagtcccttaacctcttgtggcttgtttcttcacctgtgcaataaggattattctatctgtgtcgtacaattgataggagaatgtatgtaaagggcctagcctggtatatgcatatagttgactttcaacaaatgatagttattaatattatccatatttctttaattttcccattgctgataccattctaaagtatttttctggctgatttatttattaattttttagtagagacggggtctcactgtattgcccaggctggtcccaaactcctggccttaagtgatcctcccatctcggcctcccaaagtactgcaattacaggcatgagccactgcacccagtctagctgagacatttttttttttctttttcagagacagggtttccctctgttttccaggctggagtatagtggcgcaatcatagctcatgctaactcttgggctcaagcagtcctcctgcctcaacttcctgagtatctgggactacaagcacatgccaccatgcccagctaattttttaatttaaaaaactttttttttttttggtagaaacgaggtcttgccatgttgcccacgctgttcttgaactctttggcatcaagtgatcctcctgactcagcctcccaaagcactgcaattataggcatgagccatcatgcccagtctgataaattcttttaaagattctgtagtagagtggatagaatagggaatcagaaagaaggcaatatattggccaggtgtggtgactcatgcctgtaataattcactttaggattaggcagcaggcccaaggtcagccaagatttcccgaagcaggggatttgctctcctgcagagcttgcaacctatagataaagcaccccagaaacaaaattctctgctcctgtagcctttgttgtaacaaataattttttatttatttccagttgcaagtcaccaatgttctgtctcagcctctgactcaggccactgttaaactagaacatgctaaatctgttgcttccagagccactgtcctccagaagacatccttcacccctgtagggtaagtcctgatcatattttggtggggcgctgacctctttgttttggaaagttagcctgcagccagtgtaacagattaatacattccagttaggtaaatttgatctactggtatcgaaagcctacagtcgaatgtaagaaaatgatttttaaaatgaagattatttggttttactgtttcattctctgtttctagttggctctgtcttgtcattgtgacataagtagctattttgaaatttaatatttattgatttttttctgataaataataatgtttattataggaaaaatacagcaaagcacaaaaaaagaaaatataacttacccataatgctaccattcagagataacttttgctaactttttttttttttttttttgaggcggagttttgctcttgttgcccaggctggagtgcaatggtgcaatctcagctcaccgcaacgtctgcctcctggattctagcgattctcctgcctcaatctcccaagtagctgggattacaggtgcccgccaccacgtccggctaattttttgtatttttagtagagacagggtttccccatgttggccaggctggtttcgaactcctgacctcaggtggtccacctgcctcggcctccctaagtgctgaggttacaggcatgagccactgtgcctggccttgctaacattttataatttttttttgacagtcttttttctatgtatgtaaataaattttaaaaattcagttaagggccaggcatggggctcatacctgtaaccccagcactttaggagactgaggcagatggattgcttgagcctaggagtttgagaccagcctgggcaacatagcaggaccccatctgtaatttttatttatttatctatttattttttgagatggagtcttcctctgtcacccaggctggagtgcagtggtgtgatctcggctcactgcaacctccacctcccggcttcaagcaattctcctgccttagcttcccgagtagctgggattacaggtgtgtgacactacgcctggctaatttttgtatttttggtagaggcagggtttcaccatgttgaccaggctggtcttgaactcctgacctcaagtgatccacccacctcggcctcccaaagtgctgggattacaggcgtgagccattgtgcccggcctttttttaaattagagatgggggccaggtgtggcagctcacgcctgtaatcccagcactttgggggggccaaggtgggcggatcacttgaggtcaggagctcgagaacagcctggccaacatggcgaaaccccatctctactaaaaatacaaaaaaattagccagacgtggtggtgcacgcctgtattcccagctactccggaggctgaggcaagagaatcacttgaacccaggcagcggaggttggcagtgagctgagaacgcgccattgcactccagcctgggcgacagagcgaggctccatctctattaaaaaaaaaaaaaaaaatcagggtatgctttatatgtaacaatgtgccacaaacttttttttataggattaaatattcttttacaatttttttttttcttttttgagatggagttttactcttgttgcccaggctggagtgcagtgtagtgg

SEQ ID NO: 289 - DNA, 26748 bp, Homo sapiens
  source 1..26748: mol_type = other DNA
aagcagccaatgggagagccgaggcggggaggtgcggccaatggcgcgggcctgtttgattcaaaggttgcctataaagcgggactgcacgccggtttttgtccgagggctgtcgagtccgagcgccgccatggctctgctgtccgagggcctggacgaggtgcccgccgcctgcctgtcgccgtgcgggccgcccaacccgaccgagctgttcagcgagtcacggcgcctggctctggaggagctggtggcgggcggccccgaagccttcgcggccttcctgcgacgcgagcgcctggctcgtttcctgaaccccgatgaggtgcacgccattctgcgcgcggcggagaggccgggagaggagggcgcggcggcggcggcggcggccgaggactcgttcggctcctcgcacgactgctcttcgggcacctacttccccgagcagtcggacctggagccaccgctgttggagcttggctggcccgccttctaccagggcgcctaccgcggcgccacgcgtgtcgagacgcacttccagccccgcggcgctggcgaaggtggcccctacggctgcaaggacgctctgcgccagcagctccgctcggcgcgagaggtgagcggccctccagggccctgggtcgcacgggagacccccttcaagaatgggaaattgaggcctgctgggagtacgggccggggccactacctcctctgcgccctaccggaagcgcgcgcgggctaggtggtcccagggtctccgactcacaccccactctgcgtgtctcccccggatcccccgggccgctcctcgtggcaggggatagtgggaaagcctcggttcccaaggatgcgaattgtgcccgggttccatctcctaacgttcatatccctgaaggagggaccagaagtactctgagttccaaatttcagttaaaatcaaacttggaaaattgcctatttccctgtctgtcagccaacgctagatcccactttcaggagcttcttaggagactcattaccaaagaacttacgcagggaaagttccagaaagatggtctccagagacaactacggggcattaggaagcaattattattgctaattactttcatgcatcttttgctgtaaaaagcagataaacacgagagtggcaaagtgagagccctgccgctttttctttcttgtcttttttttttttttttttttttgagacagattctcttttgcccaggctggagtgaagtggtgggatctcagttcactgcaacctccgtcccccgggttcaagtgactctcctgcctcagcctcccaagtagctgggattaccggtgcccgccaccacgcccggctaatttttgtatttttagtagagacggggtttctccatgttggccaagctggtctcgaactcctgacctcaggtgatccacccgcctcggcctcccaaagtgctaggattacaggcgtgagccaccgcacccggccccctgccgctttttctactgccagagactggaggggaaactggggcaaggggtttgttttccataggctgggtctgtgccagattgcagtggtctcctaaaatgcagatacatttgcattagatcggcttctgtattcatagtgggttttggtcctactgtctgactcttagtatggcatggtcatgggtgcaatggaggtcttgtctgcttgccagcctcgataaagctgcagcagggtgctggggatcaaggaggaagaaggcagcctgcaggtgggtgtggcacatagagtgtcgtggcagacaccttggtctggagccatggtcaggttgcttgctgactggcagtgcccagctccctggctatctgcctgtgccagggacatggcagataaagccccagccatgttaagacttgttagggctggtacctgagtgtgtctgagtgtgggtgaagataccagtgcattgtcaggttgacatgtccaagccccgactctcaccaatgttcttaatgttctttccctgactggtggggtttcagtggtagtggatacagtgacctagtgccttgcctttgagggagtggttgtgggctgcagctaggctcttaccagccctgaggtgctttgggtggactgagggttttttgatgcagcagacattttccttgcgggttcagtgaaaagattaaaaagatggaaaaggcagacttgtgtaggtatgcatccccaaagctcatgtccagtagaacttgagcacttggaacctgaaaaatgtaaagaactggtctgtatagtgagagctgtggattgttctagtcttttgcccagccccaaattttagtgatagcaaaagggcactggaactagaggccagagggaaactattaaactcacgtgctggcgtgaggaggggatggagccaggagctcagactctccctcatctcacgggcattttgtaatactgacatttccagatagaacctgctgccctagtctagctacccacagttccctccgagatgctgtatttggaacctgggcagttttaactgagaaaggtggtacattacctttaaatccaatgagtattggctgggcacagtggctcaagcctgtaatcccagcactttgggaggctgaggcaggcagatcacgaggtcaggagttcgagaccagcctggccaacatcgtgaaaccccgtctctactaaaaatacaaaaattagctggacgtggtggtgcgtgcctgtaatcccagctacttgggaggctgaggcaggagaattgcttgaacctgggaggtggaggttgtagtgagctgagatcacaccactggactccagctctgggcgacagagcaagactccctctcggaaaaaaaaaaaaaaaaaaatccaatgagtattttcagtgtgtccgatagatgccaaattatttgcttactcattgcctgctgtgtatcagacactaccatggctggggccacaggggaaggcatcatccttgccaacacttgagagtggacagtgtgctgatgggaaacagtgaggagtttgctgcaggtactgcggaaagggctaaagaaagaaagtctccggagtggcagtgacctcagagctgggtggggcttgccagacctagggtatgggggctggcccacaagtgtttaaggacctggaatgtttgggggcagccaaattccccacagcgggttagtggtaggagaggaagctggggtaagggatgctgaaatgagttgggtttgagacagtgctgaatttgaggtcccaaagacaatctcttttgtttaaaaaaaaaaaaaaaagccaggccatggtatcatgtgcctgtagtcccagctactcaggaggctgaggcaggaggatcatttgagcccaggagtttgaggctgtagtacactatgactacgctgtgaatggctactgcactccagcctgggcaacacggggagaccctgtctctttaaaaaaaaaaaaaaaaaaagtaatgctttctgtttgccaggcactgttctaggtgatcccaaggaaggtgcgattatcatcttcattttacagctgatagaactgaggcatagagaagttaagtggccccgaagtcatgcagctagagaatgaaggagcctgtactcaaattgaggcacagaatgtctgaaccactgttaaccaccacactccctgtggagggttcaggagcctgtgctcaggtggggagaggtgacagcagatctggtggctagctaagagctactactatttatgggcatgcattgtggacaagggagtggctgtgtcaccttgaccacatcctttgaaatctagtacctgtgacagcgaggaccatgaaggtgtaggtctcaggctgctttcaggatgaaatgagaagctgttctgcatccgtgttctgatagcaaaggtacctaatggtgatatgattgagcactttgaatgggtcagtttctgtgctaaacccttgacctgaattacctcatttaaccctcccaacactgggaggaggctacaattaagaaaagaccaggcacagagaagttaagtaacttgcctgagatcacacagttagcatgggacagagctgggctcaagcccaagtctgtctagttccagctctgaagctcaagtgttttttttttgttgtttgttattattttttttaagacagagtcttgctctgtcacccacgctggagtgcagtggcatgatcttagctcactgcaacctccacctcctggattcaagtgactctcctgactcagcctcccgagtagctgggattacaggagcacaccaccatgcccagctaattttttctttttttttttggagacagagttgctcttttggcccaggctggagtgcagtggcacagtctcagctctcagtaacctctgcctcccaggttcaagcgattctcctacctcagcctcccaagtagctgggattacaggcaccctccactaatttttgtatttttagtagagatggggtttcgccatgttggccaggctggtcttgatctcctgacctcgcgatctgcctgcctcagcctcccaaaatgctgggattacaggcgtgagccactgcgcccggccaatttttgtgtttttagtagagatgggtttcgccatgttgcccaggctggtgttgaactcctgggctcaagtgattcacctgccttggcctcccaaagtgctgggattacaggcgtgagccgctgtgcccggccactgaagcccacactcctaatccctgctgcatacagcctccctgccatgaggaaggattggagctttggtagttttcaacaggctgaaggtttgtaacagttgaagattgggactttttaatttccatgttgcgtattctataaacaggaaaatgacaatgactagacctgtccttttcaggaagaaaacgaggtggtcagtttttagagtaggaggcattaaggctggcagagaacctcctcaacccatcaagtggggaaggtggttcatgatgccaggagaacataggtctctgagtttaggttttgtaaactagagtgtgttttcctctccctgggaaagatagagccagatagatgtttctggtacctggagcagagggatctgtgagaatcttttggtgggtgaatgaaggaactttgaatgccacatgaagggtcccacttaaccccagaggttggggccaggctgcagtagagcacggtcgaacctcagtgttcgctccatgcagctttatctgccttcactgaggtggtctgaggaccaccctgcatcttcaggaatgtctctggaaggagccaggatacgaggctccttgaccagagtataggcacaggaagccagggttacttggtaaatggtagggcctaatcctggctttgcagcctgaagcgctggttctgggataggttttatccagcagctctctgaccacacagaatcactcagtgtgtctgatacataaaagatgctcagtaaatactgtaggggcctattatgtgcacctttgctcattcagctacatgctttgaggagaaataaagggcagggggaagggagcggtagataggaagaaaagtagttcaggtgattctgtctgcctttccactcagcaagtatttgtccctgggtggctgtgcctggggtttgtgaatctgccagccccttccttgactcttgtttctatatacctttcaaagtgtgggcattctgccacactgaatgaggtacagtgtttaaaaacaaatggtttggccatgcgcggtggctcatgcctgtaatcccagtgttttgggaggtcaaggctggaggattccttgaggccaggagtttgagaccagcctgggcaacatagcgagatcccatctctacaaaaagttaaaaaattagccgggtgtggtggcatgtgcctgtagttccagctactcagcaggctgaggcaggaggattacttgagcccaggagttggaggctgtagtaagctatgatcatgccagtgcactccagcttgggtgacagggcaagaccctgtttctaaaaaataaataaaaacacaattacgtatagcatggcttgaatacaagctggctgcttaccaggtgctcaggcgagcttcaccaaaattggaggaaatactgttttgaaccttttgagaacccatatgtttgtttcctaagcaagtttttggataatcttgaattatacaggatattttccctacatacttgctgtagatccacccctccaccactgtatctgttgatgacgcattcagctttttgcctctgttgctgtgtgaactgggatttggctgggctgtggccgcctgcctggaagggctacatagcctcattttggcaatgtgcttatgaattggctgtccggctattcctggtttgttgaatgagagttcagaggcaaagctggtaccaccacgaggttccaattcctcagagtcacgtttcttaccagtgcctattctcttttgttccaaagaggccacttttgctatgacctcaccctcgggcatcctcttgataacctgagcgttagtagtggggatcattgcgttcccagagagccctgccaggaggagtagcagcttaggaatctgttgggggcccctggcatttacttggatgtatctgaatgaaggctttcctgttcttgcacaactttcctctgcattacagtagagcctgtgtggtgtgatcagtttctgttccaaatgctcatgtcagccccaagcagggcttctcaccctcagcactgttgaccttttgggttggataattctttgtcctgaggggctgtcttgtacattgtaggacgttgagtagcatccatggcccccattcactcgatgccaatagcatccctcacaccaggtagtcatgatattcagtgtctccagagtgggaaatagtgagttactgatgaatgggcacagagtttctgtttggggctatgaaaaagttttagaaacagatggtagtgatggttgtgaatgtaattattgccactgaattgtacacttaaaaattattaagatggcaaacttatctattttaccacaataaaaaaatgtctccagacattgctaaatgccctgtgggggcaaaatcgccctccagttgtgaaccactggcctagaagttctcactagtgcatcattatgggacattacccactggactgaagtgttgctactatttatcccttccttttgatttcatgtgtcaggttaaggattttagaatttagccatttctctttaaaaatattgtggtaaaaaatacgtagcaaaatttaccattttaaccatttgtaagtgtacagttcagtggcattaaatacattcacactgttgtgcagctgtcactagccgaatctccagagctgtttcagcttcccaaagtgaacctctgtacccattaaacactagctcttcataccctcctttcctggccccggcaaccaccattctactttctgtctgccatttctttctttctttttttttttttgagagtctcgctctgtcgccaggctggagtgcagtggcaccatctcagctcactgcaacttctgcctcccgggttcaagcgattcccctgcctcagcctcccaagtagctgggactacaggtgcccgctaccacgcccggctaatttttttgtattttagtagaaacagggtttcaccatgtcggccagcatggtctcaagctcctgacgtcgtgatctgccctcctcggcctcccaaagtgctgagattacaggcgtgagctaccatgcctggcctctgtctgccatttctttattcttttcccttagcgtctagcagacagtaatgaagctgcagaattcttctctgacttctttatggatagaaggtatgttacttcaggaaaaaagcaagcaaaacccaaaaatgtagtggatatattggcttaaaaaaatcttgaacccggtctctactaaaaatacaaaattagctggttgtggtggtacatgcctgtaatcctggctacttgggaggccgaggcaggagaatagcttgaacctgggaggtggaggttgtgatgagccaagatcgtgccattgcactccggcctgggcaacaagagtgaaactccgtctcaaaaaaaaaaaaaaaaaaaaattcttgatgcaaatgatataacctctggaagggaatttggcaatatctagcaaaatttcagttatatttacccattgatctaccacttccacttctctgtatcttgatatattggcaaaaatatgaatagttgtagacaataggccatgcgttgcaacactaattataatagcaaaacacaggaaagagttcaggtgttcgtcagtagaggatgagttcatcattgtgaatgaaccgattcgtctctgcagtggaacatcctgtagctctaagaaggaatgaggactagctctgatatgcggtatctagaatggtactgaccagtgtagtagccatatgaggctattaaaatttatatggattaaaattaaataaagattcagttctgtcatcttggaaggttctattgggccacgctagtctagaacaatgtgtagtattccatgctaccttttacctatagggggatataagcacatatacatagttatatacataatacacatgtttatataaaacaaatatgtttatatacacctgtgtatacttgtttatattgaaaaaatggaagaatatacaaaaaactattggaaatattatctcaatggggaggagggacaaggatggaaactaagtatctttgaaagtaccttgttttgtaaattggattttggaactaggcaaatgttttacatacttataaaataaaaacaattcaaaatgataagccctcctccccctaccccctaacttcttggtgcttttccctcccctttgaaaagcccacctgcttgtgtacttcatgctggaatagtacagagtactgaatagtggtcagtccctccagagatcagtgaaaactttgctcctgccaccctctggtggccctgccagcactttcatctaatacttaaattgttttatttggttgcttgtttgtttgtttgagacaagttctcattctgttgcccaggctagagtgcagtggtgcaatcatgactcactgcagcctcgacctcccaggctcaagtaatcctcctgcctcagactcccgagtaactgggacttaaaggcacatgccaccacgcccagataattaaaaaaattttttctggagacaggatgtcaactgtgttgcccagagtggtctcaaactcctggcctcaagtgatcctcccaccttagcctcctaaagtattgggattacagatgtgagccaccgtgccgggcctaaattgttaatttgataatagcctctgaaacagagggagaacagtgcacacaagcaagtttaggtttcgctgtgggaatttacattcttttttgtttttaaaccccaaagatgtcaagatagttacttaaaggtttttgacaaaatcccaaggagattatttctgttctattaaaacatgtaatacatggagagaaaatatatcttttgcttttttagcaagagggtcctgagagagttaggagaggaagtgaagggtcaatggaggccatgtggtcagctgggagaatgcagcagccaggatgttattgaccacagcacaggctgacattgagtgggtgcagatctttggtggaattccaagcatgttgcacacctgacctcactttatgactctgggagggaagggagggaaactgaggtgcagtgagaaggggtgatcggtacgaacttcctccttcacacagaggaagaagagctagaatgagaactggaatgactggccctgaggggcctgttggggctgcacatgtgcctggtcagagcctagacctgcccattgagtgtgtatgaatcactgacttcgcagagctggaagggttccttgtttcaaggacaccgagactcagatggaatggcttgtccagggatagtgacggaatcgggactaagaatatgagtagctgccatttaagggctttccatatgccaggaactgccagcaaacactatgagataggtactgtcaatcatccgtggtgagcttgagcccatgcacttcatgggctacgccactgatcctttagtgtttgttctaagcttccagtcatgtgaaaaactgcccattaaacttggttggaatgatataaaatactgagtatagtactttttttagatggctccggagtcacagagacctgggttgaaattccagcccttgtacttgtttaagtttgtcaccttgaacaagctacctaacctctccaagctttggctttctcatctataaattggggatgacaggtaatggggttttgaaatttctagatagcacttttgagcttttgtgcaagaaggcaagcagaaaagagttcagttctatgtggcaagtaacataaacagggtctgtgaccttcccagagaccaagaaggccatcatgacgtctgctgttcaactacataggttcccaagtcccttggtacaaatcaggaggggacaggtagaaggactgagagaggtaggcttgtgatttgttacctgagatgatgatgtgagagtggacacacatgcagctgctccagatatggctggagaagtgcaggaacagtggggtcctggtcagcaggccggccattatgcccctgaccagctggatgcgtcctcctcacgtctcctgttgtaactgacttgcactgagttgcaaattgcaaatgggtgttgaccctggaagggactcttgaaagtcaccactctcacgactttctagtccttagagagtgggtgggctccatgcagcacagactgggagagtgccatgactgtgggcacttgatgtgcaagggctgcctgccttccagacatgccattgtccttcgcacattattgcctccaggagtgggagcagtggccaaatacacatcaggtgtatttctggacccacaggctgcagcaagagcaccggatacctaggagttgcatcctggcttggaaagcaggactcggccggttagtggatgagtccaggtcattgctcagctcagtgaagagagtgtcccttcagtctagccccaggtctacttcagctatgcagggattggttgcatgagggctgggacacaggaatgggggatggggatggggatttgaaggaagacttccctactgattgcttctacagtaggactatggacttttcctctgtaaaagacaagtacttttggctgggcatggtggctcatgcctgtaatctctgcactttgggaggccaaggtgggtggatcacttaagctcagaagttggagaccatcctgggcaacatggtgggattctgtgtctacaaaaattagccaggtgtggtggcgtgtgcctgtagtcccagctacttggaaggctgaggtgggaggattgcttgtgcttcagaggcggaggttgcagtgagccgagatcacaccactgcactccagcctgggcgacagggtgaaactgcatctccagaaacaaaaaaatagacgaatatttttaagagtcctgctttagtaagaaaggagtggatgctgggtgtaggggaagtcaggggaagaaaaaaacctccatcaaccctacgcaccctgatggtgttaaggactagtgttcaaatccaacgcacaggaaagggtgaggctttaaaaccaaacaatggaacaaatagcaaattaggtatttactcaccatataacaaaggtgttgcacaattgttttgttaagtggtgaatcaaaattcagcttggccgtgccttgtgctgtgggcccccaggcccatgcccctgcctccagcaggtctctaatccagcagctgggctgggtttttctgatctctgttccagtagcactgagggaacgtgtcctttggcccgtcacactctgttacccctggcttgtctcctgtctcattagactgcgttcttgaggacagggattgacactagatcctcagtgctcaacacctgcctgcctcgattgggtccacaatgaagatttgaaagaagagtgggaaatcagagaggcaagcaggtgtgtgcattttcctctttagctttctcctgtgagctctactctcatttgtacacctgcatattccaaacctctttttgaaggttttactgccacctcaaaatccgtttcgaagctcacccctcactcttgcttcttgtcttgtgtttcctgtttccttgtatctgaatatccctctccctgtcatcctcagcccatgtcgcccactgctcggctctcccatgatctccttccctcttctgcaaccctcattgcttctgccgtgctactgatttgtcttcatctggtctctagtcctcctaaacatttattgaagttgcttaacctaaagaatatccacgtgactgctgtgttgcaggtcctgtgttggaggaggtgggcccagatctctgacctataccaatctcttctggcatcagtttcttccatcctgttggattcttcacttcgaactcattactcttatacaggcaatgtggggaagattgaaactgattccttggttggcattcagggccttctgtgatcttgctcattcatccgtcttttccagtcatgtcccgtggctccctttcatgcatgctgtacgttccagccagactggtacataccccgtcatgccctacctcttcctctgttatcatgtggcttcctgcgggaatgccttctcctcccttcacttctcccatgcccttgtccaaattttgtccttgtgcttcagctcaaatgccatctcctccaggaagccttccctgctcttatctggtaagcatttgagtacctatagtgcccatagtccaccactggaggagacaccttgtttttgttttgttttgttttgttttgttttttgagatggagtcttgctctgttgcccaggctggagtgcagtggtgcgatctcggttcactgcaaccttcacctcccagggtcaagtgattcttgtacctcagccttcctagtagctgggatgacaggtgcatgccaccatgttcatctaattttttgtatttttagtagagatggggttttaccgtgttggccgggctgctctcaaactcctgacctcaggtaatccacccacctcggcctcccaaagcactgggattacaggcatgagccatcatgcccggcccccttagtttaattgcttaggctgtatatatcattttgcctctctgcatcctgtgtcctctccttgaggtaagttgggtctatgtcaaattcctcatagccatctttctgcctagtgcagtgtgcagcccacagcgtgctctgaggaggtgctggctgcataatagcacctgtttcctgccttgccctccctgtgctaagccctttccatgctttgtttcacttaatcctcacagcagccctttgacccagatgctattaattttgtcttcctgaggaggaaactgaggctcagagagattaagccacttgcccagggtcacacagctggtaggtggtagagctgggttctatgcccagaacttttgcctttaattcctgttgtatgacccgaatgagtgggatgaatagaactgtcaaaataggatgtgtaaagccagtggaggatgtaaacttcagaggatgccacaaattcagaaagaacgcttctcattttttaaatcactgtgttcagtgggtttcagccatgccctttaccaagaatagcccacagcttagaccatcattaaaaggggtggggtgggaaaggcagcaggagagtaactggtcttctcaaccccctcacagcaatgacttcccaggaactggtgtttcagggtctcacatcctagtagaccaggccctggagtgttggagaaagacagccaaattgcctttttgcctcttcattccttctttaatcccccaaatccttaaggagtcatgactgtcatatactgtcctaagtcctctgggaccacagaaatgactcaatcccattcaagagcctttgctgcaggagaaggagtgaaacccataaatgaataatcctaactttcagaaaaagagttaatgtgattctgagagacaggcttttactgtggaaatggggaggaaggagaaacccttatatctccagactacagaagagcccccaagcctcggcttccttagttaacacccccaacttctgactcagtttgtcaggacctgtttctaagcctggaggtttggacacccccactgccctgccaggagtttgctgaggaccttggttttaagcctgcaaaaggtgtgattagaggcattgtggcaggagcagcctgtctttaaaagagcgaggaaagctaggcggtgtctccctgtgttgaactgtctggacggctccagctctggactggtaaagtgaataaacgagcagatactaagggatcctttgtaccttgcactttatgtaacatagtcatttagttctcgatacaaccctattttgcagctaaggaaacagacatttgaaacagctgtaatttgcccaggaatgcatggctaaaaggtagctcttaattgtagtctgatgctaggtgtggaaaatcacttgggaggcatgaatggagccatgttgttggggagaagaaaggcctgttctgagcttaagggcagaatccttaggaaatatttccctgttctttgctgtgggcttgcactatggacggataccaaagaactgcagagagaaccttttactgaggagaggccagtgcagtggaagtcatttggttagaacctgcccaacagacagctgatcaggcctggctggtagaaagaacagaatgttaacaaatatggtatgcagtgttagggaggcagaagaagggagaatccatgggcctgcttcgattgctttcgagtcatgagttggtggtgaatgggacaggccttaaaaaagtcagagattatgattcaaaaccagacaataatttaaaaaatagatttcgagaatgctaccctccagaagggccctcagagagaatctgaggttttatttacttgtttaacggacagcaaactgaagcctggtggggaaagcaacaagccaaagatgacagtgtgttacccacagaaccagacagcttgctgatctgaataagcctgtaagacaggagtttagtggaggaatagaaggtgaatggagcaggttcataagagagcaaggcagtggattgatctgtatttttgagaaacctcccagcatggagttgggagtgttagctaggccaagtcaagatttctaggacacggggcccaagtgtctttggagatgcaaaagagtccatggtgaggggggcaccaacactgcagaagggggagggaaggataactgttggatagggatcatttcccagttctgagtggagtccagagtccagagagcgtgctgtaaggtggtgtcctataagcttatcatgtgctcttccctgtttcacctgtaggtgattgcagtggtcatggacgtgttcacagacatcgacatcttcagagacctgcaagaaatatgcaggaaacagggagttgctgtgtatatccttctggaccaggctctcctctctcaatttctggatatgtgcatggatctgaaagttcatcctgaacaggaaaaggtttgtggtacactatatccagtttcaccatagtcaacaaatatgaccaagcatccattatctacaagctggctggtggcggtatccctgtttacaaggaagggactgaggctgtgagcaaagtcatttgcctggtcttacagaaaacaaacagtacctgtgacctggcaattctcctaggtgtctacccaagagaaatgaaaatatgggcccccacaaaaatttatgtgtgagttttatagaagcattattcataaagccaaagagtggaaacaatccaatgccaatcaactgataagtggataaatgatatgttgtctattcatacaatagcatactattcacctataaaaaggaatgaagtgctgatacatgctacagcatggatgaacctgcaaacgtgctaagtgaaggaaaccggtcacaaaagaccacatatgatatgattccattaagtcagaatagggaaatctatagagacattgattagtggttgcctagggctggggagttgggggaaggacgggattattgctaaagggtactttattttagcactttctttttaaactgatgagaatgtcctaaaattgactaacggtgatgatggttgcatatatctgtggatatactaaaaactacagaatttgtgttaattgtatgatctgtgaattagatctcagttaagctctttaaaagaaatgttaggattcaagaccttggcctctcccctgtactgtcctgcctcttaatagagcctggaccagctcccttgttgaaggcctgaaggccaccctggaagttgctgcttttgacagtagctccaggaggctgcccttttaatcacagcaaccagtattttttgagcccccactctgtctttggcactgctccatgctttttttttttttttcctgagatagagtctcactctgttgcccaggctggagtacagtggcccaatctaggctcactgcaacatccctctcccaggttcaagagattatcctgcctcagcctcccagttagctgggattacaggtgcgtaccaccacacctggctaatttttgtatttttagtacagatggggttttgccatgttgtccaggctggtcttgaactcctacctcagatgatctgcctgcctcggcctcccaaagtgctgggattacaggcatgaggccccatgcccagcctgctctgtgcttttaacaaatgttatgtaactgaatcctcaaagcagcccctatcaggtaagtggcacctgtgttttagaccaggaaatagtgacacagagaatccaagtgtccaccacttcaaagtagtgggcctagggtctgcctccttgtatgtctgcctccaaccccagtgtctgtaatcactattacatgctgctgctgttcatttctcattattgtaaaattagattttatgtctatttctctgattctgaaaatgacctaagtgtttcagtggaagcctatacaacatagctagcttggtcactttcatggaaagaagaaagaaaaattgtcatatttattacagaatttgtttttttgttgttgttgtgtttttttgagatggaattttgctcttgttgcccaggctggagtgcagtggcacgatctcagctcactgcaacttctgcctcccgggttcaagcgattcttctgcctcagcctcctgagtagctgggattacaggtgcccaccaccacacccgactaattttttgtatttttaatagagacagggtttcaccatgttggtcaggctggtctcaaactcctgacctcaactgatccacccgcctcggcctcccaaattgctgggattacaggcataagccaccatatccggcccagaatttgttttttaaaaattaagcaacccatggcttctcagccttttggctaagatcaagtgtaaaaattaagcatcttaacctgtgagcttcagaactttatttgttcatcacctgtatgagtatctattatgcactgggtactagatataaagcagtcagcaaaacgaatttagtctttggtactataagttactgcctaagagactctaacttaccaccttattattaccaagcaatttggtttacagaattcagattctcccacagagttcttgttggttgcctcatgataaagacaggattggggtttctagaccaattgagatgagacagccatgtaacccaacaggtggttagaaaatgagtccaggtggacccaaggaagatacactttggcatggaaaagagcattatcagctagccaggtaaagaaatggaaggtatcagtgtttaatttcaaggtactctttctataattaaggctatgcattagcagagaaatcacagaattgttctggccacaactttggtcaagtgattttctctatttatctactagacagaaatctatgagcaggcaccggttcagttgcctactgttggttgttgccttcataggtgtccagatcctctgcaggggggtttaagaaggcctatttctggccgggcgcggtggcttacgcctgtaatcccagcactttgggaggccgaggcgggtggatcacgaggtcaggagatcgagaccaccctggctaacacggtgaaaccgcgtctctactaaaaatataaaaaattagccaggcctggtggcacacgcctgtagtcccagctacttgggaggctgaggaaggagaatcgcttgaacccgggaggcagaggttgcagtgagccgagatcgcgccactgcactccagcctgggcaacagagagagactctgtctcaaaaaaaaaaaaaaaggcctatttctctggcctccccagtttttgtagttttacctccttcctggggaagcactgtcttccctggttgcttgtgtctcctgttcctctctgtgctagtgaatttgtgccccttgctgtatgggggctgatgtccccatgctctgcctctgtagctggttcagaatgttgggttgtgctgtctgtaggaacttggtcacacattgatgtgcaggcgctcacaagtgctttggccacgatcacagaggcatatgcaacattcagatgtgtgtcaaagggaaagatacagaaaaccacacctaatctgcccataatggtattcttatgcttattatatgttgatcctttaagacttggctcaggggtcatcacctcctccaggaagctctcctcccaccaagtccaggtgtacctctatgacattccctagtcgtttttctttttttaatttttattttgaaataatttaagatttataaagaagttacaaaaataatataagaaattcctgaatactcttcacccaagttctccacatgttaacatcttacaaacctcagtacaaataacaaaatcaggaaataaacttgatatcaatactatctaatttacagacttatacatttcccggtcgttccactaatgcccttttttatggtccaggatccaatccagtccaggatcacaccttacatttagttgtcaagtctccttcatgtgatttaatctggaacagtttctccatctttctttgtcttttagggtcttgacctgcccccaccccccccccaccaccccaccccccgtttttttttttaagagataaggtctcgctatgttgcctaggctggtcttgaactcctggactcaattgatcctcttgcatcaaccagcctcccaagtagctggaacgacagacatttggcactgcgcccggctggatcttgacacctttaaagaatactagctagctgggtgcagtggctcacgcctgtaatcccagcactttgggaggttgaggtgggcagatcacctgaggtcaggagtttgagaccagcttggccaatatggcgaaaccccgtctctactaaaaatacaaaacaattaaccaggcatgatggcaggtgcctgtagtcttagctactcgggaggctgaggcaggagaattgcttgaacctgggagatggaggttgcagtgagccgagattgtgctactgcactccagagtgagactccacctcaaaaaaaaaaaaaaaaaaaaaaacaattttttgtagaatttgggtttgtctgatgttttatcaaagttaaattcagattacgcatttggtaagaagaccacagaagtagcattatgtcttgccatagttttgtgttttatttttagcttattttgaatattgatagattaacagaagttgcaaagattgtacagaaaagtttcatgtacccttcacccagtttccccaaatgttacatcttatgtaacttatggtacaatgtcaaaacctggaaattgacattgtatacagctttgtgccatgttatcgtcatgcatgcatatccagacagaagtttccatcaccacaaagatctccctcctcctgctcctttatatagtcacatcactcccctcactttaacccctagcaaccactaatttgttctctatttctataattttgtcgtttacagtctattttgtaaatggaattatacagtatgtgacctttcaagatttgctttttttctctcatcacagtgcttttgaaatccatccaagatgtgcacgtatcaacagtttgttccttttcattgctgagtattgtatggtatcttataccattcagccactgaaggacatttggatatttccagtttttgtctgttatgaataaagttgctgtgaacatgtgtagaggttttgtgtggatataggttttcatttctctggatgctgttatgtgttactgtagtttctaaatcaattagttttctctctcttattctagtccttgaaggtaaggagcatgccttacatctctgttgtctcacggcttggcacatagtaggggctctctatgtttatggaatcaatgagtcaaacaaaaatcttacacgtttaatttaaatgtgtaagatttctaacgatatagagccactggtctgctccagagaatgcagattgttgtagtattttgtatgccattgtttatacatttatgtgtgtcattttacaggaataattatgcatacatgtgcagtatattgccccagcataccactaccagtgtacgtttttggtaattatgtatttgtaggagatgtgacattgcttgttaagccacatgtgatatgagtgtttctgcctcagcaggcctgtactagagaaggcctgtcctgtgttcctattctccatacccattatggtgttgagggtgagtgaggatggactgttactctaatgtgatgccattaaacaaacaagttggaggaagatcagcttaccttctttcagactttgctaaaatgttctttattactagcatgttttctttgatgattttatcccacacattttgcttcagaatcatttcttggattctgttgtttagtatcccaaaaaggttgagtgttcttttagaacacatacacgcatgaactaagggtctcaaaagtaaatataagaaaagaacagatgagaagatggaccaaatgtagaagtaacatcacttgaggcttgagaactgtctggctagtgtaccatgtatactgtcactaaatggtgaccctaagccacgcatatgccaataattatatctgggaattgtaaactaaggctttttgtcctaaccatttgctcagcagatgagtattgctgaattgttcatttatatttctcccactccctgccaacagttaatgacagttcggactatcacaggaaatatctactatgcaaggtcaggaactaagattattgggaaggttcacgaaaagttcacgttgattgatggcatccgcgtggcaacaggctcctacaggtaagtctctaacccgtccaaggcttattaatctaaactcttcagaagaagcatgtcatgtaaaggtaaaagccttttcctctcaatgggagcctgtatggccatgcattctgatatgcgtgcatctgtgtatagcagctggttatcaaagcctcctgttagaggcagtttgggtgggggtcacttcccctgtcctgtagtccatagattaaaatgcagaagttgaacttgtattgagacaacacagtcagcaagtcctagatttcaagccttggcccaggtctgcaggggacgaactgggggttaacagcaacacacagtctggaatcctggttccttagggatctggacccagcttgccctgctcacttgaaggtaggggcagttgcaggcatctccattagtgttgaaggcagagccagagctgtcagctttagactcaaatcctccacgttgcttcaagccttgtaatttagagctttagtctagaaaatactgattatgtttctgacccacctttgaagtgtcacattggcaatggcatcttaaggtagagagcaggaaggttgaagagagggtggggataatgagcggtttacatgaatctctagaatttgtgccatttgtacatatgtggctccaatggttgtatgttctgccgcctctgcggtagattgtctgatggtttgcatgaggtgtgtctgtagaattttaaaaagaaaaccccatttttgaagaaacacacaaccctgagtgataattacgtgtcagccctgggtaaaggtagaaatgtgaaggcttgtggaaaatgaggcagtaagatcaagaaaatcttgacacctttctttttcaacagtaccctcattgctcagaacaaaatttgaactttcttcaccaaagaggctgtgggaaaaaacaaattgaactctttttcttggaatttccttttgtaagaagtttattaaaaaaatttgtttttaacctaagtaggatttatctatattaaccaaacttagctacaaatggacttttgctgttctaaaatataaaaactaccctctccaaatgaaattgatgacgatgatagcttccatttgttgaggaggttttataatcttggtgttggataggtgctttatttacattatctcattgaaggctttcttttttttttttttcgtgatggagtcttgctctgttgctcaggctggagtgcagtggcgccatcttagctcatttcaacttctgcctctcagattcaagcgattcctgtgcctcagcctcccgagtagctgggactacaggcatgccaccatgactggctaatttttgtatttttagtagagatggtgtttcgccacgttggccaggatggtctcagactcctgacctcaggtgatccgctggcctcggcctaccaaagtgctggggttacaggtgtgagccactgcgcccggcccagcctcattgaaggctttcaaaagaatcttccttctcaggctttgaaggcagttttcagggggactttgcattagccatatcttggttacaggagacagagttgactgtgttctatgatctctgtttgaaacctacttctggtacaaataccaccattagtggggtgatggcaagtgtcagctaactctcaaacgtactgactcgaagaacccggaaggaagcatagaaaggtacagttggttttcagttcatcttgacgtaggagccacacgctgatcagaacactatatcctggttctgatgttttcgagttgacttttgttcttaggcaggctctccctttgaagtcaacgatcctggctttgtttattttttgtttttgagacaaagagtcttgcccaggccggaatgcagtggacgatctcggctcactgccaagttccgcctcctgcgtttacgtcattctcctgcctcagcctcccgagtagctgggactacaggcgcccgccaccacgcccagctaacttttttttgtatttttagtagagatggggtttcactatgttagccgggatggtctcaatctcctgaccttgtgatccggccaccttggcctcccaaagtgctgggatgataggcatgagccaccgtgcccagccagatcctggctttcttatatggcctttagtagctgtctcccaaagggtgaaactctttcactcagaattactatcaatcccttctgtcagaatccatttgataaagaaaaaagaaatctctgaaaacttacttggctctggtgggatcacatgcccaccctgaatgaatccctgcatccaagggaataggatactctggccagtgtggaccacatgcctgcccctattgtggttggagagagtatgataatgaaagctttctggggtacaggtgggtgtgagttctgctagcagaggagggaggcggggaagggacaccgtacaggcaagggcacatggccactaatcagctctaaaatgttttgagccatggtgttttgtgaaaatggcagcacagccccatgactgtgggtcctccactgttagtgaggaagactacttcagcagccacaaggacaagcttgagggcaggaaggccactgatgttgccactcaaacagtagcaaggagcagggcattagcaattcatagggcctagggtctgatctggagtccagcagtagctcccctctgtgataatccctttatctggtttccttacctttaagatgggggtgctggcctaaatagttttcttacctttaaaatggggatgctggcctaaatatttagaagccctattttttatttttaattaattttttgagatggagtctcgcccagtcatggaatctcgcccagtcatggaatgtgcagtggtgtgacctcagcttaccgcaacctctgcctccggggttcaaacaatcctcccacctcagcctcccgagtagctaggattacagtcatgcaccaccacgcctggctaattttttatgtgtttttactggagacagggtttcaccatgttggccaggttggtcttgaactcctgacctcaaaggatctgcccacttcatcctctcaaagtgctgggattacagtcatgagccaccgcgcctggccccctttccagtttttaaaaactctgaggcaaggaccaggtgaggtggctcacacctgtaatcctagcactttggaaggatgaggtgggaggactgcctgagccgaggagttcaagaccagcctgagcaacatagcaagaccccgtctcaaaacaaacaaacaaacaaaaaaaccctctgaggctgagcatttagtgtgtttgttaaacagttggcctttttacttttatggtaacacacataaatgttatatatgtgttaaggctagttaaatacatgcaaatggtaggtatgatatcaccaaatttgtgacccttatgtggtaagatacctgtactatattattcagatggacagtgagtaaaacaaaattgctcatccttaccagctgctgtttgtttctttttaatctttaagttttacatggacggatggcaaattaaacagcagtaacttggtaattctgtctggccaagtggttgaacactttgatctggagttccgaatcctgtatgcccagtccaagcccatcagccccaaactcctgtctcacttccagagcagcaacaagtttgatcacctcaccaaccgaaaaccacagtccaaggagctcaccctgggcaacctgctgcggatgcggctggctaggctgtcaagtactcccaggaaggcggacctggacccagagatgcccgcagagggcaaggcagagcgcaagccccatgactgtgagtcctctactgttagtgaggaagactacttcagcagccacagggacgagctccagagcagaaaggccattgacgctgccactcaaacagagccaggagaggagatgccagggctgagtgtgagtgaggtgggaacacaaaccagcatcaccacagcatgtgctggtacccagactgcagtcatcaccaggatagcaagctctcaaaccacgatttggtccagatcgaccactactcagactgacatggatgagaacattctctttcctcgaggaactcaatctacagaagggtcaccagtctcaaaaatgtctgtatcgagatcttccagtttgaagtcttcctcctctgtgtcttcccaaggctctgtggcaagctccactggttctcccgcttccatcagaaccactgacttccacaatcctggctatcccaagtacctgggcaccccccacctggaactgtacttgagtgactcacttagaaacttgaacaaagagcggcaattccacttcgctggtatcaggtcccggctcaaccacatgctggctatgctgtcaaggagaacactctttactgaaaaccaccttggccttcattctggcaatttcagcagagttaatttgcttgctgttagagatgtagcactttatccttcctatcagtaactgctccgtgttcagactcctggtttcttccaggcttacagtggacatcatcagcttcctgctttaaaaaatatcttatgtccctaattgcctttcttttacctgactttgtcacctttgttgtctttgaattctttaggctgcatattattttacatgctttgttttgtcatgtatataccaggtattggttttatggtttaaacactatggatacaggggtttgttttgcacaattttaatagtcatgcactacataatgatgttttggtcaatgacagaccacgtatatgttggcagtctcataagattataatactgtatttttactataccttttctgtgtttagatacaaataccattatgttacagttgcctacagtattcagtgcagtaacatgatgtacaggtttgtagcctgttttgcatttttcttaggttgtatgctcttctgttttaaaggtttgaatcaccagcatttttgtgatcaaaatcctatttagaaaaaataaaactactttctgtttatctctttagaa

SEQ ID NO: 290 - DNA, 32744 bp, Homo sapiens
  source 1..32744: mol_type = other DNA
ctcaggcccctcccccggcgcccgcgcgccaggactgggcggcgccgacgcgcttggcgggagatagaaaagtgcttcaacccgcgccggcggcgactgcagttcctgcgagcgaggagcgcgggacctgctgacacgctgacgccttcgagcgcggcccggggcccggagcggccggagcagcccgggtcctgaccccggcccggctcccgctccgggctctgccggcgggcgggcgagcgcggcgcggtccgggccggggggatgtctcggcggacgcgctggtgagacgagccgggagggcttgggcccctccccctccctttaactcacccctcccccacccagatacccccgaccctccccaggctcccaccaagctggggtgtgtgtgtgtgttgggggtggggtgtttccgcggaaatgctgcgtcctgggccctctgaggcaggggcgcgcgtaaagctggggggctcttgggcgtccctcgcggctccccaggcctgttgggcctcggagctgggacgggcgggtctcttgggacccgggccaagccgtgcatgatgtcattttgtctcccgcctaattgcgggatgggggtgggccggccggtgtcagctggcagggccttcgccggcgagggaggcgacccctgggagcgagagggagtcttcaagtcccagccagtgggagaccgagcctgggaggcacttgttgcagcctagttttgggtcaacttggtgggtgggctttgctccttaacattccggggagcacagagtcccccaagccctctcccctggactgagaagggtgctgagttgggggctcttttgtctctcccacctgggttccgcgccccagcttggttcggtttgagacctctcttcctgttcccacgaggagttttgggcagctggggttgaaggtgcgggggagagagagagtccctggggcaaaggcaggaactgcggtctccattttacttatttccccagagacttaagtggcagagctgagcccggagccaggtctgtggctccagatccctgtcttacacctgtgcgcctggggcctgagctccaagcttttcagcctgcctgggagacaggacagtggggtcctgacctcttccctgcctggatcgctgcagctcagataaccttcgttccctcttttttttttttttttttttttttgagaaggagtctcgctctgatgcccaggctggagtgcagtggcgcgatcttggctcactgcaacctccgcctcccaggttcaagcgattctcctgcctcagcttcccgagtagctgggacttcaggcacgtgtcaccacgtcgggctaattttttgtatgtttagtagagacagggtttcaccatgttagccaggatggtctcgatctcctgaccttgtgttccgcccgactcggcctcccaaagtgctgggattacaggcgtgagccaccttgcccggccaaacttcggtccctctttagacgatagcctcatctaaagatgaagccttccatccctctagatttttgccctttcaggctgaggatagggatctgagcacagggactgtgttcctcaggccccactttcccaggccaatgtccaggaagagttttctgttcaggcgcctatcagaccctgccctggttttttttttttttttttttgaggcagggtctccgtctgcagtccaggccggagtgctgtggtgctgtcatagctcactgtagccccaacctcccaggttcaagtgatcttcccaactcagcccgctgggactgcaggctgagtagctgggactatgggcacgggccgccacaactggctaatttatttaattatttaggagacagagccactctgtgttgcccaggctggagtgcagtggcacaatctcggctcactgcagcctctgcctcccgggttcaaggaattctgtctcagcctcccaagtacctgggactatgggcacacgccgccacgcctggctaattttttggatttttagtagagatgggtttcactgtgttgctcaggcaatccgcctgccttggcctcacagagtgctaggattacaggcgtgagccaccgcgtctggcgtgttttattttgtgtagagatggaagggggcgggagtggcctcgcgttgtgtctcacctcactatgttacccaggctggtctcgaactcctggcttccagggattctcccccacttggcctcccaaagtgtcgggattacaggtgtgagccaccttgcctggcgccatcctgattttttgttcaggaagagttattccaggagtgactgcctctagaccaccccaggtcctgggctacttctcccatgaggggctcagtggaggaacccctcctgtgtgaaggatggcagctccacagccctcagcccatttcctggccacttgctgtaactctcctctgccctagtgccccacttcccgctttgtctctgactcacccctgtcctggagcagagcccagcacgttgaagggcaaaaggtagggtatgttggaccacaatgtggttgccaccactaactggactctgctttttcagctgggattaggatatgaggacttgcaggtgtctggagttaggaaggttcagagcctggctctatgaacttggcaggtggcctcacccctctgagcctcaatttccgcatctgttaagggggataatgagaatgtgggtgaagttgatggccagcacatatggtaaagtatatcatctcacagaaatgccccagctgtctgagatgctgaccctatcaaacagcattggaggctgggtgtggtagctcatgcctgtaatcccagcactttgggaggccaagagttcaagaccagcttgaccaatatggtgaaactcctcgtctctaccaaaaatacaaaaattagccgggcgtggtggtaggcgcctgtaagcgcggctattcgggaggctgaggcaggagaattcacttgaacccaggaggcagaggttgctgtgagtcgagatcatgccactgcacttcagcctgggtgacaaagcgagactctatctcaaaataaacaaacaaacaaacaaacagcattggagcaccagggagtgtccatgcagacatcatttcatccttgaaagaatatttgctgaccttctgttagaagccaggcctttgtgctggatgctggagaagcaaagatggtttctgtcacgagctgtctgggggcagttgattttaaagccaacttcattctgttattagtatcttctggatttttgccttctatattgaagtggtggaggacccatgaactgggtcaggaatgaattccagatccttctgtattgctgactgtagacaccgtccctcctttcctatttctgaaaatttttttcttttgaaattgggtcttgcctggcctaaaaaatttaattagtatttcttattgactaataggcagcagctttgcacattttttcatttatttgtatattcagtcagtccctgggcaaacatttcttaagcccttttggtgataaaccctgggatgccaaggtggagctgacctttgtagatgatgtggaggagacaggcagttgcagtgtaagggcccgagacaggagggtttcccatgtgctatggaagtataggagtgactctaggaagcaacggtgagctttggagaacaaggagaaggtaatgtggatagcacagtaagccttctttcatttgtttcatttccaaacaagacttgccttgtttggaaacctgtaagctttttccagtttacaaatgtctgacctagcaacttacctgaccaacgtgacctgatgcaggtcctgtcgggtggagttggggaaagattactaactttcctcaagcacctgacatctctggaggtggatcctatgatttcttttttttctttttttttttttttttgagacggagtctccctctgttgcccaggctgcagtgcagtggcacgatcttgactcactgcaacctctgcctcctgggttcaagcaattctcctgcctcagtttcccgagtagctaggactacaggtacatgccaccatgcccagctaatttttgtgggtttttatttatttattttttttgagatggagtctcgtctgtcgcccaggctggagtgcagtggcacaatctctgatctctgctcactgcaacctccgcctcctgggttcaagcagtttttctgcctcatcctctcgagtagctgggattacaggcgcatgccaccacacccagctaatttttttgtatttttagtagagacatcatttcaccatgttgaccaggctggtctcgaactcctgaccttgtgatccacccacctcggcctcccaaagtgctgggattacaggtatgagtcaccgcgcccggctgatttccattttttttttttttttttttttttgtgagatggagtttcgctcttgttgcccaggctagagtgcaatggcttgatcttggctcaccgcaacctccgcctcccaggttcaagcgattctcctgcctcagcctcctgagtagctgggattacaggcatgcaccatcacacccggctaattttgtatttttagtagagacggggtttctccatgttggtcaggctagtctcgaactcccgacctcaggtgatctgcctgccttggccccaaagtgctgggattacaggtgtgagccaccacacctggcccgatttccatttttgtaactattaaactggataaatacgaggattttttggagcaacttggaagattgccttgtagagtaaaaacacccagaattcaaagcagctcgtactgttttttttttttcccctacagcggcgttagaagatattgtacactgggccgggcgcggtggctcacgcctgtaatcccagcccgttgggaggccaaggcgggtggatcacgaggtcaggagttcaagaccagcctggccaagatggtgaaaccctgtatctgctaaaaatacaaaaaaaattagccgggcgcggtggcaggcgtctgtaatctcagctactcaggaggctgaggcaggagaatcgcctgaacctggggggcagaggttacagtgagctgagatgtcgccacttcactctagcctgggtgacagagtgaaactccgtctcaaaaaaaaaaaatagatactgtacactgatttttctctccattaattatgcctgtgtgtaggcaaggattgaaaagggatttgcaaaaatggacataagccagacacggtggtgcacacctgtaatccaagttactttggaaggctgaggcaggaggatcccttgagcccaggagttcaagaccagtctgggtagcatactgagaccctgtcattacaaaaaaaaaaaaaatcaacacacgaaaaaacaacttggccagtcacagtggctcaggcccgtaataccagcactttgggaggccaaggtgggaggattgtttaaggccaggagttccagatgagcctaggcaaaatagtgagatgtttctacaaaaaaatacaaaatagccaggcatagtgtcatatgcaagttgttccaggtacttgggaggctgaggtgggagaattggattgcttgagcctaggagttggaggctgcagtgagctgtgattatgccactacattccagtctgggtaacagagccagactctgtccctaaaagaagaaaaacaacaaatggacatagagaatatattcagaattttttttccaaataactaatatctcttaaaatcttgatgcctgttaacttcatcaactttattccttaaaatatccatgcaggtttgttactgaaaggaaaaagcgatagtctgattttgaacataatattcttggtgaaatcttaactttctttttccttttctttttttgagacagtcttgctttgtcacccaggctggagtgcagtgacatgatctcggctcattgcaaccttcacctcccgggttcaagcaattcttctgcctcagcctcctgagtagctgagattacaggcatgcgccaccgcacccagctaatatttgtatttttagtagagatggggtttcactgtgtttgatcaggctggtcttgaactcctgacctcaagcaatccacccacctcggcctcccaaagtgctgggattacaggtttgagccactgtgcctggcctcttttttttttttttttacagcttttgaaatcactagggcattcctgaaaataaaaaagaagaaagtagctcttaaccctatttcattaaaaaatttaaaaagaggtgaggtcgggtgtggtggctcatgcctatagtcccaacactttgggaggccgtggtgggaggattgcttgagcccaggagttcaaaaccaccctgggcaatatggtgagaccccgtctctacaaaaaatacaaaagttagccgggcgtggtggcatacccctgtagtcacagctacttaggaggctggggcgggacgatcatttgagtccaggagttcaaggctgcagtgagctacgatcatgccacactgaattccagcccagtgacagagtgagaccctgtctcaataaaaataagtgaagcagaagtgcctatgtcttaaaaagaagaaaaagtaagagcctctctcccccagacctttccctagggtgggctggccgctgcctacacgttctccattatgtaaaacatatggacacaccatccttgacccttggcctgctttccccatagcgaggatctggatgagctgcactaccaggacacagattcagatgtgccggagcagagggatagcaagtgcaaggtcaaatggacccatgaggaggtgagtgccatggggaagagagggttgatggcagctgggggctgtccagaggaactgagcctggagtgtatttgatgtctcatcagatgggatgaagaggaggagccggtgaaggaagggatgggtcctctgattgtcctcatgcctcttctcagagcattctgggggattctcaattttgaggactcagtgggtgggaaggggatgtgtgtcctagacctcagggcccattgtgtctcctgagcagctgccatgttctatgtcatggacattgattgtgctttttgccttttgactgctaggaggtttggccaaatctgtaactccccccaccctttttttttttttttttttgagacagagtttcgctcttgtcacccaggctagagggcaatggcataatctcagctcactgcaacctctgcctcctgggttcaagcgattctcctgcctcaggtgcgattacaggcgtgagccaccacatccagctaatttttttttttttttgagacagtctcgctttgtcacccaggctggagtatagtggcatgatcttggctcactgcaacctctgcctcccaggttccaagcaattctcctgcctcagcctcccgagtagctgggattgcaggcatgcgccaccatgcccagctaattttttttttttgtatttttagtagatacgggggcttcaccatgctggccaggctggtctcgaactcctgacctcatgatctgcccgcctcggcctcccatagtgctgggattacaggcgtgagccactgcacccggccttaatttttgtattttttagtagagacggagtttcaccatgttggccaggctaatctcgaactcctgaccccaggtgatccacctgcctcggcctcccaaagtgctgggattacaggcatgagtaaccgcaccctgccaactcccactttctttttctaaaataattaactgtattgaaccttctgacatcaagccctgaattggtttccttctagctccatctttttattttataataaatgtgattgaaatataatttatatgtaatcatatgcaatcaaatgccctttttttaattcctttttgagacagggtttttgctctgtcacccaggctggagtgccgtgctagcatggctcactgtagcctcaactttctgggctcaagcaatcctcccccgtcagcctcctgagtagctggaaccacaggcatgcgccaccacgcctggctaatttttgtattttttgtagagacagggtctcgccatgttgcccaggctggtctcaaacttctaggctcaagcatttctcccacctcagccttccaaagtgctaggattataggtatgagccactgtccctggccaaatgcccctttttatggtgaacagtttgatcagttttttttctttttttttttttgagatggagtctctgtctcccaggctgaagtgcaatggcgtgatctccactcactgcaacttccgcctcctgggttcaagcgattctcctgcctgagcctcctgagtagctaggattacaggcacccgccatcatgcccagctaattcttgtatttttgtagagatggggtttcaccatgttggccaggctagtcttgaactcctgacctcaagcaatccacccaccttggcctcccaaagtgctgggattacaggcatgagccactacggtgagccggtttgatcacttttgacaaatgcatataccaatgtaagcaccaccctgattatcccaagaagttttctgtggtcctttgtggtcaggcttccccagctccaggaaattgctgatttgatttgttttgcctttttctttttgggggctttgtgtgtgtgtgtgtgtgtgtgtgttgtttttaactttaggttcaggggtatatgtgcaggtttattatataggtaaattgcatgtcgtgggagtttgatgtacaggttattttgttacctaggtaataagcgtggtacccaataggtagtttttttttttttaaggcagtctctctctgttgcccaggctgtagtgcagtggtgtgatctcagctcactgcaacctctgcctcctgggttcaagcgattctcctacctcagcctctcaagtagctgggattacaggcacgtgccaccacgcctggtaaatttttgtatttttagtagagacaaggtttctacttgtctctactaaaatgttcaccaggctgatcttgaactcctgacctcaggtgatcttcccacttcagcctcctgaagtgctgggattacaggcgtgagccactgcacccagccccaataggtagttttttgatcctcatcctcctcccaccctccaccctcctcccaccctccaccctcaagtaggccctggtctccttgttcccttcttcgtgtccatgtgtattcagtgtttggctcttacttatagatgagaatatgcggtatttggttttctgttcctgtgtttgcttaggataatatgttttgcctgttcttgaatcttctataaatgaaatcatacggttacattctttgcgtctggcttttgctcagcattgtgttgggtgattcagtaacttgtccttttctatcactggatagtagtccattgtatgggtataccacacagcgtttcacctgttgatggatgtttggactgtttgcagtttttggctatcgtgtatagcgctaccttgaagattcttgcataagtctttttgcaaatacatgtttccctttcttttgggaagataggtatggtcatggggtaggtgtatgtttagttttacagaaactgcctttttcttaatggattgtaccattttagacttctactggcctttttattttacctcagtttttcttagtgtcttcagttcttcagtgttttttgttttgttttgttttcaacccatagttaacatcatagatgtctttaattttaggattgggtttttttttttgtattgtattatttgtattgcttttgttttttgtttttaaatagagaagagggtcttgctatgttgcccaggctggtctcctgggctcaagcaatcttcctgccttggcctcccaaagtgttgggattacaggcagaagccaccatgactagcttgttttgttttttctaaaacttgctgtgtgagtggtaaactccttttaaatcatgaaagatgtttttccagatgcgtgctaagcaaaccttttctgctcatcctgttgtggaccagggactatatttggctcttgtgggcttagaagaataaacaagaccaagttcctaccccagagcagatttctctctggaatggagagataagaccgtgtgcaggtccctggaatgtgctgtggtcatccgcggcaccggtaggatcagtgtctgttggtgctcactgttgtagctctgggcacctgctaattgtaagatgagtggatggcaagtacctttagaaggagagattactgctgcctgaagaggttaaggaaacttatgtggagaaagtgacctttgagctaaggatgaggatttggaaatttagcagtgagggaagacctacagtgtgcaaaaagtgggtaagtcagatcaggaaaggggctataggtggagaaaagccagtacaggaggccagtttggtgggagggaagggtccttgaaggggagaaatggttgacggagatggccgcccggccacccctactgggaagtgaggagcccctctgcctggccagccgccccgactgggagggaggtgggggggtcagccccctgcctggccagccaccccgtccgggaggtgaggggcgcctctgcccggccgcccctactgggaagtgaggagcccctctgcccggccaccaccccgtctgggaggtgtacccaacagctcattgagaacgggccatgatgacaatggcagttttgtggaatagaaagaggggaaaggtggggaaaagattgagaaatcggatggttgccgtgtctgtgtagaaagaggtagacatgggagacttttcattttgttctgtactaagaaaaattcttctgccttgggatcctgttgatctatgatcttacccccaaccctgtgctctctgaaacgtgctgtgtccactcagggttaaatggattaagggcggtgcaagatgtgctttgttaaacagacgcttgaaggcagcatgctcgttaagagtcatcaccactccctaatctcaagtacccagggacacaaacactgcggaaggccgcagggtcctctgcctaggaaaaccagagacctttgtttacttgtttatctgctgaccttccctccactattgtcctgtgaccctgccaaatccccctctgcgagaaacacccaagaatgatcaataaaaaaataaataaagaaagaaagaaagaaagaaaaaaaaaaaaaaagaaaggatacactggggctgattcctcgagggccttgaatgttgggcttagaagctgtaggattgttcagctctcaatgcagagccaggttagcttggtttttggattgttttttctaactctgaactggacaaagatggaaggtttttaatgcagggagtgatgtgaatgtagccgggcttcaggggagttcatctgctgtgtgggggatcgataagagagatgggtggcctggcgcggtggctcacgcctgtaatcccagcactttgggaggctgagatgggtggatcacctgagattaggagttccagaccagcctggccaacatggctgaatcctgtctctactaaaaatacaaaaaattagctgggtgtggttgtgggcacctgtaatcccagcaatttgggaggctgaggcaggagaatcacttgaacccagaggcggaagttgcagtgagctgagatcgcaccattgcactccagcctggacaacaagagcaaaactccgtctcaaaaaaaaaaaaaaaaagaaaaaaacatatagagcacaggctggggctgagagaccagtgctgagggagtgggagagggcgctgtgccaggcaagcaagaggtggctgtggagagggcagtgcggggatggagctgaccacgttggggagtcccagggtgggtgggaagaatgtaagtttggaaatgatagtatccaggtcagttgtcagggagagtggtggtgccagagatggactggggaacacagaaggaagcaggtaagagcctggccagggcagggaggggacatggtataggtagggaagggtgtcctgggctggctcacccagagaatttatggtgactttgcccagcctgtgctggttctggccaagctgtagttgagggctttgatacctgtcgtgggccacgttgtgaccaatttttctgtctaggagcatgtatacatatatacacatataaatttgtatgtgtgacaaaaccacctcactttaaatttatccccttttcctcccccttaaatctaccccttaaccatctttaactttgtagttcagtggtgttaagtattttcagattgttttgcaaaagatctctaaaactttttcatctttgaaattggaaacgaggctgagtgtggtggtttatgcctgtaaaccgagtactgtgggaggccgaagcgggaggattgcctgagtgtaagagtcctagaccagcttggaaaacatagcaagaccctatcattaaaaacaaaacaaaaaatacccaccaacttggtgggtcacggtggctcaggcctgtaatcccagcactttgggaggccgaggcaggagattgcttgaggcagtctagaccagcctgaagaacatgtgagatcctgtctctacaacaaaaaaatgaaaattagccaggcctggtggtgtgtgtctgtggtcccacctacttgggaggctgaggtggaaggatcacttgagcccatgaggttgaggatgcggggtgggctgtgtttgcaccactgcactctagcttgggtgaccaagagagaccctatctcaaaaaaaaaaaaaggatggaaaactgaaactaattaaacatgaattcactctcctcccaccctccagcccttggcagctatctttctactctgtttctgtgattttgactattttatttatttattttattttttcaagacagagtcttgctctgttgcccatgctgcagtgcaatggcatgatcttagctcactgcaacctctacttcccgggttcaagtgaatcttctgctgcagcctcccgagtagctgggatcacaggcgcctgccaccacgctgggctaatttttgtattagtagagacgaactttcaccatgttggccaggctggtctcaaactcctgacctcaggtgatccacctgcctcggcctcctgaagtgttggggttaaaggcatgagccactgctccctgcctgattttgactattttagatgcttcctgtgagtggaatcctgagtatttgccctgtctggctatttgacttagcatagtgtcctcagctttcatccatgctgtagcatgtgtcagaattctctcgactgagtaatatccattgtttatatgcatgacattttctttcttttttcttttgtttgagatggagtctcactcttgctctgttgccgaggctggagtgcagtggcatgatctcggctcactgcaacctccgcctcccaggttcaagcaattcttcctcatcctcccgagtagctgggattacaggcacccaccaccacacctggctaatttttgtatttttaatagagatggggtttcgccatattggccaggctggtctcgaacccctgacctcgtgatctgcccaccacggcctcccaaagtgctgggattacaggtgtgagccactgcgcctggcttgacattttctttatatattaattgatttgactgaggaaaactttatatataattaactacaaccatttgtagtacaattcagtagaaccaccagcacagccgggctataggacatttccattgtccccaagacattccttgcccccctttgctgttcatccctttccaccactggcctcagacaaccactttttgtccctatagcttagtttacattttctagaacttcatgtgcatggaatcatacggcatgtaccctcctgtgtctggcttctttcacacatcatagtgacactgagattcatgttatcgcgtgaattggtagttcatttcgggaggctattttgatagatactagcctgtcttctaactactcttgtttttgcccagacctccagcttctagtgctgaatcactgtcagctctggcctgagttcagtaatgacctccttatgtccgctcggctcccttccagcccctttcccaccctgtagcaggcaaagagaactttacaaagttctcttcatagaacgtttgactgtgaccacccactcttcaaacacatcagtggttttgcatgatagatggttgaactgatgctgcgaatggtctggcccctatggttccctccaaaatcatcttggatctgttttgcttcctccattttagctattctgcatttccttggaacctgtcccttagtgtccctgagtaggcagtcaccacgtacctctccatatctcccagcagggggtggctttacttttgttcctgtgagccttccattggcagctggctccctcccatgagatcaggggcagctcttttgctgcctgctgctgcagctgtagtgcctggcaccttgtacgtattcacttcatgacggaatggatgaacgaggctgttcttttagattgggctctgtcacgggcagccctgaggttttctgcacgtatgtgtgctgagcccctgtctttctggtgttggcaggacgagcagctgagggccctggtgaggcagtttggacagcaggactggaagttcctggccagccacttccctgtgagtacagtcctgctgtggccctccctcggggcaagggctctgggagaacagtgtgcctgggacagactttgccaaggaggggaaaagggagttccttactcagcccctgaaaacaaaaccaaataaaacagggcaaatggacctttgtaggatctctcttcccaagctggcattcagggtacactgctgtaaacatcttccagctcctcagcatgcctggtggtcttcaggctctgagacatttgcagcatgtggtgcatatttgcatttcttcctgtaagtcaggagtgaacaggtgttcggtttctcaacagtgagactgaaactgaggggaagtgatgctttcagcaggcttcatggtgaggcccctgcagggctggcaggtgctaccacattcgagtatttagagcctcctgatggtgagggggttcccctcaggacctccttctcaggccctcccacccctgacccacaggtgtctgggagggagggggtgtggcaggagctgccatatgtcttactgcctgggctgctcagaaagcatgtcaccagatcctttcctgccccatttcctcatctccccctcttctgtgtaatctgaactcttcagggaataaaaatgctctcctagaaaaaagcaggggtccctgacgtacaaggaattaaagacttgtgatggtggccccttgtgttcggttggtagggagcggcttcccacaggggaccgagtttgccctctcgtgtagcaaagggaaaccgcccatgttccggcatgtgggcttgcagtgagtggtggctgcatggaacaggacacacctacccaaggtgtgcctagtcccaggccataggcccctgagcctagtacttaaccaggcccccagcccgaggtcccagaagttctcacagattggtttgttcttctgttcttttcccagaaccgcactgaccagcaatgccagtacaggtggctgagagttttgaatccagaccttgtcaaggggccatggaccaaagaggaagaccaaaaagtaactgctgggacagtgccttgcacacagtgggtcttcacccaccagtgtacctggggactgtgagattgccttgtgttggggttgggggtgtcaagctgagcattgggtgtgagttgtctaccagccagtctggacactcttatgctgccctggctccagccctgagattccaagtttcagagtgtctccaggcttcctcactcatggtctgagggctattgggctgattactcggcttctcttgttccacccatggaggggagcagtagcagtgcagcgttgtcatgagaattaagcaggtgatgcttgtagggggcttgcaggttctgtacatttgctctcagcaaatggcagctgctgctatccctgatttaatgatgattgcaccctgtgaccttcacagggcacagatgccttcttttgatcgccacagcagtcctgtgaggtgggcagaagttgttagtcccattttatagatggagagagcaaggctcagagaggttggggatgtccccaacctagaagaggcaataagtgccatgactgcctggggctaccttgggagttccctcatctcttctcctcgataccagcccagaggatgccattccactgaggcaggcatggcttatgagaaagagggagatgaagggaactaggcattttttttttttttttttttgagacggagtcttgctttgtcgctcaggttagagtgcagtggcgcgatctcagctcactgcatcctccgcctcccgggttcaagcgattctcgtgtcttagcctcttgattagctgggattacaggcacgtgctaccacacctggctaatttttttgtatttttaatagagatggggtttcaccatgttggtcaggctggtcttgaactcctgacctcgtgatctacccgcctcagcctcccaaagtgctggaattacagacgtgagccaccgtgcctggcctggaactaggcgtttttaaattaatttttttttgagacgagtcttactctgttgcactggctggagagtgttggctaatttttttgattgattgaggcgggggttcgctctgtcacccaggctggggtacagtgacataatcacggctcattgcagcctcgacctcccaggcccaagcaatcctcccacctcagcttctaaagtagctggtgccacatgtgccaccatgtctggctaatctttttgaaaaatttttgtagagagagtatctcactatgctgcccaggctggttgaacttctgggctcaaatgatcctcccacgtcagcctctcaaagtgctgggattgtaggtatgagccaccattcctgttctttttttttttttccttgttaatttttttgagactgagtcttgctctgtcgtccaggctggagtgcaatggcgtgatcttggcttactgcaaccttcgcctcctgggttccagcaattctctgcctcagcctcctgaggagctgggattacaggcgcctgccaccacgcccggctaatttttgtatttttagtagagacagggtttcaccatgttggcctgactggtcttgaactcctgaccttgtgatctacccacctcagcctcccaaagtgctgggattacaagcgtgagccactgtgcccggcctttttttttttttttttaatttgtagagacagggtcttcctatgttttccaggctggtcttgaactacagggctcaagctatcttctcgccttggcctcccaaagttctgggattacagtcatgagccatggctggcacttcgccttaaaattaatttttaagtaactcggcgtggtggtggggtgcctgtagttgggaggctgagttgggaggattgcttgagcccaggagttcgaggttacagtgagctacgatcacaccactgtactccagtctgggtgacagagtgagaccctgtctcttaaaaaaaaaaaaacacaaaagaaaacacctgggcgtggtggctcacacctgtaatcccagcattttgggagcctggggtgggtggatcacctgatgtcaggagtttgagaccagcctgaccaacatggcgaaaccccgtctctactaaaaatgcaaagatgagctgggtgtggtaacccatacctgtaatcccagctacttgggaggctgaggcaggagaatcacctgaagtggggaggcggaggttgcagtgagccgagatggcgccattgtactccagcctgggcagcaggagcgaaactctgtctcaaaaaaaaaaaaaaaagaatgaaataaaatttatttatttatttatttttgagatggagtttcgctcttgttgcccaggctggagtgcagtggcatgatctcagctcattgcaacctcctcctcctagggacaagcgattttcctgcctcagcctccggagcagctgagattacaggtgcatgctaccacgcctggctgatttttgcatttttagtagagacggggttttgccatgttggtcaggctggtcttgaactcctgacctcaggtgatccacctgcctcgacctcccaaagtgcttggattacaggtgtgagccaccgggcctggcctgagaccttgtctcttaagaataaaataaaatttagtttgaaaatacttttttggctgggtgtggccaggaatttgagaacagcctggccaacatggtgaaaccctgtctaccaaaaaatacaaaaattagccaggtgtcttggtgtgcctgtaatcccagctactcaggaggctgaggcgggagaatcgcttgaacccaggagacggaggttgcagtgagctgagatcgccccactgcaccccagcctgggcgacagagtgagacactgtctcaaaaaaatggcggtggctcacgcctataatcccagcactttgggaggccaagtcgggcggatcacctgaggtcgggagttcaagaccagccttatcaacatggagaaaccccgtctctactaaaaatacaaaattagccgggcatggtggtgcatgcctgtaatctcagctacttgggaggctgaggcaggagaatcacttgaacccggaaggcggaggttgtggtgagccaagatcgtgccattgcactccagcctgggcaacaagagcaaaacttcgtctcaaaaaaaataaataaaaaataaaaagtgaaaacataaaatctttaaaaaaaaaaatcaaagtgatatgtggttgctataaaaatttaaaccatacagaagtgaagtcaaatatttcttcaccaaaatctttgccaaaagaagcatccactcttcccagtttcttgtggcctgtgtgcacatgagaacgcgtgtgtctgttgtgtaggtggggcctggcctggctcttgtggctgcgtatgttgtggtttgtgtcctgagctaggaagcctgactgagggcaggtggggactcaggtctggctaggtcagcccgcgatgcctgctaccatggctcagcctgtgccctcccaatttccatggaagtgctggagggtcttgtggcagcctggggcctggctggtgtgggaaagtctgtttcccacctttagtttggactccgtgtgtgttgttcctcctcatccctctgctcttttctacttagcttattgggttgagccctggagagggaagcaggactctggcgcctttgtttacccccacttgatctctactctagaaagggtctctggtattcttggcctagatttattccaggcaataaatgagagggatgcggtcagatcctcaggtaggccctgtgggctacacaaagtcatcctgggtggcatcccctgcagctcgctcagtgttgcctgaggggatgtggtaggtggcacctctcagggccatggcaaggctcaggtggatgtgaagggctatggtgggggcgagagaggggccggtgcaagtggctacccagagacttttctctaaggtcatcgagctggttaagaagtatggcacaaagcagtggacactgattgccaagcacctgaagggccggctggggaagcagtgccgtgaacgctggcacaaccacctcaaccctgaggtgaagaagtcttgctggaccgaggaggaggaccgcatcatctgcgaggcccacaaggtgctgggcaaccgctgggccgagatcgccaagatgttgccagggaggtaagctgtcttcttgggggttgggacaggttcccgggaggccaggcccgtgtttctgatggaggagggttcctgggtgggtattgtggtcctgtgctcttgttctgtaacacccagcctcggctccagggctcccagaggcatgcatagtcaggaggaagggtggttccccagggaaggccctgtcttctgtcagcttaaaagaacagatggtgataagggaggcctcagcaagaaatcgggaaccctggagtctagttctcatcctgttcccagctcactgtgtcttcttggttagcctcttctcttcgacttcagtttcttctaacacagaataggcttgagatgtgggatagatgggctttctttaagaagaaaatgatcaaaaatcaggtagtactataatctgctaaaaggtgttttttgtttttctttttcttaaaaggtttaataatgaaaaacatcagtctttgtcaccactctgttaaatgactctactaaaacagactcatctttttgagttctttatctctttaagtgatgtgccatttttcatattgatcctctgctatgggagattagctttcttaggctttcccactccccatatgtccctattgctccaataatgtatgatagttattaaaataataatgtttatggacgggcatggtggctcatgcctgtaatcctagcacgttgggtggctgaggtgggtggatcacttgaggtcaggagttcgagaccagcctggccaacacagtgaagcctcatctctactaaaaatacaaaaaattagcgggatgtgttggtgagcctgtaatcccagctacttgggaggctgaggcagaattgcttgaacccaggaggcagaggttgcagtgagccgagatcatatcactgcactccagcctgggcgacagagcgagactgtctccaaaaaaaaaaaaaaaaatttttttttcccctaaatactgaaagcattccatgatcttttctcctatttttcatctgttttgcttcattttctaggagacttcttatcttctctttttttgaaattattttccctaaaaattttactttctaagggctcctcccttttctggcactctttttttattttttatttattcttttttttgggagaccagagtctcgctctgtcatccaggctggagtgcagtggcgtgatccgggctcactgcaacctctgcctcccaggttgaaacgattctcctggttcagcctcccaagtagctgggactacaggtctgtgccaccatgcctggctaatttttgtatttttagtagagatggaatttcaccatgttggccaggctggtctcgaactcttgacctcctgcccacctcagcctcacaaagtgttgggattacaggcatgagccactatgcccagactctttaaaacagggttctcactctgtcacctaagctggagtgcaggggcataatcatggctcattgcagcttcaccctcctgaactcaagcaatccttctgcctcagccttccaaggacctgggactacaagctcatgccagcatacccagctagttttaaaattttttgtaggggcagggtctccctatgttgcccaggctggtcccaaagtgctgggattacaggcatgagccaccacacctggcctggcaccctattcttattttgtggtttcaatagcttacttctctgtcaatattatattttttttaagaccgaatttcgctcttatcacccaggctggagtgtagtggcatgatctcggctcactgcaacctctgcctcctgggttcaagtgattctcctgcctcagcctcctgagtagctgggattataggcgcccgccaccacacctgactaatttttgtatttttagtagagatggggttttgccatcttggccaggctagtcttgaactcctgacctcaggtgatctgcctgccttgggcctcccgaagtgctgagattacaggtgtgagccaccgcacctggccctaagctggatattgttcccctgttttccatcttatgaaaacttgtaaaaaatctcttactagtggctgtcttctacctgtttctctttgtccttgtgaatttttgccttgctttattttgaatccctttttttgtcatggcagtgtggtcctggcagggagagaaaatgccagatggtgtgttttccccaaagtctgaaatgatcccttttcaaagctcaaacctgaatgtgtcatctttctggggcttcccctgacacttgggttggaaactctggcttctttccccccatggcctgtttggctcacaggtgccaccagcctcaccttgatccactgtcacttgtgcttactcggtgttagctgctttgcctcctttcagtccctcgaaccctgagctcttctcagagctcctagtgctcctctgtcggcctgcagtgcactcccgcttgtgcctattgtgtagctaatgtgttctcatccttcagttctcagtgggggtgctatttcttcagagaagttttctctgttctcccagactgtggttggtctctggtgacctctgtgttgtgcccacacctgtctgcagagtagtgtgtaccccagttgtagctgaagataacattcatctcccctgctagatttaactgtcaatggcagccacttgtcttatttaccagatggatccccagtgcctacaataatgcctggcacacagtgggtgctttttatatgcgagcaaaagaaggagtctcactatagcttggggcaccccagactctggtcttggggagtgggagggctggggaggtgttttgggtcaggttccctggaagcggaacctgtgactcaagagtttcaggtacatgggatctcttggaaaggttctcacctgtgagggaaggagtggagaaaagaagggaaggggccaagcaagggatggggtcttggaaaatagagctttggcctgctataaggccaaggagtgtgtgtgttcacatgtatgcatgcgaggtatgtacatatgaggagggcgcatgtgtacatgggttggggaactcctggggcatcttcggttgtgccttccaagagctgttttttgtttttttttttttgtttgttttttgttttttgagacggagtcttgctctgtcgcccaggctggagtgcagtggcgtgacctcagctcactgcaacctccgcgtcccaggttcaagcgattctcctgcctcagcctcctgagtagctgggattacaggtatgcaccaccacgcctggctaatttttgtatttttggtagagacgggatttcaccatgttggccaggctggtgttgaactcctgaccttaggtgatctgcttccaagggctcttatgcagataaagtcatagtagaagccgtcggcagcatgcccggcagctgggggattggattcgctgtagggacagaggatctgggcaaagcaccaggagcaccccttaccctacacctttgcccagtgagcattgtgtccctgaaggcttagagtgcaaatgatccgaggatattctcttagactgggtgctcagttaagctgttactctctgttcacttttcaaggaaagagtattctgcttggcactccaaagaaggtggtgactactatgtgtcagcacagtacctttgtatttttagtagagatggggtttcactatgttggccaggctggtcttgaactcctgacctcaggtgatccacctgcctcagcctcccaaagtgctgggattacaggcgtgagccaccgcgcctgacctgccgcttgcttctcaccactatacttctatacacttttgtggtactatcccgtccttctgtattactctatgcctttattactacatgtttctctgctactctactctgtgctttatgctactgttctactgtagatgtgtctcctccctgaatcttcagtgagtgatggagtatgacgtagtcttctgaccttccagataaagaaaccaaggcttagggaggtgaacagttctgggccttctgccctctttggccacttatcagtctgtgggaggtgaacaggccttgcatctgaggtcagcgtgagactcagtggaaatgagcagacagtgttgcttatggcttctacacattcgaagtgggcagggaagggggtgagagttccaagcacatatcttcagttttataatttttaaaaaatttaaaattttttttttcatttttatttatttttgagatggagtctcactctgttgcccaggctgtagtgcagtggcgcaatctcggctcatcacaacctccacctcccgggtttaagcgattctcatgcctcagactcccaagtagctgggattacaggtgcctggcatcacgcccagcacctcccaaagtgccaggattacaggcgtgagccactgttcctggtcttatatatacattttttttttttttgaggtggaattttacttttgttcccaggctggagtgcaatggcatcatcttggctaaccacaacctctacctcctgggttcaagcgattctccttcctcagactcccaagtagctgggattacaggcatgtgccaccatgcctggctaattttgtatttttagtagagacagggtttctctgtgttggtcaggctggtctcgaactcccgatctcaggtgatctgctcgcctaggccgcccagagtgctgggatcacaggtgtggtgagccaccgcactcggcaatttttttttttttttaattaaaaaaaattttgttttttacctgaacctgacagtagctggtgccattttataatttttgccatagcctgaatgattcagttgcttatttcacagagcttcgtggaaatgctctgtaaattattagggctagagacttgtgagacttcatcttggaactgaaagagaccttagagttcatctagtggaagattcatttacaggagcaggaacttggcttagggaggttagtgatgtgcctgatggcaccccacccacagagctggggttcaaaggccccctgctgccccctgcaggacagacaatgctgtgaagaatcactggaactctaccatcaaaaggaaggtggacacaggaggcttcttgagcgagtccaaagactgcaagcccccagtgtacttgctgctggagctcgaggacaaggacggcctccagagtgcccagcccacggaaggccaggtgagacagctgctcagcctttggcttggtttgatttcacattcatctgacaccatctcattgaacaccttgtccacagctattggtcagtttctgccacagagtctaaaagtgggctctgtgcttctggggccttgtgagacttctgcacataactggcacttgtctgcctgcagatgaaggatagcagagcaagctgattatataaaactgtgaattagttaaggagatcctcagcctccatctctccttgctggtggccaccttcttacctgttgctcattttaattttttaaaactgaaagcatgtttgcaataaaaaaatcagaggtggctgggtgcgttggttcacacctgtaatcccagcaagttgagaggctgaagcgggcggattgctcaagcccaggagttggaggccagttcaggcaacatggtgaaaccttgtctctatctttttaattaaaaaaaattaaaaaatgtattgagttgtaatttacgtactctaataaacagttttgagttatgacaaagcatacagccatgtaaccactgtcacagtcaaggtatacaacagtcccatcaccccagaattccctcgtgctccttttcttagccttttttcggcccttagctccttgcactgtgatctgttttctgtctctataattttgacttttctagaaattaacaattaaaatcctatagtattacatttgcaggctgttttttttgagacagagttttgctctgatgcccaggctggagttgcagggtgtgatcttggctcactgtaacctctgcctcctgggatcaagcgatctcatgcctcagcaacctgagtagctgagattacaggcatgcaccaccacgcctgactaatttttgcatttttagtagagatggggtttcaccacgttggccaggctgggtttgaattcctagcctgaagagatccgcctgccttggcctcccaaagtgttgggattacagatgtgagccaccatgtctggcactacatttgcagtttttatttatttattttttgagatggagtctctgtcgctcaggctggagtgcagttatatgatagctcactgcaacctccgcctcccaggttaaagcgattctgctaactcagcatcccgagtagctgggattacaggtgcacaccaccatgcctggctaatttttgtattcttagagatgggggtctcaccatgttggtcaaactggtctcaaactcctgacttcaaatgatccacccacctgagcctcccaaagtgctggcattacagacgtgagccagcatgccccagctacatttgcagttttaaaaatgaaatcagtatatacttatgttaacatccactgtcctatataccagagcaaagtttttatttatattttttagctatatctctaaaggttatttttcaaaataaaaatttgggtagggcgtggtggctaacatctgtaatcccagcactttgggaggccaaggcttttggatctcttgagcccaggagtttaagaccagcttgggcaacatggtgaaaccccatttctataaaaaggaaaattagctgtgtgtgattttgtgcacctgtagtcccagctacttgggaggctgaggtggaaggattatttgagcctgggaggtggaagttgcagtgagttgagatcccgccactgcactccagcttttatttataaataaaataaaaatttgaaggccgggcacggtggctcacgcctgtaattgcagcattttgggaggccgaggcgggtggatcacgaggacaggagattgagaccatcctggctaacacggtgaaaccccgtctctactaaaagtacaaaaaattagctgggcgtggtggcgggtgcctgtagtcccagctacccaggaggctgaggcaggagaatggcgtgaacccgggaggcagagcttgcagtgagccgagatcacgccactgcactccagcctgggtgacagagtgagactctgtcacaaaaaaataaaactaaagaaaattaaataaataaataaaaatttgaagcaagcatgacaaaaaatagatttgatgatgccggctgtgtggtaggtaacaattgtcctttgttattttctaatcttttctgtcatggtgtgaactatttaataattttaaaaaatctttttccctcttcttactgggtagagataacttgttgacagttacaattcttccacaatgccctgctagagcgatatattatgtttttgcctctatttcttgaattttcaattttagagaatatctctcgattgcccaatatgaatgcacctatggggtaactttcaaagggcagagaaatgtatcaaatgaaaagtaaaacgacttctttttctggtttcaactccctgtgcatctcttaaccggaggagtctacttctgacaatttcttgtacatctaagtagtatgtgtttgatcttttacttctgattgaagaaaaggtctccgttccacaaagagaaacagcgggcatcagccgactcatagaagactttcagcataggacagagtgaacagatctctagtctcttaaaaactctactgtgctgaaagccagttattgacttggcttttgtcccctgacactttgagtgtctggagtgctggctgtgctgggctgggaccaagccccagaccatgaccctgagcacaggaggtcaatttttttttttttttggagacagagtcttgctcttgcccaggctggagtgcagtggtgccatctctgcttgctgcaacctccacctcccaagttcaagtggttctcctgcctcagcctcctgagtagctgggaaactgggattataggcattcgccaccatcctggcaaatttttgtatttttagtagagatggggttttgccattttggccaggctggtcttgaactcctgacctcaggtgatccacctgcctcagcctctcaaagtgctaggattgcaggcatgagccaccatgccgggcctgtgttgatttcagccttacccgtgtctctccaatgtggtctttctggtgtgctatttatttaactagtttcttactgatgtagataagggtattactggttttttgttattagagataaaactcttaacagtcacccttgtggccaaatgactgcttctttgtgcagttatttcttgagaaattcctagagatggacaaatatatttggtggtggggggaacccttttggctgagtatggtggctcattcctgtaatcccagcactttgtgaggccaagttgggaggattccttgaggccaggagtttgtgaccagtctgggcaacatagggagactgtctttacaaaaaaaaaaaaaagctggtgcggtggcacacacctgtagttccaactactttggagcctggggcaggaagttcacttgagcccagtatttcaacagagtgagactctgtctttgaaaaagcaaacaggccaggcgtcatggcttacacctgtaatctcagcactttgggaggctgaggtgggcgtggtgacacaggcttgtaatcccagctactcgggaggctgaggcacgataattgagaatccacttgaactggcgtggcggaggttgcagtgagccgagttcgcactgctgcactccagccttgggtgacagcaagactctgtcttaaaaagaaaagaaaaaaaacctcttaatacattttgttagattgctgccagaagaattttgcatgttaattcgtgtatgggaccactcccaacttctccactcactggtcagtgcttgctattataaaattgtttcctctgcttcagaagtaatgcgtgatcattgcaaaaacttaacaactttatagaattgggcaatgcagaaggttgagcctgctcatctcaacttttttttttttttgagacggagttttgctcttgttgcccaggctggagtgcagtggtatgatcttggctcaccgcaacctccgcctcccgggttcaagcgattctcctgcctcagcctgccgagtagctgggattacaagcatgtgccaccatgcctggctaattggggtttctccatgttggtcaggctggtctcaaactcctgacctcaggtgatctgcccaccttggcctcccaaaatactgggattacaggcgtgagccaccacaccaggcttaaaattagacgatgtcttactcttttacaactttctttttctatttaacatatcgttccatgttgttatgtgtattcagatctccaacattcctgaatttgccgtatcttatttaaccattatattgtcaaacatctgttactatttccatcaatgctataatgatcatcattgttcagtttctttgtacatttgctgaactgtgtggttgatttttttgtttttagatggggtctcactctgttgccaggctggagtgcagtggtgtgaccttggctcactgcaacctccgcctcccgggttgaagtgattctcctgcctcagcctcctgagtagctgggattacaggcatgcagcaccatgcccagctaatttttgtatttttagtagagatggggtttcaccatgttggccaggatggtctcgatttcttgacctcgtgatctccccgcctcagtctcccaaagtgctgggattacaggcgtgagccactgcgcccggccggttgattttatagatgtggaatgattgggtaaaatagtgtggacatttgaagttttcataagcattgccgaattgctgccaaagggattgtactgtttaatcctgctataggtggtatataggactgcttgtttccagccttattgtcaataccggctatggttatatgaaaaaaaatctttgccagttttaatgagcaacaaatgcattatcatgttcttattttgattgaattactttggagttgatcttttttttttcagctttattaaaatataattgacaaataaattgcatatattgaccaggggcggtggctcatgcctgtattcccagcactttgggaggctgaagtgggcggatcacttgaggctaggagtttgaggccagcctggccaatacggtgaaaccccatctctactaaaaatataaaaaattaaccgggtgtggtggtgcacgcctgtagtcccagctgctcaggaggctgaggcatgagaatcacctgaacctgggaggtggaggttgcagtgagctgagagtgtgcctctgcacgccagcctgggtaacagcaagactctgtctcaaaaaacaacaagggctgggcgcaatggctcacgcctgtaatcccagcactttgggaggctgaggcaggcggatcacgaggtcaggagatggagaccatcctggctagcatggtgaaaccccatctctactaaaaatacaaaaaagaacccaaaaaattaaccggtcatggtggcgggcacctgtagtcccagctactagggaggctgaggcaggagaatggcgtgaacctgggaggtggagcttgcagtgagccgagatcgcgccactgcatttcagcctgggcaacagagtgagactccatctcaaaaaaaaaaaaaaaaaattgcgtgtatttatggtgtgcaatgtgatgttttgattcattgttttggttttcatttcttttactattaatgagggtgagtaacaaattaccccttaatttgttaatttgttatttggcttggttgtctttttttttttttttttttatcttgttactggtttgtacattttatttgtatattaaggatgctactcctttatcatgtagtaactattttttcccagtttggtagctttttttctttattttataaaggtataatttacatacaataaaattcactttttgtttgttcgtttgttttatagagatggggtttgcccaggctggtctcgaactcctgggctcaagggatctgtctgccttggcctcccaaagtgttgggattacaggtgtgagccaccacgccccgcatattttttttttttttttttttttttttttttttttttttttttttgagacagagtctcgttctgtagcccaggctggagtgcagtggcgcagtctcggctcactgcaagctccatcttccgggttcacaccattctcctgcctcagcctctcaagtagctggaactacaggcgcctgccaccacacctggctaattttttgtatttttagtagagatggggtttcaccgtgttagccaggatggtctcgatcctcctgaccttgtgatccgcccgtctcggcctcccaatgtgctgggattacaggcgtgattttttttttttttttttttttaaatgagcagggtcttgctctgtaccccagactgtagtgcagtggcgtgatcatagctcactgcaaccttgaactcatgaactcaaggggtcctcttgcctgagcttttcagagttctgggattacaggtgtgagccgccacacccagccccctcccccctcccttttttttttattagagtcttgttgtgttgcccaggctggagtgcagtggtgtgatcatagcccattgcaaccttgaattcaggaactcaagggacccaattgcctcagcctcccaaagtgctagagttacaggcataagccactgtacctggtctttttattttttaatgtttattaagcattaaaaatttattttttaatttttttgagacagagttttgctcttgttacctaggctgtagtgcaatggtgcgatctcagctcactgcaacctctgcctcccaggttcaagcaattctcctgcctcagcctcccgagtagctaggattacaggtgcctgccaccacacctggctaattttgttttgttttgtttttagtagagacagggtttcaccatgttggccaggctgatctcgaactcttgacctcaggtgatccaccagcctcgacctcccaaagtgttgggattacaggcgtgagcctctgcacccaacctctgtgtattacttctttcatctgagccatttgagagttagttatgtagcatagattcctaagaataaggccatttgcttacataaccacaataaagttatattcaatccagggaatttaagcctaattcaggatctttatctacagtttatattccatttttccctgtccatgatgcagtctaagaccagacattgcatttagttgtcctatccctttagtcagcctttcttagtgtcatgatgttgacattttggaagtatatggtatggctaattattctgtagaatgtttctctatttgggttcatcacagtttccttcttagattcaggttgtgtggtttagctggaaactactatatagtctatatctcagcgaaatgcaaatggtgtattcttgtgtcttacagggaagtc

SEQ ID NO: 291 - DNA, 4381 bp, Homo sapiens
  source 1..4381: mol_type = other DNA
agccattgattggtcgacgcccccagagggttacaattcaaacgcgggcgggcgggcccgcagtcctgcagttgcagtcgtgttctccgagttcctgtctctctgccaacgccgcccggatggcttcccaaaaccgcgacccagccgccactagcgtcgccgccgcccgtaaaggagctgagccgagcgggggcgccgcccggggtccggtgggcaaaaggtgagtgatgcggcctaccactcgccgggcctgccatgccctaggcattggtacccagagcaaagatttctaggaccaccccccgccgccacctcctggagcgggagatctgcgggtgcaggagaacacaccaggagctcggggcctggcattcccctgggcatgggtgtcgagggcggagacttccgggactcccacctccttgcgcgggtgagattcgagagatgggggacaggccaggagctcagaccgctctttgagactctcccgaaggagaatgggagggtaggggcgctgccagactccttccctggtgggcctagatgaagacgctcaaggaccctcgtgacttggccgagacaggggaagggagaagttgagtcgggcaaggaagagatgctaaagcctggggaattaagaacatgccagaatcatcccgagggagtctggaattagggagggtgaggactcgctaggatcgtcctgtggatctggtgagtataccctgagctgagcctgaccttggtgatgtggggagcctccatgacggctccccctgagattcaggtgggagaagatgcaccgtctggaggcctggcccatccagactcccaggtaaccccgaatactcttttttcaggctacagcaggagctgatgaccctcatggtgagtgattaagtgcccagaaccccagccttccatccaattttcagtagcctccttttttccgtcagcttttttgctagacataggggtaatgtaatttgctccctcctgggaaagaagttcatacaccccacctacaccatttcttccagcagtccctcctcccaattccatccccccacacgaagttatctcgaacacttccctgaagtcatacaagaccctccctatccagtgtgtccctacttcctagccccaaccaagctttacccacacccaactccccgcccttcttggtatttctagcctatgaatttggttgctttattttggatcagagtgatgagattaaggggaggctgggcgcggtagctcacaccttataatcccaacactttggggggctaaggtgggcggatcacttgaggtcaggagttcgagaccagcctggccaacattgcaaaaccctgtctctactaaaaatacaaaaattatccaggcatggtggtgcatgcctgtaatttcagctactcgggaggctgaggcacaagaatcatttgaaccgtggagacagaggttgcggtgagccgagcgcaccactgcactctagcctgggcgacagagtgtgtgtgtgtgtctgtctctgtctatctctctctctcaatctctctctctctctctctatatatatatatatgtaaatatatattttttagtagagatggcataaccccatctatatctcatatatatacacatatatatgtgtgtgtgtatacatatatatgtgtgtgtgtgtatgtgagcatatatatatatatatatatatatatataaaattaaggggaaagctcacccactgacctttgctatgcccaaaagtgtactccacattccaacaaatgtgttttctccccagatgtctggcgataaagggatttctgccttccctgaatcagacaaccttttcaaatgggtagggaccatccatggagcagctggaacagtaagtgtagggctgggatgggtgagtgagtctggggaaaggtgggaagtgagatccaagtgcgagctctgcttcaagcctttggcggagcaagacactcctcctgtgactgtttacattctctgagccatgtggccttgttctttccctctgtgcaataaagggtgggtttaaagcagggctgcctatcttagatgtttacatggggggacagacagcaaggaaatggatgaagtgaggactttggccaatagggccagatctcaagaaggcagcttcccattgctgcagatcaggtttaagatgagtcagaagtccaaatctgtgccaaatctaatttttacgtattagcaactaatattcttttttttttttttttgagacggagtctcgctctgtcgcccaggccagactgcggactgcagtggcgcaatctcggctcactgcaagctccgcttcccgggttcacgccattctcctgcctcagcctccgagtagctgggactacaggcgcccgccaccacgcccggctaattttttgtatttttagtagagacggggtttcaccttgttagccaggatggtctcgatctcctgacctcaagatccacccgcctcggcctcccaaagtgctgggattacaggcgtgagccaccacgcccggccagcaactaatattctaattgaactaaagcacaggatgccaatttacaatccttagaccaaagagtcactgatgtctccaccagataagaggaaagcatcaggctaggcatagtggctcacacctgtaatctcagcactttgggaggctgaggcaggcagatcacatgagcccaggagtttgagactggcctgggcaacatggtgaaaccctgtctctaaaataaaaactaaactaaaaaaactttttaaaaaggcagtggggagcatcagaaccagctcaacagtttgtctactgtccggtcccagagaaactcaagattctagcaagccccttgtgtggggcttgggttgggacatgaggctgctgctggagcttactctgcaactgtttctccaaatgccaggtatatgaagacctgaggtataagctctcgctagagttccccagtggctacccttacaatgcgcccacagtgaagttcctcacgccctgctatcaccccaacgtggacacccagggtaacatatgcctggacatcctgaaggaaaagtggtctgccctgtatgatgtcaggaccattctgctctccatccagagccttctaggaggtgactttagagaccacccctcccctccatgcaacttgggaacctgtcaggactccctggggtcagcctcttctaccgccttgaccttctctttctctccacccacagaacccaacattgatagtcccttgaacacacatgctgccgagctctggaaaaaccccacaggtgagtcctcagtccttgagcccagggtgatccctcccccaaccttcaaaggctccctcaaacaaaaggagcccagtgacttgggaccgggttggttggggcagggtggagtgtcggcagcaacccacttctgtttctgccccagtgctcctatttgctataaaatagcaattgttttatagcagaataaaaatgtttggcgataaataattttgggaaattattggtgagaccaaggcaggaggatagcttgaggccaggaattcagtagagtgccttgcctgtgccctccagtctcactggaagcaagcccttccaggagagctgcctagatgggcagtgcagggagaatgccgggctgggaaaccagcccctcctccacctcctccgacctttgcatccctggtccagctgcctcttgcccaccttaattcatcctgggccaggcacagtggctcatgcctgtaatcctagcacttggggaggccgaggtgggtggatcacatgaggtcaggagtttgagaccagcctggccaacatggtgaaaccccgtctctactaaatacaaaaaaaattaaccgggtatggtggtaggcacctgtagtcccagctactcaggaggctgaggcaagagaatcacttgaatctaggaagcagaggttgcagtgagcagacatcatgctattgcactccagcttggtcaacagagtgagactccatctcaaaaataataaatagtaaagattaactcatcctgtctccatcactcactgagacctgcctgttctcttccagcttttaagaagtacctgcaagaaacctactcaaagcaggtcaccagccaggagccctgacccaggctgcccagcctgtccttgtgtcgtctttttaatttttccttagatggtctgtcctttttgtgatttctgtataggactctttatcttgagctgtggtatttttgttttgtttttgtcttttaaattaagcctcggttgagcccttgtatattaaataaatgcatttttgtccttttttagacaa

SEQ ID NO: 292 - DNA, 11990 bp, Homo sapiens
  source 1..11990: mol_type = other DNA
aagtccaagaggacggaatgtggagacagtgttgtatttttgcggggagttctaggccgaccgggagcgagagaacgctcgggggcgaagcgcgccattgcggccctccccgccgcctgcggtagtccagtcccaagatggcggccaccatgaagaaggcggtgagtggggagctcggggctctggatgctcgggcggcgccggatctcggccgctggggcccgggcgcgggatgctgggggtgcgcagctccgaagcccggcgtgggacccgaggccgaggccgaggccctgagagcggtcccgcggcaaggcctgctcgcgcctggcgccctgagcgttttcctaggcacctggccagccgaggcggggcgccggggctggggccgggagcctcgaaggacgcaggtccgcctcccgcgatgccgagggtgcccccggggagtctgaggaacctgcagccccggcctcgcccctgaggtgtgggaagccgaaggtcccgttgagtgtggttggccttgactcgggcgttgcaccggcatgatcgcattagcctcactggttatgggtagctgctgctgggagcgtggttacgggtgaggaaactgaggcccagagatggggagtcacctgcccgaggttacgcagctcataacggggacagcaggttcctgcatccccagattagcaggccccagagaccctgtgtccaacctggagctgcccatttccacgcttgatgcccctgagtccttcaggctaaaaccagtatttattgagaatggaagatgtgccgggcccagcagccggccgtttatctgttatcctccccgcaactcagcaagtgcaatgggttcctctccactttgcaggtagagaaacttagacacagagcagttagaggccctaaagtgactcagctagtaagaagcagagctggagttcaaactcaggtttgtttttgtttttctcaaagcacgcctgtgtaaccactaagccggctaaacttccatgtggggtttttaatcccgtgagccttcccagatgtgtaaagatagtcagatagaagaaaaagaaaattggagagggggaaggagataacggctgataatttggggagctttacagtgtgctaggtacagctgtaagttgttttgcgtgtattgtttattttatgttctttgagggagatactgtttttatccttatttaacaatgagaaaacaggcgcggaggcaaagctagcatttaaacacaggcattctgactccggagtctgtgttttaaactgctatagggggtctttgatgagaatctcttggctggagggatttgcgttcattccacttttaagaccacattagaacttctttgctttgcccctatccagtaccacatagtctatgccatctgtgcctggtgtagggtgacccattgcccccttttatatgaaattgagggactgccaaaaatgggaaagccccagccaactcaggatgtgttgctcaccctactattctgccatccaaaaattcttactgtgtcccagagtagggtctagggccatggtgattcaaaaaagtatgaaactttgtgagattcacttcacctctagtttgttaaattgggccctctggtgttaggtatggcctttaattccttggaagatactagttgtggttcactccgttttataggtatggaaactgaagtgcagagaggtgaagtaaatggtagaagaggaaatggcagaagaatgatttgaaccttggattttgattgcaaaatttctaattaccaactttttttttcctttcattgattcagtaaattttcgggggcacgtaatatggcgtagtctcagttttaagtggagacaactgtggtgaccagtgagaaagctcttctccccttaatctcatagccccaaagaacgtatgttccagggcagagcaggcattactcagatagtcagacagaaaactagtttctctgatgagaactgtgaaggaaaagtgcttatgaaatgagggccaaaatgaggtctgttttgagatcagagaagactttcctgggaaagtgccatttaagttgagatctgtgagattatgtaaggaaaggaagggagagttggatagggagcgaagcattctagagaggagtatctgcagagactctgagtgcatttaatacaaggaaggcccgatggcagataatcaggggaagagagtttgagccatgatgggaaaagaacttatagaggggtaggtggtggccaaaatataaaggagcttctttaactttggaggctttaagagtcacatgatagatgcagtgtcctcctgtagatgtttccagtgttaggaacaattcccgatagattagcttgcatgtacacttttcccctttgccctcactaggagaaaacatatgtgtatgccagtgagtgagagtgaaacagagagagatagccctttgagtttaattaaaagcaaatcgtacaatctggagtactttacgtttgtaacacatcgtatctctcaactggtcatgactttgctggggagagtgtttagatgagatgattcagtcctctcctctctagagttctgccttctaagatccagttcttgaccataaggagatctgcactttgatttctgttcattatcctatatacaaatgtcctttcctcagagaggctacctttgacctttatctaaagaagcctccttcactccccaggcccccaaaactttctactcctaagctgttttattttcatcatcacgtttgtcaccattgaacattatcttgttcatcttgttttttgctctcttcctccaccaggatgtatgcttgccatttgtattcatgaaagtgggatagtggctctcttgtcacagtgcatggcgtataggaaacagtaattgttaaataaactactgcatggatgaaagttgaatacaaaaattagctgggcatgatggcgtttgcctataatcccagctactcgggaggctgaggcacgagaatcgcttgaacctgggaggcagaggtcgcagtgagccaagatcacaccactgcactccagcctggcgatagagcaagactcgtctcaaaaacaaaaaaacaaacaaagaaggttgaatacaaatacaaagcaaaagtttacatcatacagacttggtagatatgtttttaaaagtaaaaataaaagactgaaattggccagaatttatttctagggacccagctgtcagtgcagactccgtgtaatacctagacttggtgtgaggcatgactgagtatggttcagtttcctcctctaatcccgtaagatattagttctcaagaaaagagcccagggaattttaatttttactttggatcccgagcaggcatatttctctttggcctagcagaatttctttctagatctggatctgttctttgtaatgatttttgataaacaatattcaggatgtaaaatgcttagctatcatttgactgactccatcatcaggctttctcctacatgttcattttatcaaccctataaggtaggaactagcctctccattttacagatgagaaacctgaggtggttccaaagaattgggtaatttgcccaaggttcctgtttgcttggattggattgcagcctgactcttcccaccactctgtgtgctgcctcagatactataggatatgagttcttcctagagttcttctgactttgagagtagctacagctggtttccctgaaggcaggagttcctaaccttttggggttgtggatccctttgagaatctggtgaaagctatgaagaccttccagaaggatgcacatactatacatgccattttgcatacagtctctgggtatatcgacctgtcaatgtccattgaccacccccaccccccagttaagaattacccacttctggctgggcgtggtggctcaagcctgtaatcccagcactttgggaggccgaggctggtggatcacctgaggttaggagttcaagaccagcctggccaacatggtgaaaccccttctctactaaaaatacgaaaattagccggacatggtggcatgtgcatgtaatctcagctacttgggaggctgaggcaggagaatggcttgaacccgggaagtggaggttgcagtgagccaagatcatgctactgcacttcagcctgggcgacagagtgagactctgtctcaccaaaaaaaaaaaaaaattacccacttcttgccaaaatgcagcttcaagaaatgtaggaatgttctaggacagtgagactaaaacagaagcctctgttagccatcaaaggcactgacatcttactgtctgctgtaaatggcactccactgggcggcatgcagtatatttgactcacacatcaactttagcccttaaccccagtgggaaaaccactgtaaagatctggataccaggggccacatgtgtgctgatgcctgtggtttggtggggctacaacaggaaattcctgctttggaaagacagaaagcagatagccaaattctctctaccacattttggaaactatgtgtttgagtctgatcaagcatgatttagattcaaattcagaaaccatgtattagccttagttatgtgccaggcagtcctgcactggatccgttcatgtgaatggctctgttgagccctcaccaagacaaatacatctataaatgcctgttgggggttcaatatttaaacaaaatggcatatactcttcaggcaaacaggaactcttcagaattctctgctgtctatttgcgtagggaattgacagttctcacttaggcaaaatgacttgtgtgccaagatatagactttggtttcttgagcgtagctcagtgttccccaacttccatattcatcaaaattatgcatacggttgaacactcaaagctagacatagtgtgatgtaaaggattttttcaggctatcttctgggttgttgaggtggggcataatgcatgtgaaattgtttcttggaatgagagcctaacaaaggggaggactgtgttatattccgaccactgagctctgtattgcttgacactgcctttcaacctctgagaaataaaagttcacataccttaagtcgatggtcatgagagaccaggtcagggatggagtgtgaatgttgtgagctcattactgttactgcaaaagagccaaaagtagtgtttcagtatgaactatttttatacacacacaaatatcttttcttctttaaactagaatcaggtgctctggttttcattttataaatggaagggaaaccctaaggagagtctggttttatgttttagctttattttttaaaaatatatggtacctccttgagaatctgatgaaagcagacatcctgctgcctcttccagatgtgcctaagcctgtgtacacactcacacacacacgtgcacactcacagagacgcacgttcacattcagttaccgagaactcatggacctgtctgacctctgaagccagtctgcctgggttgaaatcaagttccaccacctactggctctgtggctttggccatattatataaagtgtacctcagtttctcaatctgtaaaatagtgctggtgatcctccctaataagatggattgcaggattagcagagataataaagtacttaggaagttttggcacatagtaaattcaatcagtgttagctatttttttattatttcattggtactttatgttatccaagtactctttatttgcaaatttgtaaatttaatcacattaaatattaatttttaaatactaaacattcaattttcatcattttttagtaaagtagaccttattaagacatttaaacaggtcctacattataaacataatttttgctgtgaatggaatagagccactgaaatgtacagtgaccctttagccagtaagctcatgcaagttttagctctaagaaaaaaaaaacactactctgagacatttaccaatatatttgaccatgtaactttttgtttcctgggtcatcttaatgaaagaatgctccaacttgagaaattctgctctgtgccaaaagttggctttttttctttccttttaaaaggacttattaattgttctttatgtttgcaatatgtttatagcttaggaattattttatggagtatcagaaaaggttatagatttacaaacaaaccttaagcttgtggagcaaaaaataaggcatttgttatgttctgtacttcttgtgattcttgactatatgagtgcaaatggcttattgagttattgttgagaaatataaaaagctaactgataacttctccgttaaaattttacaaaaacttaaacacttctttcaggctgcagaagatgtcaatgttactttcgaagatcaacaaaagataaacaaatttgcacggaatacaagtagaatcacagagctgaaggaagaaatagaagtaaaaaaggtattgaaaataattattagaagaataaaatttttttatactatagctactaaaactgaactcagttaacaagtgaatatatatttctctgggctgtttgttgcagatgaatgacgcgatccactctagttaagcagaaagtcattttttttttaagggatatgcgataacttacagagttgttgaggagcttgagtctagaccgaggttccaggaacaagtctcggagaacttggctggcggtggaacagctgttgcctccactgatcccagagtcagctgtcttcccaatgaggaagccacccttgcagacttaggaacaccaagctgctgctgccagtgccacctaccccagtaaatctggggcctgtgtccagccgtcccccttgagttgaaatccagctcaaatgcatttgattggtggaattgaagttattatcacttatgcatgctggcagaactttcattacccgcatgatttacttacaccctatcagcaagcaaggctgagaaatgtaggctggtttttttggttttgtttttgtaggaaggcagaattcacaaagtcaaaaattgttaaaatagaagaaattttgagtgaccatgtgcctgctgtccaccacagggcgcttattgtccagaggacaaagctttaggtagctctaagtgcttgcttgtgaaatgtcttctaaaaagttacaaattaaggtcttattctaatgtggtaataatacctttgtgagagggtccctcagagagttgctgtccccaaattacaattggcctttagcttctatcagagaactttgagtacattttctttgccattttgcatttatagaaacaactccaaaacctagaagatgcttgtgatgacatcatgcttgcagatgatgattgcttaatgataccttatcaaattggtgatgtcttcattagccattctcaagaagaaacgcaagaaatgttagaagaagcaaaggtatgttaaaggttaattctgaaattagaatttatatcactataaagaacatgtaattatagatgtagggaaatagtagatgctagctatagctaatatttactgccttgttatgtcccaggcatgctccgaatgctttgccagcaggattttgttgaatcataacgatgacctgttatcccaatttagggacaaagaatagaggcttagagaggttatgggatttattcaaagtgacacatagacagtggtcttctgactccagaaccttgctcaaaactaaaagtatttagaaggtatagcatatattgaagcagaaaagaaaaatcccctgtaattctgctatgcagaggtaaccattcatagtgaacattttcctgtatttcttttatgttctctctgcctctctccgtgtagtttgcttcccagttgggacaattaatgttccaggaggagcatttttgctggtttcattgaatgtttgtttgtccagcagatactcattggaagcctgctctgagcctggcacacaggcctttaaaaacatcgtttttgaagactgtttaatatcatgttgatggttatcaattggggtcacgggtcttattgttagcattaatttgtttccaatattttgctgtactaatgttactgtgagcattcttctacataaatctttgttcacatttagaaaattgttttgaggaaataattagagaaatataattactgggtcagtcagcatatgagttctctgataatatctgagacatttgatacatggtatgaaattttcagttcacatgccttcttactatttgggagggacagccacgttgtttgtctatgagaagcagatggcaattaaacctttcctaatgcttttgctaattaacctgattgcttaaaatgatagtctctcttcaaatgtcataaaaagcaaaacttcgtatgaatgaaacccacatttagtaagtcttcagaagaactatcactcctgggtctttccatgcataaatcttatatgtctcccttatgtttaaatcttttcttcttggtcaaattttgtgatttttgttctttttatttgtttaaccatttaaaaaacatttttattggaagtattcccagatagcttatggtttttgtggctattgtgaatcccctgccccatacacagatagctactgaacttttattttattttatttatttatttatttatttattttttgagatggagtcttgccctgtcgcccaggctggagtgcaatggcgcaatctcggctcactgcaacgtctgcctcctgggttcaaacaattctcctgcctcagcctcccgagtagctgggattacaggcgcccaccaccacgcccagctaatttttgtacttttggtagagacagggtttcaccatgttgggcagactggtctcgaactcctgacctcgtgctcgtgatccacccgcctcagcctcccaaagtgctgggattacaggcgtgagccaccacacccggctgaacctttctttttttactcattctagaattctagaatgaatggagtgcttactctgtatcaggttctgccatgtactagggataattggggacaacaaaacctgcctggcccctgcctgcatggagcatatagtctagatggaaagaaaaaaaagtaaacaaaactgataatgagtagaaagtgatatgaggatagaggtggctttaagaacacaggaagaggaatctacactagtctggacatcaagggtcagggaagggctcccagggaaagtgatgggataacagctgaggaataagtggctattagccagaaaggggcggcggggggcggggggttctagtcgtgagaagcaacatgtgtgaacggccataggatgacggtggtgcaaacatagacctgcaagaagatgtatttgctggagattgggagcacctgaaattgtggccacatcttggagaactccagtcagttgagttgaagaaattgtactttgtcttagcaggggtcagcaaactttctgtgaagggccagaagtaaatacgttaggttttgtgggctgcacagcctctgccataattactatgaaagcaagatgagtgaatctgcgtggctgtcttccaataaaacttgacaaaaacaagcttcaggctagattgggcctgtgggctatagtttgcccactcccgtcccagagcaaagaggagccttcagagatttttggaaaagagagagatgattggacttgcgatattaaaatgactttctagtgtcttattttacttattaaccaggttttctcggtatagaaatttagaatttatccctttctagtagccatatgtcttatttttgtttcttgttttgtaacagtgattctcaaacttagcatgcgtgagaatcacagtcaccacagggcttgttaaaaatccaggttgctgggcccgacccaaagacgatctttcaggtgggctgaggtagggccccagaatgtgtatttctaacaagttcccaggtgattttgtccctgacactggtctcggggccaccgtttgagaaccattggctagatttctaaaacggcaacactgtcagtattagatattctttggtttctaatgttagtgggtatttggtttgtgtgatttcatatttttttgtcatgtttaggaaaaaaaattgttttgatcctagccaggaaggaacttaatggcttttttttttttttttaaaacaaagagtatatgttaaaatttatttaatctattaatgagggaagcattaacattacaaaactggttttagaattgaagaggctaagtatctatagataggtaggtagaaagaattgtcctttggaattgtattttcttttttttaattataaattgacaatttataattgtataaatttatggtgtaaaacgggatgttataatttattaatacaatatggaataattaaatcaagatagttaacatgtctatcacctcaaatacttagaaaatatctgagttttcactgggcaaagctgctctttcttacaaatgaggcactttttaccactcttttccaaagtttagctccagaggcctcaaagttagtgaaaatttctgccagatttggatcataagttgttcttcttaattattggtggttggtggtgtgagtttctatcatttcctgtagtctcatagttatttttgttgttggaaaaagctgggttagaagccagcaggcccaggataaactatttatagaagtctttgtatttggttctttgttaggaaataatttagacagtaattttttactattttttagatcagcagaaactgagaaaacaaacttgatttattctgtgataagcagatatggaccatgaattaaaaatgcccacattcagacatttagatctaattatcagtgttacttagctgcctgtccaagtttagaaggttcttgacctaaaattcttcccaaatattatttcagacacagatgctcagaaatcatcctattgaatagaattaatttaaaatattttttttccagaaaaatttgcaagaagaaattgacgccttagaatccagagtggaatcaattcagcgagtgttagcagatttgaaagttcagttgtatgcaaaattcgggagcaacataaaccttgaagctgatgaaagttaaacattttataatactttttttatttgtttaataaacttgaatattgtttaaaatgataattttccttcttcaaatgacatggaaagcaaaactttcttttttaaaaattttcatttatttaatggaaacttgcccattttcacatgtctgcttatttattttatatttttaaaagaagacagtattcacctatgtattttgcataacgattatatcaagtctaggggcttcatgtcatgttattaaaatcagttaagcaatcttttatgtttctatattatttagaatatttgttgttgcaattttcacataagaaaatttaacagttgtgtcatgttgtttctgtctgattttaattgctgtctaatgacggggaaagcacgatgaaaagatgtacaatcctgcatccttgcttatttcacaactaaagctttgtcatagacttcaaaatatatatgtatatattttatttaaatatatgttacatattatatttaaacatacatatttaacattttttacatatctatcaatatcagagatttgggtaaaagaatgggtaatgtttaaacatgtggaggcatgtggagctttatacaaacagggcagaaccacagaagaacgttttagaaaccaagagatgtgcagaaagaaatgtttagtgttttttcgttttaaattttagattttattttagtgctttgtaattaattggggtttatattgataaagatgtggaagttaaacagctatgtatgtaaaagtaaggcttatttcttaaataaaggatgcatttcttccca

SEQ ID NO: 293 - DNA, 32744 bp, Homo sapiens
  source 1..32744: mol_type = other DNA
cgttccagggcggctgctcacgggtggccgcagcccagtgctgggactcgcgcggctcctcctcttagccccccaccccttcctcctctttcctcctcctccttcctcctcctcctcctccttcttctcctccttctcggccgggaggaggcagggctggatccctcagccgccgccgctcctcctcctggcaggccggccgcggagtcagctgacgccggcgctccagcctcgcctccccgcgccgcgctctgcgctccccgaaagtggctgcaagccggccgcccactgtcagggttggggggacagagaaagtgatgtgcgccttctaaagcctcgcccagcgccgccgaagcagcttcacctctccaactttctcccaccgactgcttgtcttgaccctgccctccaccctccccagagccacttcgggtgcgcgctcttgggtaaagggggggtcaccggctgtctgggatggcttccaattttaatgacatagtgaagcaagggtacgtgaggatccggagcagacgcctcggggtgagtatcgatcctctccgtgttgctgttcgccggttcgattgtctctctcttgagccagcatccctggagggtggacggagagtccccggccgcgcgccggagaattgcgcggtggctttctcagccgaaacccgcgtctccggggctgtcactgtaaggccagcgtctaggtatgtaatggatctatctttatctcttggatgacttggctttctgatggtggccgcgtgttgggcttcagtagcccctggagcccatctactcgaaataaatatttctcggtagccatggaagttggagctgagaagcccgggcgggggtgcctgccggatgcccccggttcccctcttttcccactcgccgccaacttaacttttccgggggatggatcggctggttgagaaagaggacacgcatactcggtgtgaacgaggtcacgaaccctctgaccccagggagagatttctgccaagcgtaaggtgtctttggatccccccacctctgtcccaggtgtcgtgtcaaaggcggtgcgggctggcctctggtcggggccaacttgggtagatacttgaatctggattttccgtggttcgaagccggggtggtggatttctgttgctggaatacaccctggaggtccacggaagggttatttacgtggaacctgatacctggcatagcgcaagtgctccctacatatgtcctgaaaggaagaatgaatgaatcttagggcacttgggacagatgttgacacaggctagctccttccttaaaactccctctctttcgcccctttctctcttggctcttcgctggaggaggcttcaaaagagaacctacccttcctctccttgggactgaatgatggtggaagaattcttgagggagagggaagatactggaacgatttttttatttcctaaaaatttcaaactaggtccctcatttctctttgcctcctatcaagtgttgtcgctgttttagttgatcctgtgcgtttggacataaggggtgaaaagtgggggtggagaggtggcgggggcggggggagaaaatatcctttggtgtaatgcctgaaataagtataatgtcagtaatcgtgtggaatgccgccattgataatgagtggtaaattgaatagctttctttagaaatatgtgtcatttggcatctttctcttacttggtctttggactgttttaatgtgccagatacttttactgaaaactgaaaagaaatttcacagtagtaaactcagctagggagggaagccctgtggggaggaacatccgcaattattataaaactcttgcctaattcgttttggtctttttcttttctttttctcccctgctggtgaccatgttttagcgattatgtcctgtgttattgtgaatatatacatatgtaattagggagaaatgtaacagaattcaccatttccatcagctctgccaaagtttccttggttttcttttctgctatgcaaatattctcatcttcaagagcacccattgttgggggtactttactgagtgactcccatgtaaggggcaaacaataatgggaactttctatttttggtatgcttataggctggccaagtgttacaattttaaggggagttaagttaaaaaaaaaaaaaacccagcattctaatttagctttactccatcatgtcaatggaaggaattggtatgagacatccattctgtgttagggagcattccaatgggaagaggacatgcattattaatgcacaaaatatgaattattcataaggatcagagtttatgccaaattgtgacacatggtaatttatttgaaaaactggttaccatcactttcttgtttgtggtaactgagattattttttctagattattacaattgacacaacatagccctatgtgtgtgccaacatttatggacagatatttgaagcagaaggaacagaaatatttagtttgtatttgttttatgttttacagcattttggatgctaatgagcagtatactttctcaagatttattctttttgtctgtgttcacgttcagacttcagaatatctattgaattatggttattgctcatggagagaaaaggtcaaaaatatgatcaagtaaatctggtcttatttgttagcattggttttctcaccagttaatttttaaaatattcttatggtatgatttacaaaagaggctgattacatagttgccagaacacagtgcaaaccaaagttttaatggaggctgcaaatattggtgaaggatgctgtacggaattggcatggggaccctatgtccacagtaaggaatgttagcggtattaatctaggctacatatagtctagaacagcatgcgacatgtatcttctaggaatatgtgccagtctcaaagagaggtagggcatttattttgtctagcacagagtagacacttggtaagttcatgttgaaatatgtgctgaactatatagtgcatggatggtcttgccatttataacctttaggaactaatacaacagcatttattaatggaatccagaccatgtttgggacggtttataattaaatacaaaaacatttcatggtaagcagctgttcctggtgccaaggaataaatgcttcttcagatttggagaaagaggagaagggaacgcattctgcttctattgcttgttgacctttgacctttcttggcctcagtttcctagtctgtacaatgaacactatttaatgttcttgggagcattaaagaagatatttgtgaaaatgcaatgaaagtctagaacattgattctgcttgtatcattttctttaatcaaagatgagttaggattggtagacggatataggaattatctatttccttctctttctatgtagaagtgtacaaaggcataaatgtttatgcagctccagattttttcaatggatgaaacttttacaaattatatacatatatgtgtatgtgtgtgtatttttatacataggaataaatatatacatacaacctatgtacatattgtataatatataatatacgtatatttatatatgtgattttttaacaggacaggaaacattctaaaaacattcccattcaaatgggtcacagataagtggtcaccttcatttgaaatcctaaagagtttaaatgattaagcaatcaaatatgtatagatttattctcttctttagacatcaaaaagcttaatgaaatataattcatttaactcaaaagtttcagtatcttcacatctgtattccccagcttaatccccattgtttcctggaggtctccagctgtgccctgggtactgaatttgttcaggaatgtcgacgttactatttgaggggctgggggaaggaggggagcagctgtccataattatttgagtaatcgattaaatgcactaaaaatttctttttaggggagaggcaaatcaggcaatttgtacaacattaacctgctgaatgtgtgacttagatagcatcatataacaattctcacttcgtttctttccttgcaatggagatgattttccaatcaatcattgtcatggcttgcccacagtgcaagtttcagaacggaaactcgggtttatttatctacgcacaatccctcagttacttgcctttaagtgacatttctgtgctcttgtctaccaaggacttagcagcttggacctcttttctgacctccactcatgtaaattctcctgtctatcccacatctccacttggatgactcacagacctgctgctcctagagtcctctccatcttagccactagaggtcccagcattttggttgcgaaggtaaaaatcacaagcgaaccttggtgtcatttcactcttctcccctcatctcccacccctacaggcaatccatcaggagatcttgtgggctgtatctttgaaatatatctagaatccggctgtcacctcacgctatccactgctacgaccctggtccgaaccctcctcatctcctccctgtaacattgcaacagtcttctcatttgacttcctgcctacactcttgctcccgctagtgccttctcaatacagtaaagtgttcctttggaaatgtaagaaaggtcatgtcacctggctgctgaagctgtcagaggcgtgtgaaccagagcaactccatcttgaataggagctgggtaaaacaagactgaaacctactgggctacattcccagacagttaaggcattctaagtcacaggatgagataggaggtcggcacaagatacaggtcataaagaccttgctgataaaacagtttacagtaaagaagccagccaaaacccaccaaaaccaagatggccatgagagtgacctctggttttcctcactgctacgtggcgctacccccaccagtgctatgacagtttacagatgccatggcaacgtcaggaagttacccttggtctgaaaaggggaggcatgaataatccatcccttgtttagcatatcatcaagaaataaccataaaaatgggcaaccagcagccctcggggctgctccgtctatggagtagccattctttatgcctttactttcctaataaacttgctttcactttacagacttgccctgaattctttgctgtgagagatccaagaaccctctcttggggtctggatgagaacccctgtctggtaacaaaaccattggtgactttccatatactgcagagaagtcttacaatgggccatgaggccctatgctgccccagaaccctctcgttcactgttttctctgcttggaatatgctgtttccccagttacctcctcctggcttgctctctcacctccttcagccttttctcagctcctaccctctcaatgaggcctttaaggcctccatctatctatctatctatctatcaatcatctatcatctatctatctatcatctatctatcatctatcatctatctatctatcatctatcatctatctatcatctatcatctatctatctatcatctatctatcatctatctatcatctgtctatcatctatctatcatctatctatctatcatctaccatctatctatctatcatctatctatctatcatgtatctatcatctatctatctatctatctatctatctatctatctatctatctatctatatttttttggcggagtcttgctcttttttccaggctggagtgtagtggcgtgatctcagctcactgcagcctctgcctcctgggttcaagcaattctcctgtctcagcctcctaagtagctgggattacaggcatgcaccaccatacccagctaatttttatatttttaatagagacagggtttcaccatgttggccaggctggtgtcgaactcctgaccttgagatccacaagcctcggcctcctaaaagtgctgggattacaggcgtgagccaccgtgcccggcctcagaccactctattttatttcttctccctctcctttccttctttccctgcccctttttctccctagacttattaccctctccttcatttatctttgtattgcctatgtactgccaaggacatgtgaagctacatgagggctgggacttgtttctctcttctttaatcatagctgtcccccagtgcctagtgcagggcccagcacagagtgggcatttgatgaagatttgtggaataaattaatgaccccatcactgtgttgtggcttaagagcataggctctgacatgtgactgcgttaaaatcccaactcactggctggttatgtgacttctggtgagttatttaatatttataagcctccatcttctgtaaaaatatggagactcttactactcacctaatagatgatgatcataaagagcttaacacagtgcttgacacagtaaaaacccaattaatgtttattagggctctcactcctacttccagtgtggttagagacaatgacacttaactggttattatttcactgtttctactgcaattgttcatatcctcaaagaacttgttttttagttaggaaaacaaacttagtacaagtaccaaatgttgcttggcattgatggttgatacagaaggaatttataagatttcgcctttataagattttttatgattctacacaaatggtagagatataaaataaggagaaatgcctcttcatgtaactccaattcgagtgaattcactggactaggaggtatttttgttaacttggggactgttttcttttgtggtagagaagaaattttaaaaattggtcagctcacggccaggttttaaaaataaacattttctaattctttcattttatagtttcacctgacctggtatgccacaaacgctttcatgtttcatttgaggattttagatttagatgttcaggaatccatgcattttttatggtaccatgacaaagtcataatcgtagtatgaaaattatacagatagaataaactcatatactccttttttttccttttgagatggagtctcgctctgctgcctaggctggagtgtcctggtgtgatctcggctcacttgcagcctccatctcctgggttcaatcaattctcctgcctcagcctcttgagtagctgggactacaggcacatgtcaccacagttggctaattttggtatttttagtagagacagggtttcaccatgttggccaggctggccttgtatgcctgacttctggtgatccacccgtttcagcctcccaaagtgctgggattacaggcgtgagccaccgtgcccggcctcatcatatgctattgttatttaagtatatgtatgcacatgcacatatatgcacatatgaactcatgcaactattcagtaagatatgtgaagtttagttactctttaagaacaagaggctttgggataactttaccagtagggaaatttatggccagatagactgcatatatatacatgcatcagctgggacgactcagttattttggcttcatttgaatcagcttcattgacatggtttccatgtcagaagggctttccagctggtatttcagtcgtcttcatctgattgtccatgtggatgagacgattaattgtgcataaagtcagcctttacatcatcatccccaaaactgatttaagcagagtggccaatttagtgactttgtatatagacataaaccaaattagtgatatgattgtccccacatctgccaatgtatttttgaaatcatatttattagaagactagaaatatttatttttaaagcagctttgtaatttttgtggggaatcgtttggtattttaagaacttagttttcattggaatatattttcttccatttgttttatcattcctcaaatatttcttgagtacctattagtgttaaccaccttaaataaggcagatacaatcaccatcctcaaggagttgacaatttaatttttgatttgtattattaacaagagattaatgtattcactatagttaaagaggaattaatctgagtaacaggtcaaatattgaagtgaaaagatgcctgaggatatttttctattctatttttgtgaaatgaggaagggcaaatttgatttttctcttactctaggaatttgatcctagtagggtggaaattaaacctttggagattctaagccttgaagagattatggtgcgacccccccgttcctgtgaaattcaaaataaaattgtgagtttagaaatgccacatgatatatgtgaatgtttaaattaaaatagcttctttctagaatgcagatggctacattttggataagtatttggaagctgatttttgcagagcagttgtgggggctgcctttatttcactagtgttctcaccctctgtttatgccctggatcccagagaacaaaattgttaactggttgtcttgtgttcttaagccgagttgttaactaggctccagtgagaggatgcaggtgacttttctgagacaatgctttgcagcttgtatgagattcttagagaagtctggtcctccctgccccagcctctcccactttccacctgctatgccttcttaaagattaagatcaggttgggtgtggtggctcacgtctgtaatcccagcactttgggaggccgaggcgggtggatcacccgaggtcaggagttctagaccagcctggccaacatggtgaaaccctgtctctactaaaaatacaaaaattagctgggcatggtggcaggtgcctgtaatcccagctactcagggggccgaggcaggagaatcccttgaacccaggaggtggaggttgcattgagccgagattgcgccactgcactccagcctggggaaaaagagcaagacttcatctcaaaaaaaaaaaagttaagatcaatatttcattattttaattgaagttttatttttagataattgttatgttcatatgtagttgtaagaaataatatggagagatattccatgccctttaaccactttccccccaatggtaacatctttcaaatttgtaggacaatataacaaccaatatattgacaatgatacaattaagatatagaacatttcatcccctggaggatccttcacagtcttcttatatagctgcccctcctgcccctgtcctccatatccctaatcccctgacaaccactaatctgttttccttttgtcattttgtcatttcaagaatattatgtaaatggagtccaggcttggtggcttgttcctgtcatcccaggactttgggaggccaaggcagaagggccacttgagcccagaagtttgagactagtctcaggcaacatagtgagactgtctctacaaaaaataaaaatagaaaattagccaggtgtggtggtacacgcctgtagtgctggttatttgagaggttgaagtgggatgatcacttgaccctgggaggttgaggctgcagtgaactctgatcatactactatacttcagcctgaacgacagagcaagatgagactctgtctcagaattttttaaaaagaatattatgtaggctgggcatgatggctcacgcctgtaatcccagcactttgggaggccgaggcgggcagatcacaaggtcgggagttggtgaccagcctgatcaacatggtgaaacactgtctctactaaaaatacaaaaattagtcgggcatggtggagagctactcaggaggctgaggcaggagaatcacttgaacccggatggcggaggttgcagtgagcggcggaggttgcagtgagcggcggaggttgcagtgagctgagatcgtgccattgcactccagcctgggtgacaagagtaagactccgtctcaaaaaaaaaaaaaaaaagaatgtaatgtaaaagaaccatacagtatgtaatgtttggggattggcttttttaaaactcaatataatcccctgagattcgttcaggttgttgtgtgtataagtttgttcttttttcttgctgagtagtgtaccatggtgtgtatgtacaataggtaccgtagtttgtttagacactcacctgtcgaaggacatgggttgtttctggtttttggctatcatgaatgaagctgatatactcatataagcatttgtgtagaggttttcacgtgaacatacgttttcgtgcctctaggcaaatgtccaggagtgcaattgctgggttgtagagtagttgtgtctagtttttaaagaaactgctgaaccgttttctcacagttgtaccattttacattcacattagcaatgtgtgagtgaatcggtttttctgcatctttgccagcatttggtgtcatcactgtgttttatcttagccattcttctagatgtgtcgtggtatcttattgtggttttaatttgcatttttgtaaagggtagcaatgttgagcatcttttcatgttcctgtttgccgtccatgtcagtaaaatgcctggattgcttattttttaacggttgagttttgaaagttcttcatatattctagatatcaatcccttttagataagtggtttgcaagtatcttctttcagtcttgtcttgtcagcctaatatcctgaagatgtttcaattttttttgtaagttttatagttttatcttttatatttaagtccatcacccattttgagtaatttttgtataaggtgtgcatttcaggtcaaggttatgcctatggatgtacagttactccagcacttttttgaaaaggttgtcttttcttcattgagcattttcatgtcttcgcctgggtcctctattctgttccattgttctatatgccttatatatgtacagtgatatgtctatatatgtctatatatgtctgtatttgtatatatagacatatatgtctatatatgtctgtatttgtaactatacaataagtcttgaaatagggcacactgatccctctcagtttattctttttcaaaattgttttagctattctagttcctttaccttttaatataaattttaaaataatgtctataactactagaaatctttctgggatactttctcattttacacacacacacatgcacacacacacacacacgatttaattggtgcattagtttatttttgtggtggaaatagcagaagtttgagactcacactttagtttgggtctcagcttggccgcttattggctctgtagccttagggaaaattgcttactctttctgatctttaccttacttatatatgaaaaatgaggataatatacgaaagatgaatataccaggctcttaatcctgtgcctgactcatagtagaaactcagtgagtcatactattgatttttattttttattggtaagaggttgaaatgatatttttagtttattgtctgtgagaaccatggccttggtggaaattaattcactcatattccagcggaagagtcatgtttttgataataaaaaaaaaggttgcattctatcttcctcttgctgttgtcttctatgatatatttttgtaatattgggtttatttaggagcctccagtgaaatcctatcttagaacataaagacttgaatatattagccaaaatggcagaactttgattataagactggccacagtatttttgcctattaactctaacagctttgtccaaatgtgagatttatatatctggagagataattttagggtagtaaacagcattcaatcataaaatgagaaaaagtattatttattgtccaacataactcaaagagttggtgactactaggtcttttcctagagaggaccatcctgacttaggtgcagagtgttcagctcacagcgtcatgtttcattgcactgattaactttatattatgttaaatttgacattttctctcaagtgatactggtttccaatttcagataagaatgtgtgcttcctctttaaataaagcttatttatttaaaaaagcaaagtaacttaattaatgttaacttacagtgcaggtattatatgaccatgcagtgacaaaaattttggaggtaggtggtggtacacagacgcagtgcaaatccaaagggtgcaggactgaagtgtgggaaactgcagaccagtgtacttattttttaaaataggttttctaaaatttctttacttatagccgccaaatgtcatcattttatataaataacttaaaaattaggtgcttagggaaaaaactcccatgtacccaataccatcctcttacaagactttcctctgatatcaccatgtatatgtcacttctcaccccccaaaaactgtacaaccttattttggttttgcccaagcccttattttttcttcccttcattcggatgtacaatggatactgctgtgattaacagaaagagaaactagcaagtctcgtcaatggactaactcttttatttaatacaagtttccatgtttagaagagcaattcaactcttagaattcattttattatcttaacaccatacattcattcaataaaagaaatttattttccaaacttttaagaaatcatacttctttgaatcccctagcaaaattgactctttatactaatttctcagtttccaggtttctgtctaccaaagtgcagatatgttggctaatctgtgtaagagccactttttgagtctgggttccattccaccaacagtggcctcaaatctggaagttatcacgaacgtagtctagtcttcagcatccattaattcagtgtggtgtaaagtgagattggatagcaacccttcccagagagtttgtcctcttggagaagtcttcactggtttgaatccatcttctccattaactggttgctcttaacgtctgattttctcctggctggctgtctcttggcatccatattccttcctcagaatgacttgccttgactacaacatttaagttgactcctcacatccttctagaacatcacgtaatttaaatccatgtatagaacttaacaatttttctttattttgtgccatttatttctcttctctttctgtttctctgtttctatatacatttttttcttgtttgtttttcttctgtaagagagggaatgaacaagatagccaagtccctggcctcatagaacttactctaagagacataagttttatcttacatatattatttgcttatgtatttttccttccctccttccttctttccttccttccctccctcccttccatatattatttgcttatgtgcttttcctccctccctccctctttccctacccctcccctccctcccctcgtccctccctcccttcctaccttccttccttccttccttttattattaaatatgtgcatgaagtaggtgttattttatgcccattttacaaattatttacatctgacagtaagttctctgaggccagggactttggctatcttgttcactgctgtatccccaggtcgtagtccttagtaaattctcaatatttgttgattgaatggatgaatggttttacttcctgtcagaagaatggaatggtgtattcagatgtaagaagacaaatagaaaactgtgcctatatcccatctcattttgcagtagattctcttctgaacagtagaacattttagaatttctcatagttgtttatatataatctgcaaattcatcatcaggaaatacagcagttaatatcaaaggtttggatttactccattaaaattaaattttatttgaattcttttggagtaggtaatatgtacccttggtacaaaattcgaggatacaaagtttatacaccaaagagtagagtttcctttcatctccatttcctagaatcatctcgttccctttttcagaagcaaccactgtgaatagtctcttccagaatagtctatatataagtagttttgtgtgtgtgtgggcttgtgtgcatgtgtgtgtctgtatgtgcgtttgcatgcaatttatacttatatagtcttctgagccatggatttcttatttagtgatatatcatagttttgaataattcgataggattcccctgtatggatatatcttatatattttatttgattatttatttattcttctttccttccttccttttttttgttaaatatgtgcataaagtaggtgttattttatgcccattttacaaattatgaaactgagatactaagaggttcagtttttggccagctcacacagccttatgtgtaagaacctgggttcgaatccaacgtctatctctttcatggaacattggggtaaatccattttttttcctctgttacaaacagtgctatagaccacccctcatcatacccattggagagcctgaaggtgaataaattcttagaagtgggacttattgttccaagggtattcacatgtagaatttcatgaaagttgctttggaggatgttctccagcagtggacaagaaagcccatttcctctcattttgtcacattaggcctgagagccttttcaacgttttgctagtctacgaggtgagaaatggactcatttgtgtatagatttccctaacttgtggctgagtttcaaggcattttataattagaatcttttcagttgtgcaggcttttttcttttaagagtaatatttactcaactcaaaaagtagttatttagtgagcatttacaaacatataaatcataatttactgtcttaaaacacaccttcctgggaaatggctcaatggaaatcttttacctaaaagataggataaattatatgttaactgttactgtattttttctctaaaaattaaattatgaatttgcacttttgataaatattatgttgaatgaaatgatacatatatacatatacatacgtatatacatacatatattttaaatttaatcagataaatacatattcattaatacagctcagtctatattcttggtcaatcttataaaatgcttcaagtgtgtctagccatgtggcaggagtgggagggtaggggatgatgtgaatctttgtactgagtgctagatataatttctgaatgttgcatttatgttgttcctgggtatctggtatcttgagcctcttttttcctttctctcttatttttattttttgagacggagtcttgctgtgtcaccaggctggagtgcagtggcacgatattggctcatggcaacctccgcctcccgtgttcaagcaattctcctgcctcagcctcccgagtaagtagctgggactacaggcgcatgccaccacgcccagctaatttttgtatttttagtagagatggggtttcaccatgttggccaagatggtctcgatctcttgaccttgtgatccgcccaccacggcctcccaaagtgctgggattacaggcgtgagccaccgcgcccagcctcttttcctttctctctaagctctggctatagcatctacttttcactcttcaaatggtgaactcttttccgtccatgtctttgccatctcacgcttccctttgtcagtaacgttcttccatggcaggctctgacttcattgtcaggtcaaaagtcccctgcccagggaactgtttgaccatccaatcttaggtggtctccttcaggtattctctgtctcactcctttttaattgcatgcagaatcatgcctcacaactgtaatgatttcttaaattattcatttctttgttgcttgtttcttctagtaaccacaagcactgagcgggtctttttctgttttgttcatggctgaattcttagtggctagaatagtatctgagcacacagtaggtgctcaataaatatttaagtgaataattgaaaacctgaaataacatcttgcatgttaaattatgaaagaggcaagtcaccctagcatagaatacatactcatattcatatatgtcaagaaattccaaaaggtttgtggaattctattgtgtgattcttgattcttgtagcctttttgcagtatcgcagctgcagtccccaggacaggccaaactggtagaagagaaacctggccagggtgagaagggcccaattttcacccctgtcctactgccggccatctgctatgagcagaccatgtcactgaactgcttacacctcggcttccgctgcggaagatggagacggaaatgcctgccctccttcccccaccagctgttcacctctgcacaggaagggtgactgtggttgtgaagagcatctcaagtacccgaaacattctattcagtcccaagtgggtctccgcagcatcccaccattggcttcctgagtggaaaatagctgagaaaacttgggatttttctccaaaattaccatgacttgtatcagatcccaaacaactgaatgtattctttactttggattccaagagtgatctcatattagaaaaagcagagtttaatttctggcaaagaatggcaaaaaatgaaagaaagagagaaaaagagagagaaagtgaaagaaagagaaaaagaaagaaagacaaagggagggaaagaaagaaaatggacccactctatctacaacaaaggatatcatatgtatatatgacatatatatcatatatataaattcatatgtcatatatataaattcttttaatttaaccagtattttatattacatatacatggtagagaaagaaaacaatgcaaaaaaggatagaatgaagagaaaaattttctccaaccccagactggtctcacttcctggggttagtcattcttagcagattcttgtatattagtacagagacgtttattagaggcaagcataaaagtgcgtgtacttgtgtgtatatatataatttgttttacacacatgggttcatattatacaatcctattatatactttgtcccttttaacgtatgttgaaacacttttcaaaaatttttatgaatggtcaatattcatttttttctatgtcacaatttctttaatgtagtccactaacaatggacatttttaggtagtttccaggttttgctatataaacaatgaggtagtgacatccttgggtatacactcacgcatacatgatactgtatttctaagataagtcctaaaaaaaagagttactcttacacagttgtgtacatttacacttttgaggaataaaacaaattttcttcaaagaggttgtaccaggtacactctggtaaagagtgcttgtaagagtgtggctttgtgtgtgtgtgtgtgtgtgtgtgtgtgtgtgtgtgttttaggatcagaggtaacagagagaacaactttttaaaggatgttcttggccaggtgcggtggctcacgcctgtaatcccaacactttgggaggccaaggggggtggatcacttgaggtcaggagttcaagatcagcctggctaacatagtgaaaccctgtctctactaaaaataaaaaaagttagccaggagtggtggcgggcgcctgtaatcccagttactcgaaaggctgaggcaggagaattgcttggccccaggaggcggaggttgcagtgagctgagactgagccactgcactccagcctgggcaacagagtgagactctgtccccctccaaaaaaaaaaaaaaaaaaaaaagggatgtgtttgtccctctgctccttggctcaatcccccactccccaaatctgttccctttatggcaaattgattacctaaaaattgaatctaattctatcctacctttcttacaactttcctgtgccttccccttgcacatgaatatctctgaaatgtactcaggacactgtgtgacccagagcctgctgcgttcactcgctgtgtcacaccatactacccaaaatcagtgcatgagcccaacacaccacctttagttcctccagtaggcacgcgctttcctttgtcaccatccttatatgtgctcttcctattgactagcaagttcttccccttactcttagtttctctaattactgctcatcttgaaaatccaggaaatctttttctgacatatcccagtctaaatggtaggggtagccacatgctacatgtggacatgtaaatttaattaaaattaaatataaacttaaaaacccaatccttagtcacactagccacattttaagtgataaatagccacgtacatagtcatcagtggctaccatattggacaacacagatatttttctaggctgaatgcggtggctcagtcctgtaatcccagcactttgggaggctgaggtgggaggattgcttgaggccaggagattgagacaaacctgggcaacataacgagaccctcgtctctacaaaaattaaaaaaactttgttgggtgtggtggctggcacctgtactcctaactactcaggaggctgaggtgggaggatcatttaggcccaggagttggaggctgcagtgagccatgatcatgccactgcactccagcctgggtgacagactgagaccaagtctcaaaataaaaattaaaaattaaatatttctataattgtagagaattctattggacagtgcttccctatattacttcttcataatactcatggctatttaaaaatacttgttttgagagtgttgttttgatgattttagcctcactagcctgtgagcttcacaagggcacagcttgtctcacttcttgctttttcccttatattaaatgttcaataactatctgttgaatgaatgatgagtgaatgaattaaagaattcctctcagctcttcgctttattgttgtactcttaatgttcagtggaccttctgggaaggagctggatgttctacacttttaccgatttccttcaaaactgcagttggataccttagcaagactcattcatctggggatatttagcctttcctattgggtttgacatttcagaatccattgcttaactgtgggaagattgactatgattgagctagacctgtgtggtgagcatggttttaatagtttgcttcccagatctccatccctgtcttaatgactgaagcattccttctaccagctgcttggagtgtgactcagtgacagcttgcagctgagctggtacttagttgggtgtggtggctggcacctttaggcaaggtagcttggcccatggttctcccttgattttacccaatgttctcaaaactaaaatagctcgttagtttaattttcataaaatggaaatttgatagatcatattttatttattatgttgttaaaatgccccactctcctcagtagattcatacactgaaaaaactctttgaagcccttgctgagagtacatcacagctgacctgtgcccgcccttgactccctccaaggtgctgatcctgagagccctccgcagtgaacaccctgcatgcagatctccttcttggaacctgttcctggaaaacccagtctccagcaacctgatatgtaactgcaaatctgcaactctagaccaaccttctaaagagggatttaagacctttttcaagaatctggcttgattttttggcccatggttctccctttattttactcaatgttctcaaaactaaaatggctctttaatttgattttcgtaaaatggaaatttggtagatcatattttatttactatgttgttaaaatgccccaatctcctcagtagattcatacactgaaaaaaaaataaaaaagaaaataccttaactggttcattacattgaatttgcactgggtaaagggttagtaccaactgtgtttttctctgggaggaagaagctccaaacagtaggcaagatttctgtgccttaaagaaatgttactttagcttttcttgcttcaatggcctaatagcagctcttcctgagtacctgtttatatcaccataaaaagggaatgctggttatagctcgttgtagccagagggaagagagatgcttttgtctgtgggattgattccactttaatcctgaacagggtatttggccatcaagtagcctactgactgaggggagaaaattttattttaattttttctcataactgtcaatttcattgggcagctatacatttctggggaatatttgtataatagatggaattatagaagttacgctcacaagcagatattttgagattgattaaagatttagaaagaagtggctgggcgcagtggctcacgcctgtaatcccagcactttgggaggccaaggtgggctgatcacctgaggtcaggagttcaagaccagcctggccaacgtagtgaaaccccatctctacaataattagccgggtatgatggtgggtgcctgtaattccagctacttgggaggctgaggtggaagaatggcttgaacccgggagtcggaggttgcagtgagccgagatcatgccattgcatttcagcctgggcaacagagtgagacgccatctcaaagaaaaaaaaaattagaaagaagtacatttcccaggcttctggggtacctctaagtgagactgacaattttacacataggactgcaaaagttctttatcatacagaagtaaatttctgaagttaaattcattttagagagacaggcacaggatcaagcgtgtgtgaaggagattggacgttttattggcattaaattttgaagcttagttttcagacacagatgaagttgaatattataaagatgaagaaaagaccttttgttagactaattgctctaatattaactcaagaatgggtcaactttctgcaagttaaggtcatgcattctagggaattcgatcttgattttaaataggtgtcatgaatacaaagttagaaataccagtttctccttttatcttacaaaggtgtaggctgagaaaggcactggcatattagctggagaaagactaacaggaagaatataagggttattaaaaatgtttcctactattctctgatctagagaggcatgcaagtgaagatcatattaaatttaagggagagcatattggatgaataacatcagttcaagttttgaaatccttgagaagaaaaaaagagctgagcacggtggctcatgcctgtaatcccagcactttgggaggccaaggcgggtggatcaggaggtcaggagatcgagaccatcctggccaacacggtgaaaccccgtctctactaaaaatacaaaaattagctgggcgtggtggcaggcgcctgtagtcccagctacttgggaggctgaggcaggagaatggcatgaacacgggaggtggagcttgcagtgagccgagatcgcaccactgcactccaggctgggcgacagagcaagactccgtctcaaaaaaaaaaaaaaaaaaaaagaaaaaaatgaaccagcataaatcgacatttagagtacagagagattcgatattaacttctccaattctgtactttacagatggggaaactgagggcaagtgagatttcatgatttctctaagattctggcctcttagtaaccacatttttaagctgtaaaacatataacctggtggctcagagcataaacctctgtgggaggcggtggacagacagatctttctataccatggctacattgtgattctggacacgttacttaacctctcctaatttctgtttcctcagttaaacaatatcaataattatggctcctgaatcacagggatgtcttgaacattaaataaaatagttgctgtagagccttttcataacccattagctactttgaaaagcagattctgaagttgcggaccatggctggttgttcacctggattcctgagccctggaacataatgggtccttaatgaatcaatgaatgaatattacaaacccgaatgtagagacactgcttcatgcattatgcaggctaaaattgtcatccatttaaaatgccaatttaaacagtcttacatttgaacaacatgcagctactttacttttggaatatctagttctgaactcttgtaattgaagtgtaaacttgtgtaacataagcataggtaacatcttctaaatggaggagtggaaggttaaaaggtggcataatctattataagattaaaaacatcatccactaatgagtttgaggttttcatgttttgctctattctatgttactccatttgctatatcttgtagaaaattgtcctgacatattgtggagtaggaggaaaaaagtgagtgtcagaaaaaaaggaattctggcacaaatgtgtccacatatatatttctgcatgcttgtaggaaaatgaagaaaggaaagacttctaatagtaactatgataaaggaactgtgttttccttgaagtgggtggaagtgagttgagtggtcatttgcttttgtatttttgtgcttttgtatttatttatctgcttatctagtaatctatattatttattcatttatacagtgtacattcttaccttttgtaatacaatgaaaacaatattatgaccctaattgaccagagacaaggaacagtggttggaaggtgatttcttttagtgaatctatttaagttaaaatattttgaaaatcccttctctatgtcgtaagggtacatactcagatattgtattgtgttgtcttaaaagacatcatccagtaacatcactaaatttttctcttatgtatcttttgggaccttggagagcaacagatcatgttcatccatatgtaaattaatccatttgtcactttcactgtatattttgtgttgcaggagaattagtgaggcggtgttactttctgcaccttagcataattattgtgtcattgtcagagacagtgtaaatcttgacatttacaatggaatatattttcctttagtgaccattactaatgttgttttaattaaaagcactgatagctcagggttttcagcaacatctctcccattgtcataaattagaggattaaattgtcttatttcatatcctactatgtttaccaagggaacaatagcaattctagtttgtcaaaggagagaaagatgggatttggattaatctgctcatatatttaagaattgcagcttgggtcagtgagagactgtggtcagattgagcaattgggaagaggaagttgggtcatgttttcagagtaaatcaagctgatttggaaataaaatgtaccttgataatttgtttacttttaatttttgtcacactgcaagtgttggtgtttgctgttacgtagcaaaattacattcaatatttaagggccacgatcctggtgaactgtataaagagtatgttttgtttaggacaataatagaaagtggggaaggagaaaatcatgttctattgagcttattttattcacaagctagtatttttgcagattttcactctttagccaaaaaagactttttttctcccctgtggaagaataaagccatctaactgtcatttaagggcagtcacttgtaatgcaaatatagaaatatggaaatattgacagatatgagctatatgcatcagcattctgagtttgaaattaataataatgggacactgactaatagctggttctgtacagcactatatgcttgtacagggtaaacagttactaccggtgaccccaatttcatggatgaagaagttggggatcagagcactgtcaaagcttgtcctaggccacatggtcaagagagatgaacctagaatttgaacttgggaatgtttaattaattcttaatttaactcttgggataaggtttaaacattgctgttactcccttgggagagagaggaggattcttacatgccatgctagattttctgtattcatcctttttaattctcttttcactaatcctttaaggcatgtgttattaacttcatttaagttttcaggaaactcaggctccaagaatttggaagttgtccagagttacagacagggtaaaggattggatagagtttgaatttgtatttgtggtaccggtgtccatgctagttctgttacctatacctaccctgatacagacagacctagaagtctcatcagaatgctggatggatgaggaagtgtgggtgaatcaggcatcacccacaaagactgcgtctgtgaatgttctgctaatatggcagttattgtactgctatgcagccaataatagtggaattattactgagtgggaggctctgtgtttcacttatgttgtctctatggccaatttaaaaacatctctgtgtacattagtaaggttaagacacagattaatcaatcacatttacacaaacaagatgctcacatccaccgtttatggttaatcacattacttgaccaagtagcaatacagcataatggttaaatctgggattcaatggaatctcagtctattctgacgtgttgtcactgaactcattttacaggtaaagaagtttgggcttggagggatgcacaattcactgaagattgctcacctcggaacaggaggagcgaggggctcagatccatgccttctctgcttaatctctgctatattgatgcatagtcctgtagccaatccttgtaattttaatattagtaacagggctaggtgaataccccaggttaccacttgaagattgtctcttttagatatgttctcaaactgctttatttacctgatcctctgcaaatgaggagaaacttcaagaagttgctaaatgaaaaagttaaaaagtggattttaaggaaactaaagtgaatgccatacaactgacttgaaaaaacaaaggaagaagatgcagcaggggtttgagcactctttgtgggtttatttctttaggaaaaaagactaaagctaaattccatagttagaatctttagaagaatcttaataaccaagatcatcaccaatataataaactaaatttgaacactggacacgaaaaaaatagggaaggccacatagatgtcaataaacatttttcttctttttattgtcattgttttgctgaattttataatattttccttttaataacctaatatgaacctactgccccaatacaaaattatcattttggtatatttcttcctatttttttctcctaaacattgaaagtttcacatggttacaaggatcacatatttacaatgtcatacccagtgtatttttttttttttttttttttgagatggagtttcactcttgttgcccgggctggagtatagtggcacgatctcggctcaccacaacctctacctcccggattcaagcgattctcctgcctcagcctcctgagtagctgggattacgggcatgtgccaccatgcccggctaattttgtatttttagtagtaatggggtttctccatgttggtcaggctggtctcgaactcccaacctcaggtgattcgcctgtctcagcctcccaaagtgctgggattacaggcgtgagccaaccgcacccggccgtgtatatttttaaatgtattttgttatgttgtaaatacttccccaaatcatcattttaactttaaaactgtgagtttgaagtctatgatgactaggtacgtagtttacttgatagtaaaaacatttaagttgtttttaactaaaagtgacactcaggcttgtaactttgaccatgttttagattgtttccttggaatggatgtgataatgaagttagagagtttgaatatttttatggctcttaatacatattacaaattaacttccctatgggctacgatttacattacagccagtttttaaggctagaaatctggcagtggggctgggcgcggtggctcacgcctgtaatcccagcactttgggaggccaaggcgggtggatcaggaggtcaggagatcgagactatcctggctaacacgatgaaaccccatctctactaaaaatacaaaaaattagctgggcgtggtggtgggcgcctgtagacccagctactcaggaggttgaggcaggagaatggcatgaacccgggaggcggagcttgcagtgagccgagattgcggcactgcactctagcctgggtgacagagcgagactcactctcaaaaaaaaaaaaaaaaaaaaaaaaaagaagaaaaggaaaaagaaaaaataaatctggcagtgggccacagaggtagctgatgttctatttgttttgcagtcatccatgcactggttataggatgtggctcagaatcccaaactaagtaataaaacaaagtcatatgtagagtccaatgtgtatatttcgacccttagcatgaagatacatacagtgttttgtgacttccataatttagagtctctgtaaattctttaactcatttaggtatttcattgtaaccaaagaaaacttaaatatgacttagcaatggtgagctgtgctgtgttcagcacattaataaatgccaccaaatgatttcaatgaacatttttagttcatttgttctgaaactagaaagaagacacttaatattggtttctgacttttgagcaaattttatttcctcggttaatactctgaatgtaatttacttgctatgcttgctaacaatggaaagcattgaatttggttttgtggcttatgctctttatcaattatatgccattgataaagttgtctacctccactgcaatactgggaaggttaataaagagagagcgtgctcatttgagtcagttctgtactgacagaacgtgcatctctggctatttgtggtatgtatatggcctatcagaaactacaataataattgagaccaatttaataaccattataccagtgacctagtcattcttgtagtttggtatatttaatgcatttacattcatttgtggatccatgtagaccacacattcattcatctattcaacgacttttcattgagtatcttctatgtataaggtaattctttgtaccaggagataactggtgaatcagagtaaaccagaaaatagatgaatggttagtatcgttgctctgctatgcactcatttaatgagtcattttaggattactatagcaacactattaaaaattttacagtcattcacatggctcgaaattcaagaattaaaagttcaaaagggtatacaggaaagattctctcacccgtctacccagagccaccaattctcctcaagagggcaatcaattttatagtttcttctctttcagccatatttcaagcatatatcagcatatacatatataggtatatttgtatatatgtcatgtgtgtgtacaccgcattttttccccacaaaaatagtatatatgcgctatccattattctctaactaccttgtgtcacttaataaatttcaaaaagctcttttaattattacttaaagattggccacatttcttttttattcctgtcagcatggtatttcattgtgttagatattctattaattttgaattcttgttgattatattttatcattattataaatagtactacaatgcatatctttacataagttgctttcacttagatttttttccttaataactagaattgcaaattaaagtggagcaagtttctatggctattgaaaaatattcttcaagttataatctggaaatattgatctacagtatgcacagaatactatgttttgtgtaagaagtgggggtaagactgtatatttgtatttgtatatatgtgcttgtgtttgcacaaggaaataatgcatttagttgtaagtcagtgactgggtctggtgcaggggtaggaaatagaggtggaaagcaggctaattaatatatacctctgaaataattttgaattttgatccatgtgaatgtattactttttcaaaaaattaatattaactataaaattaaaaatcaaagtatatttctttattattctgccattttcaatatatgagtacacatggatttttttaaaaaataattttatagactggggtattggaaaagtagtataatcaggtggaatgcaggaagtcacaaagtggacctggccttggaacgtgttcattggttggatctaattcatagttttgttgcttttattcttgattttttttaaaaaaatggaaaagtaatgaagtgtttcccaaatgtcatttattcatcctcttcacagtctttgtcatatgtgtgaatagttttcactgttattcacttactacttcactaaaataatttatttttcttttttttggatttttatagcagtgccattaacaaaaagccaatattattttccatgagtagaagctgcataaattggagctccttcagagaagaagaaccacaggaagatatttaattagaggtttggtttggggattttggggattatttcttttgcacttgtaggaacctggtttgcagggtctaggtgctcctagtgctgaaacctgacatcagaagtgaagatggacataaaatgaggtgattgaagacaaactgcagcctatgaagatgggctagaagcatctgattttcaaagcccccaatccaccaacttcaaagatggggtcatcttgtaaggagaagagctaagcaggtgcttggccgaggtttctgaggagctgaaggaggatctggaagcagttaaagtagttgcagcccagctgttgtccatgccaccctggtgaaccagcacatcagagacagtgcgcatgagtgagagtagtgtgcactgccctgagcttccagcggggaagctcaccttcaccttcccacatcctacaatatggctaactttgtccaccttccagatctggctaccctcaatatggctaccctaaccttcccacatcctacaataaggctacctttgtccaccttctagatctcgcggtccaccctaattctgacctgtgcaaggaaagcaattctttgaaaaatagttctagtttaactgagctgatataatacaaatccactgcaaaagataactaaaaataaatacaatgaaaatgaagcaatattagacacattgttcaatgaaggcactgagcctgaggctttctcttgttgaaaagcaagatctggaagttttagggggggtttaaaattattgttacccactgaatggaacttctccttgactcactcagaaggactgacatgaaaaatgagtatctttctcaacgtgaggttctgtgccatttgttgcctctcccaatacagtttcttcttctctctcagttgaaggaggatacaggggtgattggagatggtgtcatgctatccttggccttatctgcatttctgcttcttaaacgaatgaaatgatgaactagatgatcatatggtagacagaagggaaaagagtgattttatttatctgtagacagagctctttgaagacctgtcatgggcacacatcaaagacaaatgttgtgtgcatcaaaggcttgttggcttttgaggtggtaggtgagaaaaaagcatagtttggctcatatctgtgaaaggtgttttggccatctcagtacccattggagaattttgtgtagctaaagagacctcatgactttgagtttctggcagacctactaactgtggatggaagcaccaggggctggcttctcactgagatgcttctattcatatctgtcccggtggcattccccaagtggtgtctcctggatcccctccatccttgaatctgtgcctcatcccacaccccactgctcaggtttgaattggttctgcagtttaccagtggtttgaccttggggaagtcacttcaagtccctgcaatgtagggatattataggctccaaatcactgggtagttgtgaggattaaatcaggggttggtaaattatgatccaaaggccaaaatgcccctctctcctgcttgtttttgcaaataaactttcacgggaacacagccatacccattagtttacatgtaatctgtggctgtttgcacacctcgcagcagcaagttgagcagttgtggcagagaccctgtggctcacaaagcctaaggtatttactgaaaaagttagctgacccctggattaaacaagtgaatacctataaattcaattcccaaatgtttatgggctgctatattgaggtattgagcctataagagtgaagaaacacagacaaaagtccctgccctcatggagcttacagttcaaggagggaaacagataataaagcaaaaagaaaacccccaaaatgtaaaatatatgtaaagtgatttagtggtatggagggggaaatgcaggaaataaagagaaagagagagaaagagagagtatagggggtgggagatgcaattttaattagggtcattagggaaccttcactgaaagagtaacatgacatcagagccatgtggacacatgaagaagagggttccaggcagaaggaacagccagcataaaaggacaagagccttgaggtgagagtgtgtgtctgagtgttcagagaccaacagggaggccagtgtactcaaagcccgctgggtggtggagaggagagacctgaagatgctttcagtgagctgggacttccttggccacagacaggatgttgcattttgttcttcatgggaaggaaggcactactggcttgtgagctggggatagtgtgctttggattgcattttaaaaacatcactctggctgcagatggcggccatgagtggcagcttgaactggggttagagctgtagaggtggtgagaagcagcccagctctgcctatattataaaaacagagagttgagaattccctgacagatttggagtgcatcaggaaagaaagagagaagtcaggaagactttgatactttgacttggtcaactgcaggaatgggattaccattaactgcaatgtggaagaaacagagatagggcaagttttggggtcaaggttaagagtcagaatcaaagatgttaattttgagctgccccttagacatcggggtgggattgtttagaacaatgtctgccatgtagtaaattttcaatacatgttggctgtaccatgattggcattattactgaaggcttactcaatacatgccattttatttctttaaattttattttaatgtattttattgagacagggtctttctctgtcacccaggctggagttcagtggcactatcatggctcaccgcagcctccacctcctgggttctagcgatctcccacgtcagcctcccaggtagctgggactacaggtaggtgccaccacgcctggctaatttttacaaacttcttgtagaggcggagtctctccggttgcccaggctggtcttgaactcctgggctcaagtgatcctccctccttggcctctcaaagtgctgggattagaggtatcagccactgctcctggcttgataaatatttttgaatacctgctatgtggcagcactgtagaaacaatgactgagttctggtttctgtcttcatggggagatagagaaacacctggcgatcatacgcgaggtcactgctctgaagcagtgcagctttcggggaatcacagactctgcctgggtcctaaacatgatttctttgaagttagccatttacagtttatttaatctatctatatccttgtcctcatctataaaataggaacatcaactttatttggataatgcatctaagtgctcagtaaacaccagctgttagtataacataaaggattctataaaatcagtcatttgtttcacaaatattttttgagtacttattaccacgttacaggagtttggaaagtacttgggatacagtatgaacaagaacaccctgcctttaaggagatcaagggggactgagtggggataaataaatgaaaatgataggtcgaggtaataactacatagaaaataaaaatatatatgttctacagcagcactgtccaatggagacataattagaggccacatgtgagccacatgtacaatttaacatttcctagaagccacattaaaaaataaagtgaaataggtgaaattaactttaatgctatattttatttaatcaaatatatccaagacattatcatcttaacccataaaaatataaaaattattaatcaaacattctacattatcttttctactaaggcatcaaaaatccggtattttacgccctgtggcacaattcttttcagcctagccacatttcaagtgcttgaaagctacatgttgctgatggtggttgtcacattgcacagtgcaggtgttgaatgatgaggtgtctgctttagactgaatggtcaggggaagatgagatcttatgacaggaaggacccagccatgagaaatttgaaggaagccctcatgggtacaagatagaactaggcaaagaacctagggcaggaatgggcttcttatgataattaaaagcagatcaacaaagccactggggccacaccctagagaagaaaaaggatagtcatatcacaatggagaattatttggggccagttctggtaggagtttaaagagttcatgatgaggagagtggatgcattctaagtgtattgagaacccgtggaggatttaagaagggaagtgatatgattaagctatcactgactgctatgcagagagtagaatgttaacagcaagcatgtaagcacaaagccatgagaaatacatccagtctagctttagaagctcgaagatggcttggaggaaatgtgtcctaaagaggacttacccatgccaaagttgggtttagacggggttttcagagtcagggggtgttttagacccatagacttcaaacttttctgattatacaatgcatgcaattaaaagtagaactcccagtatttgta

SEQ ID NO: 294 - DNA, 22906 bp, Homo sapiens
  source 1..22906: mol_type = other DNA
acaaggcagcctcgctcgagcgcaggccaatcggctttctagctagagggtttaactcctatttaaaaagaagaacctttgaattctaacggctgagctcttggaagacttgggtccttgggtcgcaggtgggagccgacgggtgggtagaccgtgggggatatctcagtggcggacgaggacggcggggacaaggggcggctggtcggagtggcggagcgtcaagtcccctgtcggttcctccgtccctgagtgtccttggcgctgccttgtgcccgcccagcgcctttgcatccgctcctgggcaccgaggcgccctgtaggatactgcttgttacttattacagctagaggtacaaggggtttgttgagtggtgttgacatgcgcgggaggggtgggtgggcttcagattggattttgtcctccgagatcacctgggtaagaaaagcacagaaggtctctgctgtgttggagttcacgttctagtgggtggggagacagacggtaagcgtacggagaacttgcagctggggtgggtgttacagaggaaaagcaggagtgcggtttaacgggggccgctttagatagaatagcctaagaaggcccttgtcctggctggatgagtgggtgaattgatgaatgagaacctccttgcagaggccttcccggtccgtacttctcagaccgtagaccttggagcagttgtaccgggataacttgcagtgcttgttaaacatatagctccaccgagagcccggtaaatcagaatctctgaggggtaggacccaggtgtctagttattaacaaactctccagatgattcttaggtttcattgagaactagggatgcagaccggtgcatacaaatcgtctggggacgttaaaatgcagaatctgtttttttagacctggggttaggcctcagagtctccatttctaagaaccatccggctgaggtagacgtagccactgtccttaactctcgtaatgtctcttcctcttccgtaaccttccttgtcccttgaattaaacgtttttcagcaacctactcagttcgtccttcccttcatctctgcagacatgcacaggtctgagggaggaaggaataaaccgtataaacctcctgcgctattagcctaacagcttttctattcaaaatagtaggacttctggtttgaactgaatggatcctgtgaaagtcatctggttcttcaatctggttgcagattagagtcacctgaagggcagtctccttggcgttgtctccagaattctggattagaatcttattccattctgcttgttattcaatttccctagaaagaaaggtagaataaattggagcaaatgcctgtagcttctgtcagaagaatgttgaataaatgttgttaggcctatgtgatctcattagactgctacttagaattgtaagggaagtaaagcattagagcatgtgtgaaattaaatatttgattaacacaagtgtgcatttccttgttgctgtttatcaacttttacttacccactgtttttttataagggctgcagcctgtagtctgggcctggcttcatcatggaattatttgcttaattgtaaaatggtaatcttaatttttttttttgagacagggtctcactccattgcccaggccagagtgcggggatatttgataagaaacttcagtgaaggccgggcgcggtggctcatgcccgtaatcccagcattttcggaggccgaggtgggtggatcacctgaggtcgggagttccagaccagccctaccaacatagagaaaccctgtctctactaaaaatacaaaatcagctgggcgtggtggtgcatgtctgtaatcccagctactctggaggctgaggcaggagaattgcttgaacccaggaggtggaggttgcgggtgagccgagattgcgccattgcactccagcctgggcaacaagagcaaactctatctcaaaaaaaaaaaaaaagaaacctcagtgaaatgaaagactgaactacacacctgggggaaaagcgtaataaagggagcaagaagtgcaaatgcttatggcaggggacttatttgcagaaagaaagccttgtgtggctggtacacggttgacaagaagaggagatgaagtcagagaggtagttagggtccatgttctgtgagacttcaataggcctgtctatgcaggttaggagtttgcattgttttgattgagttgggagccatgggggtcttctgaactgaggatcaacacatctgatttgttaatgagattgccggcctcagtgttaagaatggaccatgacagggtaagggtggaagtggggaggccattgggaggctgttggaaaaaactcaagggagagagaataatggtttgaccaggtggtagtagtagaggtggtgagcagtgatcttgaaggcagagcctacagaatatgctggtggattaaatgaagggtttgcgagagagaacctcgtaaagggttattatgccaaggcttttggcctgagcaactgacaggatgggtttgccatgcactgagatgaggatgtctagagactagatttggggaggtgagagtggggagagattaggacttctgtttgggacatgttagaatggagatgccgctcagataatcaggtgcagatgttgcatagaaagtagaaaatgtagatcaagagttcaggggagaggtctgggctgaagaatgaatatttgggagtcctcagcctgtagatggtactgaaagcaaagagactggatgtactcggctagggagtaattggagatggagaagtcattctaggcctgagctcagggcacacccatgaacagggaggtgagaagtggagaagggaagaggttcagttttggatatgttaggattgaggtgcctggcagacatttttgggagatcctgggcaaatccttggatatccaagtctgacagtccaaggagagactagggcagaagacgcactttgagtggtcctcatgaaggcatttagagctgaggcactgggtgatatggatccctggtgaaggtgtagatggagaagtggagggtccagggactcgttcttgagtcaccccagacccttgatctggcaaaaatgagactgacccagcaaggagggaaagacaggacgactaggtggtagataaacctggaagtgaagtgaagaaaaaagtgtaagatgtgatcaaccttgtcagattctgctgaggatgcaagtacggggaaggtggaattgacccttgggtttggcagcagtaggtgtcagccatgagcctgacaatgtggtggagacaaaaaagccaggtggggatgggctcaggggaggggagaggagcagtagaggtggcaagtgtggacggttcttctggagctttgctgttggagaggagggggtcattgttagcaacgataatagaataaagaggacttttattttattttattgttttgagacgaagtctcgctcttttcccataggctggagtgcaatggtgtgatctcagctcactgcaacctctgcttcctgggtttaagtgattctcctgcctcagcctcccgagtagctgggattacaggtgactgccaccacgctcagctaagttttgtatttttagtagagacggggtttcaccatgttggccaggctggtctcgaactcttgacctcaggtgatccgcccacctcggcctcccaaaatgctgggattacaggtgtaagccaccatgcccggcctaaagaggacttttttaaggtagcaggtatgccagtaggctgcacagggatggaagtgatccattagaggagagatgatggagcagcaagaccatcaggagtgaagactccgtgacagaggatgggacgcagtgcccaaggggaggttggccttgcagggaaagcacatgcctgtccctccctcattagcttcatttggacaaaacatgtaaaatccggtgtgttgtggaggccttttgattggggaactgtaacgctgcctatcgagcaacagcactttaagcaggtggctttgttcaaattaaaggttcttctttttcttttcaggcatcatggaccgatctaaagaaaactgcatttcaggacctgttaaggtaaattgaataatctgtaatctcattcacatttataaacccacatggaggttggtcttgtcgggaattctttccgcctttactttggatttaaatttagatcccttactgtgatcctggatatgaattagtcacttttctcgtgttcagtaacattttgctgcttcttagagtagcttttttgttctgctttgtcttataatcggctgcttaagtttctatatccctccactgtatgcaggataatagtaataatgcatctggcaggagttcaaaacttttaaaattggccataaatataaaataattagaaaaaggctaccttgaattactgtatttgattctaagttcctatgataacggccatttaaaaaattgctctatatttaaaatgtttctttttatttgtctttgtctgaatgcctgctgcgttgtggacagtgtgctaatttcaggagtaactgactttgtatttggaagtcttaacaccctctctttgtagagcactcataccgttgagctggggatggactttgaggctttcatttctagcacttgtccctcacttacaatgagctgttgaagctgaaggaaatctcatccctcctaccccttttagtttgattagctgagggtgttagagttaacttaacaatttaaggttgtaatacagtacttacaggcgtataaataatacatttcaaggctgggcgcggtggctcacgcctgtaatcccagcactttgggagaccaaggagagtggatcacaaggtcaggagttcaagaccggcctggccaagatggtgaaaccctgtttctactaaaaatacaaaaaattagccaggcgtggtggcaggcgcctgtcgtcccagctgcttgggaggctgaggcagagaattgcttgaacctgggaggcagaggttgcagtgagccgagatcatgccactgcactccagtctgggtgacagagcaagactccatctcaaaaataataataataatacattttagtagtaactttgtgaagtgtctacatttgtttcctctttgtcagttttttgctcaattccattttgtcaatacttggaaaatgaaacattggttaatcaatagtacagtaataagcttattgtggaaaatcttcgatatatgaaaacttagactcttctaaaacttcatgaagataataccactgttgaacgttttgacgtatttttttttggtctttttcttaaacgtatattatcaaagaaatttcaatggaactgagattttggcataaagtttttgtatcatagctttttgccaaatagcaatgtagtgtctatttccaaattattgagaaattttagaaagtgtctccttcattaatggatatttgttaataaagcatgatttttaggggtgaggaattggaggggatagaaggtatcattcaggtattcttagccacatactaactatcctctggaggtactgattaaaataccttttcaccttccatctcttatcagtgacattcattattttgctatactagagaacaaactttgtgaaattctcaatatattcatcttttgctttcatgaatgccagaaagtttattttctcttccattctaggctacagctccagttggaggtccaaaacgtgttctcgtgactcagcaatttccttgtcagaatccattacctgtaaatagtggccaggctcagcgggtcttgtgtccttcaaattcttcccagcgcattcctttgcaagcacaaaagcttgtctccagtcacaagccggttcagaatcagaagcagaagcaattgcaggcaaccagtgtacctcatcctgtctccaggccactgaataacacccaaaagagcaagcagcccctgccatcggcacctggtaaactagcttttgagactcattggatagtccttctttgtcgtcgttgctaaaaaagccagtgtatatacttgcacttattgtttggagccttagcttttatatctgttgaggatggggagaaaatatggtgtctgggttgaagtaacagtgtctgcccatgggccagacctatgctaaaaatacagacctgattctcaccctcttggaagagttgggcacccagggaggacacagcataaattggtgtccttttgattgcttgttactgagtctggatgtagggtgcttgcagtaagtgacttgaagggactgagatctaaagtgtgggggaaatccagagaagtgggtgaactgaggcaggctgcggtgaggtcaccatgggcattgctggccatgttaaggaatggggcctcatctctagggcatttggaagctactgaagcttttttgaactcagaagggaactctgccttttagaaagtttactgtggaaggccaggcgcagtggctcacgcctgtaatcccagcgctttgggagaccgaggcaggtggatcacctgaggtcaggagttggagaccagtctgaccaacatggagaaaccctgtctctactaaaaatacaaaattagccaggcgtggtggtgcacgcctgtaatcccagctactcaggaggctgaggcaggagaatggcttgaacccaggaggtggaggttgtggtgagccgagattgtgccattgcattctagcctgggcaacaagagcaaaattctatctcaaaaaaaaaaaaaaaatttactgtggaagtactgaataaattggagtagaacgctggatttaggagtaccagacaggaaggaggttgaggtcagagatggcaataacctgctctgtgtggagcagagtggatgcaattatttaccaactgttgagtgctcattccctgcaggctctgagataagtgcgtgcttcatccacgtcatctctttcaatcttcgtaaccacttcatgaaggtagccagttattaactcagttttacagaggaggaagctaagactcagaagcagttaacttatccaaagacaagccaggatggagaggtgcacacaaatttgagagctcatttacgatgcagactcattagaactgggcaataaattgtacctgaaagatgaataaagaggagttagggatggtgattagattgatattaattgagtgagtgtcctgggggttgaggggtgcacatgtgacaggggcatctggaggaagagtttggaccagcatccagatatctgagcagagcattgtgtgctgttcgagtttgctatgttggagacagaccagtggaaatgtttcatatgtccttgtggctgatgaaatagttaccccagtcctctgctgcacaactgttcattgtgcattttgctgaattggtggcttttatttttatatttccccttggcagctaatataaatggagggtggctggcttatgttttgctacatgttggtgataattcgtatgtagggtatggactgttggctggcccacctagtaaggggaaaaaggtgacgagttggcagctcgtcatgcatgggaagattggtacttctgccacaaaagctcttctttggaaactgaggcttcagaagagcctgcatagtctgcctttaatttatcagagaagggcctgtctatatatacgtctgctcatctttagaaattctataaaggcttcacatgatggaagtcagggtgtagtagtcctttttttctataaggaaaactttaaaaaaaaaaaacagatttatcattcttgacataccattaatattttggtgaccaattctttgattcacctctattcacagcttagcttatcctatatagttattctaaaaacaggtttttaacttattccatatagaaaataatcctgaggaggaactggcatcaaaacagaaaaatgaagaatcaaaaaagtaagctttcttatttacaaagttctgtactgttctactagaatatattatttcgttgcaaatttcgttgtgggaactctggggaaaaaaatgaggcctttatttgcatttagaggatataaatgtttccagatttccaatcttaaaaaaaatggaattttgtgtaatgaggtattttactaggaactcaagtgctttaaaaaatggctttcaaatttagaaaaagcttgtatgaatcttttatagaaatgtgtggaagttcctctctgtccttagaaataaccactacatatggtttatgcgtctgtacttttttattgtacaaaagtgcaagtttttaaaaaatagaatatgttgcagaactatatactcatatatgactgagggttttgacagtattatagttttagttctttattgtaaaggttggctgtaatgtcttccccagggcttttctaaaagcctcctctcagtctctgaactatctggactctagaatgtaccgggaggagcgaggaatgaacccacagactcttttgcttttagcggtctaacagaggctaagagtctaaatccactggttctcatgccccagctagcctgtgggctccatcccgcttccattagtaacagtggctctgtctccaccaccagagtggttctccacccagagagaattagcacctctgggactggagggagcagctggggttagtttgaaacatgcccccagatggtctggaagcattcctccctctctggtcacttatcctttttgtggtcttcagcgttgtcatggccctgttcctctgagcatagtacgggcttgggacatttcccatagagtgcttcaggtctaaaacccgagactgctccttgtcactgactctcacacctgacggcagctagggacgtcagggtttcatgtcgtggcagctctttgatagtggttattgccttggttcttgctgaggatgcatattgagtgaagttggaatacgaaattatttgtagaatgtgtctgctactcattgaaaatttgttagaaaagctttgttttcttcacattctaaagtgttcaaattcctcctaggaggcagtgggctttggaagactttgaaattggtcgccctctgggtaaaggaaagtttggtaatgtttatttggcaagagaaaagcaaagcaagtttattctggctcttaaagtgttatttaaagctcagctggagaaagccggagtggagcatcagctcagaagagaagtagaaatacagtcccaccttcggtgagttttcaggttcatgttcaaaagaatgttcaccaatgctgcacccctccccctcctgtaatgtcagcctcccactgcccaggtcccttcactccctcttacgaggcactgccttcaaatgcatggccccgttcctcacctccccctcccctatgaaaaagattagataagcttctgtactgcactgggttataagcattctcctgtgattctcccatgctctgcatgttaaaataaaattgtattcctttttttttttttaagtataaatttattttttagagggcctgcttttcatagtaccacaaaaaatgattaaatttgtcatctttcaaagagcacttaagtgctctgatcctggaaaaatcacttgaggatttaatgttttgttaatagaatagtttatatgggcaagtctttctggtggacagtgaaggggaatggcaccccttattctgaggtatgcaggaattgcgagcagctacctgcaggttgactacggctggtgggtttttgtttttcctttttttctttcagtgtttttcaaatttgaatcagatgctaatacttcaagtctggccacatcaggcctggtgtgtctctgcctggcaacacctggctggggctgggaggggcaggcatctcacatgggctgtgcttcccattgcctgcttcccgctggccacagtctgcacctgcccagtctgctcagcacccatctactgccattactgatcactgcttttatctgtcacagtgtctgggtgtcaaactactgtggcaatgccatgtcctttttttttttcctttttttttttgagatggagtctcgctctgttgcccagactggagtgcagtggcgcaatctcagctcactgcaacctctgcctcccaggttaaagcgattctcctgcctcagcctcctgagtagctaggattgcaggcatgcaccaacaagcctagctaatttttgtatttttagtagagacgaggtttcaccatgttggccaggctggtcttgaactcctgacctcgcgatcctcccgcctcggcctcccaaagtgctgggattacaggcgtgagccactgtgcccggccatgtcctttttttaatatgtagataattaatattcagctgaattttcctcctaagaataaaggtgcctaaaggaaggaaatagtcttaactaaaccagaggtccattaatactgtgaagtgcttttaaaatgatatgtgggtgtatgtatttttcttggagtgggtttatagtttcagattctaaagtggggtttggagtgtggtttcatgtgaaacaccactggttttacatgaagagtttgtttgacattttgtacatagtcttctgtgagctccaaaccaagtgttagaatgtttatcctttgttgcaggcatcctaatattcttagactgtatggttatttccatgatgctaccagagtctacctaattctggaatatgcaccacttggaacagtttatagagaacttcagaaactttcaaagtttgatgagcagagaactgctactgtaagtgttcatttattgtccaggctaattgtgtttcctttatacctgtcctccatagcaatgtacctttcatcatagtagagtgggttttgtcttgacgtaaggatagcttaatatcaaatatttgaagtggaaaaatcaaaatagcttagttgtaccatatgtacagataaagtctagaaccaggtagaatgttgtatctgcttttgtgcctagtttgcacagctgttttctatggaaatgtatataatgtatatagatagtcaccctcattttctttaatagatgttttattttagaataatttttattttattttattttttttaaagggacagggtcttgttatgttgcccaggctggactcaagtgattctccacctcagcctcccgagtagctgggactacaggtgcacaccattgtacctggctaggatagttttagatttacagaaattgtgaaggcagtacagagagttcccatataccccacactgaatttcctactaattctcctactaacatcttgcattaatatggcacatttgtcacattcaatgaaccaatattgatatataactattaactcaagtccacattttattcagattttcttagtttttctcatgattaaattgggcttatgggtttttgagagggagatcagaggtaaagtgcattcttatcacataccagggatgtaaactcttatgacttttaactgtggatgtcagcttgatcttctgactcagagagtgtttgtctggtttctccactgtaaagttactattttttcccctttccgtgctgtatttcttcaaaggaagttactatgaatagcccacacttaaggagtagagagtggatggagtattgccataaattatctggaattctgtgccagagataaggctgttctcccttatttatttaatcatttatttatttaaagatgtagactcctgggtatttattttatctcttgagctataatgcaatactttattttgtggttcagatcattgcaactttggccactgggaactttttttctttctttttttttttttttctttttgagacggagtctcactctgtcgcccaggctggagtgcagtggcgctatcttggctcactgcaacctcagcctcccaggttgaagcgattcttctgcctcagcctcccaagtagctggaagtacaggcacccaccaccacacctggctaatttttgtatttttagtagagacggggtttcaccatattggccaggctggtcttgaactcctgaccttgtgatccacccacctcagcctcccaaagtgctgggattacaggcatgagccaccgtgcccggcctgctctttttgttttaccaggttcctgggaaaatcattgcagttttgtcttgcgtgtgtgtggtttttttttggtttgtttttacacttcctttttttttttttctttttttgagatggaatctcactctgtcgcccaggctggagtgcagtggcataatcttggctcactgcagccttcacctcctgggttcaagcgattctcctgcctcagcctcctgagtagctaggattaacaggcatgcaccaccacacccggctcatttttgtatttttagtagagatggggttttgccatgttggccaggctggtctctaacccctgacctcaggtaatctgcccgcctcagcctcccaaagtgctaggattacaggtgtgagccaccacgcctggccttgtacttccttactttctgatacaagatgctcaggcctcatcgtgtatatttcctgctccagtcctagaatcgaaccacttctccaaggagccctgtttccttttcttggagaatgttattagaaaccaagctctgggcacttggtgtactcattgctactatggtgtcactacttttaggctttcagctgacacagcaagggaatatatgtggatagtaatctgtgtatagatttatccatctatctcttcattaagcataccatgaattcatactgatgtcttcaacttgaatccattaccacgtttcattctaacttcctcctgtttacctgtaaactcccactccaaaagtgtgaaacctggatttcaccgcccaccatccttttacttattcaattccaatatacatgtataatggtatcagaattgttaaccagctgccacgtgggaaccaactttatcaattagagtgcttatgtgcacttcctttggcctttgtcttatagattccactcatttccaaagctgcttggatcaacactttaccctcatgccctttagtaaggtggtttcctacatttgtaatgcaatgagatttttttgtcacaatctgcatgcccaggatggaatcatttacattttcatatcctgagattgatttttgtgtgtttgctgtaaagttctatgaatttcgacaaatacacaatgccatgtatccaccattatgatatagagaatagtttcgctgctcttaagaaaaaaaaaatcctgtgtctcaactactcatcccttccaacccttccatctctggcaaccactgatctgtttactgtctctattgccttttccagaatatcatgtaattggaatcataacagtatgtagcttttttaggtgggcttcttccacttagcaatatgcattgaagattcatctgtgtatttttggaggcatgagagcttgttcatttctgtttatcacaaaatcatattccattatttcattatatggaagtacctcagtttattcgtctactgaagggtatcttggctgcttctggtttttggcagttatcatgttttggctgtcaacatttgcatgcaggtttttgcgaaacaagtcttcaaattagttgggcacatatataggagtgctattgccagctcatacggtaagactatattttgctttgtgaggaactgtcagtcttccaaagtgatttttacattatattttacattgcattacaaatgtaggaaatcaccttactaaagggcatgagggtaaagtgttgatccaagcagctttggagatgagtggagtctataagacaaaggccaaaggaagtgcacataagcactctaattgataaagttggtttccgtggggcagctggttaacaattctgataccattatacaacggtaatgtggtatcggaaccaatgaattgaggtcctcttgcttctcatagttgccaacatttgatgtcagtgttttggatttttgtttgtttgttttgagacaaggtctcactgtcgcccagactggagtgcaatggcatgatcacccacctcaaactccctggctcaagcaatcctcccatctcagcctcccaagtagctaggactacaggcatgtgctctcgtgcctggctaatttttgtatttttttgtagagacaaggttttgccttgttgcccaggtcggtttcgaaatcctggtctcaagtaattcatgcctcccaaaatattgggattacaggagtgagccactatacctggcctcttgttttgcattttagttattctaatcggcatgtggtggtatctcattgttttgatttctagtttcctaatgacatttgatgttgaacgtctctttttttttttgagacggagtctcgctctgtcaccaggctagagtgtagtggtgcgattttggctcactgcaacctccgcctcttgggttcaagcgattctcctgcctcagactcctgagtagctgggactacaggcacgtgccaccatgcccagctaatttttgtacttttagtagagatggggtttcgccatgttggccaggatggtcttgatctcttgaccttgtgatccacctgcctcggcctcccaaagtgctgggattataggcgtgagccactgcgcccggccttgaacatctttttatgtgtttatttgccatctgtgtatcgtctttgaggcacctgttgaaatcttttgctctttttttttttgagttttgagttttaagagttctttgtatattttggatgcaggtcatctgtcacacatgttttgcaaatattttctcccaatccgtgccttgtatttttgttctcttatctgtgtctttcacaaggctgttttttatttatttttttgagaaagggtttcactctgtcagccaggctggggtgcagtggtgcgatctctgctcactgcagcctctgcctgttgagctcaagtgatcctcctgagtaggtgagactacaggtgggtaccaccacgcccagctaatttttgtattttttgtatagacacggtctcatcatgttgcccaggttgttttttttgaggcattcttgctttgtcacccaggctggagggcagtgacgtgatcttggttctcagctcactgcaacttctacctcctgtgttcaagcagttctcctgcctcagcctcctgagtagctgggattacaggcatgagccaccacgcccagctaatttttgtatttttagtagagacagggtttcatcatgttggccagtctggtcttgaactcctgacctcaggtgatttgcccacctcggcctcccagagtgttgggattgcaggcatgagccactgtacccggcctcccaggctgtatttttaataaaagtccaaatgtgtcagttttttctttcatgattgtgcttttttgcttctccttttttatgtgattaaaattacttgttttaagaagttgaagagtcttagtttgggccgtttcttattggattggcagcttgataaagcatgttgaatggtggttactttgatttttttctgtttcttggtggagatctccgggtagtgtggacattagttctctttttggcattgatgtaaatggcatttaaattcaagtaattttactttcagtatctgatgaaatcatgctactatggacaaatggctctttggtcttgtctctgcaacaatgacatgctgttttaaagacttaatcttaaatgtttgtgcttctcctaagtagaaatagatctctaatttgcttttttaaatattagctaaacaaatcagcttcttatttaattggcaattaatatttctttgagttcatcttttgggccaactttctcttacagatcaataagtaaatctatgctcattaatggtagtgactctacctcaggtactcacattttacccttggtttttttcctggtaatcttgcttatggtgggttgtagtttgttgtttcaggtcagttaatctttttcttcagtttctgatattgatatcctactttaaaagattcaccttataccaacactacaaaattacacattatactacttctctgttttctctccttacacccaaggcttcaatctagatggagttttggtgtaagcagatagctgtttgaaagaaaatgaaagatcatttctgtctagattccttagcagttagaatgaatacacatgtacctgttttccttttcagatgaattcaaataaaactaattgtagtgacatgtcagtgacctatccatatctgcaatctaacaacatgtgaggtgtggaggaagtggcagtgccagagggctatcatgaaactaatagcttcttgtctggaagtgatttgaggagtgaaatccattgccctctcaaactttaatgtgtgcaattaaagcatcagcaactcaaagttggtggtcagaagagcagctttctttgtatttgccttcagtttattgtggtctgaattttgatctccggttttgggctgaaagaatgaaaagtgtttattctgacagtgacatttggtttttactcatctgtttagtaaacctttttgatgtaaaataatgttcaatcctgtctagaaattgctgtagaaagcaaactcttctcaaactttaggcagagctaaatatattttttcaatattcaaacagttatctgtatgttaaaataaattctgggccaggcatggtagctcacgcttgtaatctcagcacttggagaggccaaggtgggaggatcacttgaggtcaggaattagcgaccagcgtaggcaacatggggagactgtctctacaaaaaaaaaaaaaaaaaaaagaaagattaaaaattagctgggcatggtggcacacacctgtagtcccagctactcggaaggaggctgaggtgggaggattgcttacggccaggagttcaaggctgcagtgaggtatgatcatgccatagcaatccaggctgggtgacagagtgagaccctgtctcttaaaaataaataagtaaatacatacatactggacttgtttgctaaatcttagcgatagggactgtaaaacttttctttttcttgcttttttttgagacggaattttactcttgttgcccaggctggagtgcaatggcatgatctcggctcactgcaacctctacctcctgggttcaaccaattctcctgcctcagcctcccgagtagctgcgattataggcatgcaccactacacttggctaatttttgtatttttagtaaagacagggtttcaccatgttggtcaggccggtctcgaactcctgacttcaggtgatccacctgtcttggcctcccaaagtgctgggattacaggtatgaaccactgcacctggccaggaaaacttttcttacaagatggtaattcggtcgggtgcagtggctcatgtctgtaatcctagcacgttgtgaggctgagatgggaggatcacttgaggccaggagtttgagaccagcctggtcaacatagtgagacccccatctctattaaaaaaaaaaaagatagtaacttaaggaaataaaattaacaaaaggactgatttcttatgtacttctatgctgacttagtgtaacccaaaatttaacatgctatttaatatgtcagtgcaactgctttttagtttctgtttattgttcaggataattttttctcctgatattcttgaagtaaatttttagctttaaacaaattcttctgtcacagaatgaccttggttttaaaaaagggaattgactatacttgcaaagttcattttttttttctaaaaaagaaaaaggcagtatttacacatctgaatccttaatttgtaccagttcttcagcactgtcttacttcctggctgcagggccatttgttgccgtatggtgttgtaactttaggttggtgcaaaagtaactgtgttttgcattgacatggcaccagcctaagagctagctctaactggctgaatgtcttttctgactttcaacatcacaccagctgtattagcagagatgactaagcattgggtaatttcacttcatgctaaccactataaattggttcagttgatgtgtgtgtgtgtgtgtgtgtgtgtgtgtgtgtgtagactcctatataatttctacaatccttgctttaaaacctgcaaaatgtattttttgttttgtcttttcctttttgagacagggtctccttctgtcacccaggctgaagtgtgatcatggctcactgcagctttgacctcctggtctcaagcaatcctcctgcctcagcctcccaagtagctgggactacaggcatgcaccatcacgctcagctaatttttaaatttttgtagagatggagtcttgctatgtttcccaggctggtcttgaacccctgggctcaagtgatcctcccacctcagtcccccaaagtgttgggattataggtgtgagccactgtgcctggccaaaacctgcaaaccatgttaaatctatgttgtgttcctttcggaagagatgtctaatattaacttgtgttatataaaatctaaaacataggctttcaatattgttttaacagtatataacagaattggcaaatgccctgtcttactgtcattcgaagagagttattcatagagacattaagccagagaacttacttcttggatcagctggagagcttaaaattgcagattttgggtggtcagtacatgctccatcttccaggtatgtaactttagaggtggaagttgtttggtttaccaaagccctgggagctaaccgtgagctaaatgtaaaatatttcagtgtagattttgtgctgtaagaggggtaggtggctaacccagaagtactttggagtaatttaggcttaataataaactagggtttgcaagaaagtgttattctgtggagatttggggctattagcagtgttctaggcctagggttgaagatgcttaatgtccttagaggctaatgaagggatgaatgagtcaacagataggacacgtatatgacagaggtgaagtgcccacatgttgagtgggaggaactcttcacctctgctgcttcctggatgaggagatggggagatggttcagaggacagcactgacaaagatctagagctcagagtgcaggccatatcagggaacttgaaacactaaattagtttggtggtgctttgagggcagtggtgagagattctcttcagtctgcctctgtcaatagtagggatagtcctttcttatcccctgtcacagctgaagcagagatgtcagtctcaaaacaattcaaatcttagctttccaagtgaactacaatatctttactgttttaaatttgagtttaaataagctttgaaacttcacatgaagtggggcattttaaaacatatatctaccgatgaagttttgtcaactttggaggaggactcaaattatagccaaatgacttaaaaatcaagctagttaaaaaaaaagtatagcctaaaatagaatatgagggagaaaacctttgcttttgttacagagcacttctaattgttccagcaatgcactgaatctgctattgcagtctttttttttttttttttttttaaactggttgtcattagtgggagctgttatctggtgagacaaaccagaataaagacttacaggcttcatggaatcgcagagttaaactgtatcttaaccggttgaattgtgatagaaaagatggcttcttgctttttgaaaagattacttacataaccgatagtcacttcactccaaatcccagatgttaatcatcatcatttcctggttattgcctcagtttgagaacccccgattcagtccgtcggtgctgatggaggggttagatgaccagagtggtagcttcttaatcctacgtcacaattcagtggtgagtgactgtttgtgtgctcagtgggtgccaggcctggctgaacacagcaccagggctgtgaccacgtaagcctccatggtgaagagcagctgataacaaagcaacacgaacccacacagactgttctggcttgctgtctgctgttcccagcttttttccaaccttcgttaaaaaaacctaaaccgataaaaatgcggaattggtagttgatggcatacctgtctatacagtgcctacgttcagcagtttttcccatttagtcagaagggctgcatctgcttttttagtgaacacttgaaaatacgttgcaaacatcatgatgcttcaaccttaagcactataatagaatgcatttcctaaataaggatattctcctatataactagaaccatgatcactcctaagaaaattaacagcattgtcagtatctaatatttagtccacattcagatttctcctattgtccatgacatcttatagctggtttgtaaaatcagaactcaaccaaagcccatgctttgtattggactgtctatgtggttggattgtctctgtggttggactgtctctgtggttggactgtctctgtggttggattgtctctgtggtctaaagccagaccagtctcccactttaaagaggacttttctgattgtgttgccacttaacttggacctttattccccgtatttgctgaaaactggaatgtaggtctcaggtcctgaagagattcaggttaagaaaatttttttttttttttgagacagagtctcgctctgtcacccaggctggagtgcagtggtgcgatcttggctcactacaagctcgcctcccgggttcacgccattcttctgcctcagcctcctgagtagctaggactacaggcgcacaccaccacacccggctaattttttgtatttttagtagatacggcgtttcaccatgttagccaggatggtctcgatctcctgacctcgtgatccgcctccctcggcctcccaaagtgctggcattacaggcatgagccactgcacccagccaggttaaatatttttggcaagagtacttcataggccaccctcaaaatttcagcatcactcgtaccaagtatctatcacaaggcagcatgtgtctacatctccaccccagtgctgttacagtgggacagtttctagtgtattgtcattgcgaccaggcttttaagattcttagcatatctgtaatatccacatgcagatgtagaatccaaatcgtatttacagagaactttgcatggcagcttttatatggtagtgatacattcagtttcttacattctagattattcagggaggttctggagttggacagatttggggttaagcctgatggctagctgtgtgaccttacacacctcgcttcatctgtttcctatgggaatttataatagtagctacttcctagggcacaggatctggcccaggggaagacctcagtgttagtggactctttaatgattgttagcagctgttgtgatcataaaacgagaagcacatcaacctgagcctccctccgttttcaggaggaccactctctgtggcaccctggactacctgccccctgaaatgattgaaggtcggatgcatgatgagaaggtggatctctggagccttggagttctttgctatgaatttttagttgggaagcctccttttgaggcaaacacataccaagagacctacaaaagaatatcacgggtaagacgcaactgaaaaggacccagcacatctgctggaattctttccttatcagcctgaactgcaggccaagatccgaacatctatactatttgatctctctaacctgtgttttgtgatattttatcatttgttgtactccaggttgaattcacattccctgactttgtaacagagggagccagggacctcatttcaagactgttgaagcataatcccagccagaggccaatgctcagagaagtacttgaacacccctggatcacagcaaattcatcaaaaccatcaaattgccaaaacaaagaatcagctagcaaacagtcttaggaatcgtgcagggggagaaatccttgagccagggctgccatataacctgacaggaacatgctactgaagtttattttaccattgactgctgccctcaatctagaacgctacacaagaaatatttgttttactcagcaggtgtgccttaacctccctattcagaaagctccacatcaataaacatgacactctgaagtgaaagtagccacgagaattgtgctacttatactggttcataatctggaggcaaggttcgactgcagccgccccgtcagcctgtgctaggcatggtgtcttcacaggaggcaaatccagagcctggctgtggggaaagtgaccactctgccctgaccccgatcagttaaggagctgtgcaataaccttcctagtacctgagtgagtgtgtaacttattgggttggcgaagcctggtaaagctgttggaatgagtatgtgattctttttaagtatgaaaataaagatatatgtacagacttgtattttttctctggtggcattcctttaggaatgctgtgtgtctgtccggcaccccggtaggcctgattgggtttctagtcctccttaaccacttatctcccatatgagagtgtgaaaaataggaacacgtgctctacctccatttagggatttgcttgggatacagaagaggccatgtgtctcagagctgttaagggcttatttttttaaaacattggagtcatagcatgtgtgtaaactttaaatatgcaaataaataagtatctatgtc

SEQ ID NO: 295 - DNA, 9701 bp, Homo sapiens
  source 1..9701: mol_type = other DNA
agcgcctgcgcactgcgccgccggctggggtgctgggggcggggcaggggcaggtgtagcctctgtgcctcgttgtcccctggcgctacccggacatctctcagggtgccggcaccatgaagatctggacttcggagcacgtctttgagtaagtttggggcgcgggtcggctccgtggagggcaggcacgccggccctggagtagaggcgaggcagaggcggcccgcaggaggcttctaggcgtcgggcctagcgaggggagcgaactctgaagcctgcgggccccggcgacacggagggcagaccaaggtcacgaccccgaggcgccctagccgaggggacggctccgacctccagacccaggcggccttgcgaccggcagggctacggggtcacttccgggctgtcccccaccatgaggtagcctcgggccggcggcctcctgaggtcctgggggcgtcgcggagcacgaagcccttgacagcactcagggttgccccatcccgccctgtgaaaccactttgggacgtggacccgaggatcccaagagggaggtgttggttttctccagagtgtactttccctggccgccgtttgggtggagtttctaccttcgaatgtgaatttcgggtgaactctgaccaccaggatgtgaagccttttcacaactcgttcatctacgcagcagagccttggatttggaattcaaggtctagctctggctgtaacaagcgtgtgaccctgggttacccattttcatctgagagatggaaaaggacgatcgtcagggcctacccgtgttagctctttgaggccacgttcaggaacatctttttggataatgtgaactgtttactaacgaaactaagccttgaaccagttggatgtggagaattatattctcttctaggtccctgattccatttacaaaagagccacaaatttaagcagcgaaatccttttttttcccgagttacctgctctgttccgctgatcttaatgtcgttgccacactgttttaattagtatagccttgtaaataaatatgctacaaagccatttatgtttttaaaactgtctctgaaggcaaattttttttaaatttcttttttgaggcagagtctcgctctgttgcccaggctggagagtagtggcgtgttcttggctcactgcaacctccgtctcccgtgttcaaacgattctcctgccttggcctcccaagtagctgggattacaggcgcccaccaccgcgcccggctaatttttgtatttttagtagagacggagtttcaccatgttggtcaggttggtctcaaagtgattcgccctggtcaggtcgcacctgacctcaggtgattcgcccgccttggcctcccaaagtgccgggattacaggtgtgggccactgtgcccggcctctgaaggcaacttttaaaacgttgtccgcatttgtactcagtgggacacatcctagggcctgctgtatcctgcaaagtatagaatactggaatcagaaggaagctttcttttccccctactgtttagtctttttgggaggaaaaagacccgaaatttgtggtcatttagatgttcattaacctggtcgcattcatcactagtccatttcagctccgaggatgtttaatttcagtcctcttccaggtttgcatgcttcagtcctcttctgggtttgcatgcttcagaggttctcggcactcagtctccctagaactgtcttctcccatatcttccctaactcttcttcctggctcatcccctccttccctctacactctttctgcctttgtcttcagcgcttccctgtcttttcccattcagtgtaaatgttcagtgagattctgtgttggccttcctatattggattttacctgtgatcttaatttcttttttgtttctcttttcgtcacagactttttttttgtcctgggagaagcagccctgatccgtgctttctccccacataatctgagctgtttggtcaaagtcccaaatgataggtatacatttatggcacccagatctgtaccttgagctccagcctctcttgagctccgcttttcattttcaggtgcctgttaggcattgctaccctcgtgtcccacaggcccttaaaactcagcctgtctgaaattgaagtcatcatctcccctgacaaatctgagcgttgtttctgatctttaggatgtcactctctaacaatgtctaagtcatcattctacatcttatctgtctttgattttccaacacttttcttctgaggcctatagttggcatccaggtgaagtcattcattgattccttcaacttatagagatgcccagtatgtgtcagccactgttctttggattgattacattttcataagtaaatcaagacctcgatgctgcgccagtggagttaataatgtcctcacctcgtttcaaaggtgaagaagttggaccggtcagtgagccatagccaggtcctcctgattctactttggcgtggtctttgaatgtcttccattgtgagatcttttccacgtaattatgttaatacagctcagattaattgctggaagattaatcataataagtattgtttgtaatgtttgagctggttatggttcataaagcaatcttgagccaagctaagtcaacatcagtggtttcaagttggttcagaaaggagagatggactaaattacaaataatgcataaccaccctgaagtcatgcgattattaattttttagagagggttgggggaagaggtaagggcatggaagccagctaaccatggcatatgactggatggagacctggggagggttcatctgattttcattttagagagttgccttggtaagaatcagtgcttggcctgtatgcttcgatttgtcgggacacttcagattgatgaagcaactctgcttatatacctgcattgattgctggataaggctggagactaaagacagaatgaggttcattggtacaatattgtatagaaaagaatattataatgaaaacattaaaaatgatgtcactggttgtccagggttctgggaaattaatggagttgagattttccttttgtcaacgagatgtagttgtcaatctgagttctctaaaaggttggaataatgtctacttgttttacttttagaaaaataaaaagtaatgctgtgtggcttaacagtcattgtggcttgaacatcatccccagatcttgtctttttcctttaaatgaagatgagagcacagataagtagtgtagaaagcatccgaatcagactgcaggtggactaagtcacctttaatactgattgtacttaataaggggtccttttgaaaatgatattttttgtacaagtgtcttattcacagaagttgtgaagtgaacaaaggttgcatcacattttgaatcatccaagcacatgtgcctttttgaagaaaataaagatactgcaagttctcaagtgatgtgatattattaccacttcaatactaggtgataagcaagtgcttattatattaaaagagaatattagaaaatagtatattaggagtgcaccttaaggacattttattatattgagtgaccttttcaaaacagaaatcagaatcactcttttgagaaaaacagtagataaagattgactggaggagccattgttatgtattacattaaaatgaagggaaagttcaataattaaatcaatgctttggatctttttgtgatccctgtaagaatttatagtgcccataaactcttttacttttgttacttccgtataaactgatagaattggggtcagaaaaaataataaatggcataatgatacttttggctatttgtttcagtagaacataatttttaaatacattttcatgaatcattggttcttcctagaaacaatttacatgtgaaagtggataaggataagtaggaaagatggtgtagactgctttgatctttatagatatgagtttttttacatagcctgtattgtggaaaaatactgaagcctgttaaaaatgtagatcagtttcccataatcatcagtgtttcagaaggtaatttttcctaggtaaactcattaaacttacattgtaatgaatgatttgatagattataaaaattgtttaactcatatgcataattttaaatgtctgaatttttttttttttttttttggttcacatcggcagccacccgtgggaaactgttacaacagctgcaatgcagaaatacccaaaccctatgaacccaagtgtggttggagttgatgtgttggacagacatatagatccctctggaaagttgcacagccacagacttctcagcacagagtggggactgccttccattgtgaagtctgtaagtgtgtctttattcccggagaaatgtgactgctgtagagaagttttctaaaccgcattatactttcaaataggttgtgggagccgattctgaatgtcattttttgcatccgttcaagttgtattataataaacttgaattatgagtgtataatgaattggaaatattattacagtcttcatgaaggcacccaataaaattttcttaaggaagccagctaatgccgtgtgatctgaaaggagttctattctgctttttctgcttttgccagcaacttgagaccaatactaaggtttggcagtaatggtctggtcataattgttaggtgacagttctgtggtcagtggtgggttgtgtacattaagtaaggactatgttctcggacttgttattgccacatttgttccaaggtctggaactccttcctgtacatttagaaacaattctattcccttaagaatgagcaggctttagtgagcagattttaccaggaagaaactaaaatgccagtttaccataatgcgagaaaactggtataataagtggatccaggtttctttagagggtctctttatggagagtaggttcactaagaaaactaaagtacacattttcaataggaatgtacttactgcctccttatgcaaaccatagtgcagacacagaaatgagcagggtcagggggtgggcttggggtcatagcacagggagtgacagtggacactgacgtgtgagcctccatcgtaagaacgctgtttttctgtctggagaatgaagctgaggtgccccctcccttgggctgttctaggaagatactgacagatgcctttgagttctcctttttctagctgccatgttgccccaaacctgatttccatatctcagcctcagcgctccaccgtcgcaccgcggcagattcagcgtgctgcctcacgttgcagacgttctcagtgggctggtttctaattgcctccgggaaaagtttttgtgtctggcagtctcctctcatccatgatatgtgaataggcctcctttctgacctttgcttgtttcctctggtttttagaaaacagatttttggttcaaaatattgtaacacattttttccttcaaataaaatattgatagacttggtaagaaattcttcctcctctgattcctagttctgaatgttttacttagcttattggtgcagcaagaacgaaaacatatgtgcaagaacattctgtagttgatcctgtagagaaaacaatggaacttaaatctactaatgtaagtcttggctcccttttgtttcatttcgaactgtctggctgagttctttgtccctctcctagttgccgtagaagtgagtgcgtgttcatgatgtggttcagagaatccctgcttatgtgctggcctaacttggccctggatgttgcttccttacccttcctgctctcatgatcttgcctatctctaaggggatagcactcaataaaatgagtttgggattatgtgtattatcattattatactttatttcctcaactttgctttttaaataaaaagtaggcagtgaatagtttatgcaataatagcagcggtttatttgttgttttgtatgtttagtaagattttggcttgtgtgttgattttagcaacattttgaatcttcagttccaaaatgatttgatcttttttttttttcttcattctgtagatttcatttacaaacatggtttcagtagatgagagacttatatacaaaccacatcctcaggatccagaaaagtgagtaaaaaatattttaacaaatgtatcgtaaagggtgtttaaggtttttttatcaagttttttgaaaatgaaagctgggtcatctgaacctgtgtgaatatgttttgttccagaactgttttgacacaagaagccataattaccgtgaaaggagttagcctcagcagttaccttgaaggactgatggcaagtacgatatcctcaaatgctagtaaagtaagtgaggctgcttcttggttattattccctggttcatttcctgggaatggaatggggtgctgactgcatgtgtgtccttgtaagctgacccttgcccattctaccataggaaactgcagcacgttgggcagttacttacaaaggctctgggttcacatccaagctctaacttttagccttttaaccttgggcaactaagttaacctttctatgcctcagtttcccgtttttaaagtggagattacccgttttacagggttggcgtggagtgaatgagataacatatggaaagtgtgtagcctgaggcccagcactgaggaagtgctcgatgatgtgtagctgcgtgtcatttaaggcactgtttctcaaccttttttcactgttgtctcccccacaactcgttttagacattttttccctaattgccacctccattaagtcatatatcatatacatatgtgtgggctttatacataaaagagggagattttttccatccccccaagaaccaatttttgcttattgagaatgcatgatctgaaacagtaagtttagagaaagatgccatgcactgttacataacacatggtgaatgtggttatcaagagatactcatggatgccttctctgtgccatgcagagtgctaggctagacagggtatacagcagggagcaaaacaaatgtggtccctgcccccgtggaactaagaggcaggtgacattaatcatacagcatgtaattaggaaagaaaaggtacagaaaggtatgagagtgcttattgagtgttcagtaactgatgtttctgctgactgccaaatgggggcaggtggattgcgaggggtattccaagaagagtgttctaggtggaggagctgcgtgtgcaaaggccctgagacaggaagtagggaatgctctgtttttcaaggaactatatagaacactaggagagaaggggtgaggagtgagttgaggaccagatcctgcaggaccttgcacaggattttggtttaaaatgtaaagaaaagggatttgaccttcttgcccctaaaaaggggaccactataatcatgaaacaaataagacattctgtcatttaattgtagattcatttgagaacatcttttgcatacaaagtaaaagtcagtttatggatcaagccagttgctcaaggcatttgatgtttgctaaataacattagaaaaagccaggacaaaaacgatctgtcatcctgagattgagttaaacttgtcacgccccttgttacttcctggtgtgtcattagttcgatatatgcctttgctctccctcagtaacaataaatgtattggattttttttaagggccgagaagcaatggaatgggtaatacataaattaaatgctgagattgaagaactgacagcctcagcaagaggaaccataaggactccaatggcagcagcagcgtttgcagagaagtgatcgtgacagttggtagacaacatcgggtactccaggtctctccaaactgactatatatttatttgttattttaaaaatacaactatattttgggtagtttttttttttttttttttgataagttggtgtaaggctatgtgacttgatcaaaacagatgcagggcctctaaataaaagggatcatctgaaattaatgttgtttgaaattactatctgattttgagggttccagtatttctgtgaaaattcaacaagaactccttggaaactggtattgatattcagtctccttaaggtagatttttcaagcttttcatacattggaactccacctgactttggaccaaccccagaacagagcagagccacctcctatagacgcccattgccctgctgctgtacacttcagcagcttgcacaagggagctcacttaaaaggagaaattgtgtagttttaaaatatattttgtgtaaaataccttactatgctataaaccaccattaaaaaccagtgttttgatttggtacttaaatatttttggagtgaaaattatcactaaagtaacatgactccaacaaaagtatggtttcattataaaagagtactgtattgatttgcccaagttttgtaacttagtaaaggtattaacttccttggatttgtactttgtgatttagtatgctgtatcgtgggctggttatgttaactgaaaaaaataaagtcattacctgagttttgcagtgctctaacttaaacagaagaacagctgttcacatcttttagcattttacatttgcctaacttaaaaattgccatgtgtcaaaatcatggttttgtaattgctaaggcatgatatgtcaggttatttgaatataattactttttgaagtaattgtgaccacaaaacatcttttttacatgaaggagctgtgtatcatttgaaattactcaaatgatgtcttgctctgaggcataaatcccaggtacttagtgtttttaataatatggtgccactgcaggatttgggggcggtggggaagaacaagcataatggtagggggaggcttggcctgaaactaaccactgagtgaattgcactgcaggttttacttaacgggaattccttatttgggatgtcaagagggcagctgcaaactgaaaaacaatccagtaaatgtactttgttttatgtattgtagcaggcaattaactactaaataatagctttgacatttgcaattgttgcatagagactatttttgctagaagatgattagctcttgcctttattttacagtgcttagtgtgataaacttctagtcatgtttcctatccaagagaccagttaatatatgtacataaaccacagaaatagtataacacactatttttaaattatcgttttcctacttaaattttgtttagcttaagacttcttaggacatttgtaaaagcaggttaaatttaataaggtttctgatttttttttgtaaccggagatagtttttacaagtgaaataacatttcagctaaataaaacatcgctaaataattgatatttgatgaaaatctgctttgtataatttctgtaaattatccttgttctgaaaaaggtgtaatgccctaatatttttaaatccttatcctttgattttttaaaaactgacctattgataaaactataaattttcattttccagtgcagttagttacctttttaaacataaatgcacaacaagcaaatgaatttaagagaactaaactggaataagtgttcataaatgaaacccttggactatttaataaagttgaaatgtgaattaaggaaaacttttgttaataaaaactttcttttaagtg

SEQ ID NO: 296 - DNA, 31436 bp, Homo sapiens
  source 1..31436: mol_type = other DNA
gggaagcggcgcgcgctgcgcgggaggtgacggtgcctctgactgtccgggtccctccaggtacggcttccctggcccgggcagctccgcggctcttttggtcgcgtcggtccgggccagaggccctcgccgagggcgggcccctgggccccgggatagctccggagcggcgcgcgttggggcggcggggccccgtccacccccggccccgcgcggcctcctcccggcggcctcagtcccagcttcccgggcccagcgcccggtccctgggaaaggcggggttctcctctcgccccgccgccccggtcccctaccccgtttggccccctcttccgggaggctcctcccggggcgggcccctccccgggctctcagggcgcgcccctagcccctactaagcggggacaggccgtgcagacggccggggcccctaggtagcctttacctgggtgtttcgttttgcttttctggatgtagcggcgtatcataaacttgtggatgtcaggacccagcgaagcattttaggtggagctagcaaggtgttattgtcagatggcaacgttaacatcctttcccaatgcagtgtgcattttaaatggctcctggcccctattcagcgctcaataaccctttgctgctgttaacactgttgtttaatccatcaccagcattttgcagctttctcctgtcttgaagaagtagaacggtgcccgagaaacgtttttccccttcgagactcaggaggatgaaagtcatcacttgtgaaatagcctggcacaacaaggagcccgtgtacagcctggacttccagcatgggacggctgggaggatccacagactggcgtctgccggcgtggacaccaatgtcagggtaaactggggcagagatagacatccgggaacactgcttgaagcaatagttttcattcttttacttaaaaccagtgtcggctgggcgcggtggcttacgcctgtaatcccagtgctttgggaggctgaggtgagaggatcgcttgagtccaggagttcgacaccagcctgggcaacagccagacatgaaaaagtagcgggacgtggcagtgtgcagctgtaggcccagctacttgggaagttgaagtgagaggatcgcttgagcctaggagtttgaagcaagcaacgatcactccactgcactccagcctgggtgacagagccagacccttctcttaagtaaatgaatgaatgaattaacgtatgtcaacaaactaaactactttgtcatctagcccagaatgctaaatttccagggcctgcggtgaacaatgaaagcaaaagagagctgctttcttttttttttttttgagacggagtcttgctctgttgcccaggtgggagtgcagtggtgcaatctcgacttactgcaacctctgtctcccaggttcaagctattctcctgcctcagcctcccaaataactgggactacagccgctcatcaccacacctggctaatttttgtatttttagtagagatggggttttaccatgttggccaggctggtctcaaactcctgacctcaggtgatccacccaccttggcctcccaaagtgctgggattacaggcctgagccaccatgcccggctctgctttcttatttgattcattttccctagattattgtaactggacgttcattgttttgggatcctgatcctggttcctactgggtaacaagttgctctagaaagaaggcggagggggacagtagacatttatgttttagatagggagttctttgattttatgtttcaaaagaaaaactaagttttctttctgaaaataagcatagttttgttttttttttttttttgagacagggtcttactctgtcgcccaggctggagtgcagtggcctgatcttggctcagtgcagccccgacccggggctcaagtgatcctccctcttaagcctcccgcataactggaactacaggcatgtgccatcacacttggctaattttttaaattttctgtagagactaggtctcactgtgtttccaggctggtcttgaactcctggcctcaagtgatttacccaccttggcctcctaaactgctgggattacagttgtgagccaccacacccagcccatagtattgttttaatacagacagtataatatgtgcccattctatgtttttcaaatgaatgtgttggtattgacagatctggaaggtagaaaagggaccagatggaaaagccatcgtggaatttttgtccaatcttgctcgtcataccaaagccgtcaatgttgtgcgtttttctccaactggggaaattttagcatcgggaggagatggtgagtattgctgtccttcagagattcttcgggaaccagatagatacctgtgtgtcttgtgtcagatagtgagatttgagctggatatgctttttttttttttttgagatagagtttcactcttgttccccaggctggagtgcagtggtgcaaactcgactcactgcaacctccgcctcctgggttcaagcgattctcctgcctcagcctcctgagtagctgggattacaggcgcctgccaccacgcccggctagtttttttgtgtgtttttagtagagacagggtttcatcatgttggtcaggctgatctcgaactcctgacctcaggtgatccacctgcctcggcctcccaaagtgttgggattacaggcgtgagccactgcgcccggcctggatatgctttttagttcaggtgtggctgaccctctcaatctgtcatttaggtagttcagtaaaatactgttctagggaatgtggtagagtcagggagggaggacagcaagatgaaaccaggaacacctgtttgaaaacagctgctttcccgcaagctcccaccaggctgttctaagacgagatggaaaggcacttaccattctgtcacatcccaagcaaggcgactgttctggttttgttggattgttagtttaacatctgtggtgatcagagtcagttctgtgtctctgtgtaattaattaaatggctttaggactgtgttagtaattaattggctttgggagttttttttttttttttttttgagacagtctcactgttatctaggctggagtgcagtggcacaatcttggctcactgcaacctctgcctcccaggttcaagcgattctcctgcctcagcctcacaagtagctgggattacaggcgcctgccaccacccccggctaatttttgtatttttagtagagatggggtttcgccttgtcagccaggctggtctcaaactcctgagctcaggcaatctgcctgcctcggcctcccaaagtgctaggattacaggcgtgagccaccgcgcccgggctatttgggcatgaattctaaactgggatatgaaagaattcagcaatggcaaagttcctcatggaggtgtgccatgctcagaagtgcagtgtgccctcccactggcccctcttcagtgggccctgagtagctgctcgtgtttgatctccctgtaagaaaggcagtagctgaaaagcacctaagctgccaacactgtggaaacccccgcaatgctccctttcttcacagtgacatacttgttgtaatacccatagtagcctctgaaacgctccagcagtgccggtcggggtaagatcccgcgtcggtacccagcttggcagctcctctggtttgacatctgtgtgttttctcccattccctgctgtgactgatgctgctttggagtcctggtgtctgcagtgccgggctgctggagggtgctggggagggagcataccgggagtgtcattaatgaatggccttgtgatttgtgcttgcttgtttggtgggaatagattgattcttgttttctgcctgtgcttaaatgggataaaactatatggaaaaagtaaaccaggctgggcgcggtcgctcacacatgttgtaatcccagcactttgggagaccgaggcaggtggatcatttggggtcaggagtttgagatcagcctggccaatatagtgagacctcatctctactaaaaatacaaaaattagctgggcatggtggtgcgctcctataatcctagctactcaggaggctgaggtggagaatcgctgtaacctgggaggtggaagttgcactgagccaagattgggccattgcactccagcctgggcaacagagtgagagtctgtctcaaaaaaaaaaaaaaaaagtaaacctttttaccatactttaaaacaatctagaaactattacaaaataaaacagaaatctaaagtttttttttgcaggaggaggaaaagagacctggttgagttcagtgccatgatacccagagtgcatgaagggatgtgtgtgtgtgtgtgtgtgtgtgtgtgtgtgtgtgtgtgtgcgcgcgcacgctgatttgtagagggaaaagtggggagcaggagcgccacctgggggtggctacctgctgtctgccctgaggttgcacatggcagcccccattttccaaagtcccttggtcttggaggcccagaaacctgctgttgtcagcacgtggagagtgttcatccatcagggccaatggcatgttaaccaagctcccagactaatgtgtgcgaataggattccggttaacttagcatgggaatgcaggctgggtgcggtggctcacgcctgtaatcccagcactttgggaggctgaggtgggcagatcacctgaggtcaggggttcgagaccagcctgaccaacatggagaaacctcgtctctactaaaaatacaaaattagctgggtgtggtggtgcatacctgtagtcccagctattcgggaggctgaggcaggagaatcgcctgaacccgggaggcgaaggttgtggtgagccaagattgcaccattgcactccagcctgggcaataagagtgaaacaccatctcaaaaaaaaaaaaaaaaaagaaagaaaaacaaagaatgggaatgcgtatgtcctcacaacctcattcattcactgtcctgctgtgcacattcctaaaagggaagctaagggatggtcagaaggttacgtggtaatcgtagagtcagaatgtggggagttattggacttagacaatgggtgacctcaggctaaagtacctgatatctataatggtattaatagctgacacttacatggggcttactatctgccagccattgtgttgtaagtgtgttatatacattggccaatttaatcctcacaacagcctgtgaggtagatatattgttatcctcatttttgagacagggtcttgctctgtcactgaggctagagtgcagtggcaagatcaggactcactgcagcctccacctcccgggctcaagtgatcctcccacctcagcctcctgcgtagtgggaccagaggtgtgtgccaccacacctggctaatttttttgatttttagtagagacaaggtcttgctctcttgcccaggctggtcttgagctcctgggctaaaacaacccttccatctcagcctcccaaagtgctggcattacaggcgtgagccaccccaccctgcctattatccccatttacaggtgaggaaactgagacatcaagatgctaagtgacttgctgaaggtttctgagctaggaacatttgccaacccttgcactgagggttctttgctgttttgtttttctattcagctatttataggttatgccttcagatttattaatgtagccagtcattttgcagtggcatttgctggcctagggacccttctgtttaaggtgattttgtatagctctgatctgttatgaatttgattttggagttttagctcagaaggcaatttgcctactttccctgttgaaatgcttggaagtaaatcatcctggccatagtgtccactgaacaacataaatgttgttttaataccctaaaaatcctgacatgcagctaatttttttgtatttttagtagagacagttagccaggatggtcctgggaggcagaggttgcagtgagccaagattgcgccactgcactccagcctgggcgacagggtgagactccgtctcaaaaaaaaaaaaaaaaatgaaaataaaaatcctaatatgaaggagtgtgggtgaagcgtggatcactgttactgaatcaccctgcagatgctgtcatcctattgtggaaggtgaatgataacaaggagccggagcagatcgcttttcaggatgaggacgaggcccagctgaacaaggagaactggacggttgtgaagactctgcggtaacttgggagggaccatggcagtgatctctgtttacgatgagtgcattaaatggaatataccttttgactttttttttcttttcttttgagatagggtctcattgtcgcccaggctggagtgctgtactgtgatcacagtaccctgcagccttgacttcccgggctcaagtgatcctctcacctcccaaatagctgggactacaggtgcatgctaccatgccctgctgatttttaaattttttttttttttttttttttttttttttagtatttattgatcattcttgggtgtttctcggagagggggatttggcagggtcataggacaatagtggagggaaggtcagcagataaacaagtgaacaagggtctctggttttcctaggcagaggacccagtggccttccgcagtgtttgtgtccctgggtacttgagattagggagtggtgatgactctgaaggagcatgctgccttcaagcatctgtttaacaaagcacatcttgtaccgtccttaatccatttaaccctgagttgacacagcacatgtttcagagagcagggggttgggggtaaggttatagattagcagcatcccaaggcagaagaatttttcttagtacagaacaaaatggagtctcctatgtctacctctttctacacagacacagcaacaatctgatttctctatcttttccccacatttcccctttttctattcgacaaaaccgccatcgtcatcatggcccgttctcagtgagctgttgggtacacctcccagacggggtggcggccgggtagaggggctcctcacttcccagacagggcggccgggcagaggcgccccccacctcccggacggggcagctggccgggcgggggctgccccccacctcctggacggggcagctgccgggcagagatgctcctctcttcccagacggggcggctgctgggcggaggggctcctctcttcccagacggggcggctgccgggcggaggggctcctcacttctcagacggggcggccgggcagagacgctcctcacctcccagacagggcggcggggcagaggcgctccccacatctcagacgatgggcggccgggcagagacgctactcacttcctagacggggtggcggccgggcagaggctgcaatctcagcactttgggaggccaaggcaggcggctgggaggtggaggttgtagcgagcggagaccacgccagtgccctccagcctgggcaacattgagcactgagtgagtgagactctgtctgcaatcccggcacctcgggaggctgaggctggcagatcactcgcgattaggagctggagaccagcccggccaacacagcgaaaccccatctccaccaaaaaaatacgaaaaccagacaggcgtggcggcgtgcgcctgcaatcccaggcactcggcaggctgaggcaggagaatcaggcagggaggttgcagtgagccgagatggcggcagtaccgtccagcctcggcttggcatcagagggagactgtggagagagcgggagagggagagggagacggtggagggagagggagagggagaggatttttaaatttctgtggagacagggtctcactatgttgcccaggctggtctaatttagaagttttatttatatgaaacagtcctaagacaatagttttaaaggatgaaagcataattaaaatggattttcttagtttcggctatacatttttcttagtaaaaagtattcaattttaaagatacagctatcctttttttttttttttttttttttagatggagttttgctcttgttgcccaggctggagtgcaatggcatgatctcggctcaccgcaacctctgcctcctgggttcaagcgattctcctacctcagcctcccgagtagctgggattacaggcctgcaccactatgcccagctaatttttttgtatttttagtagagacggggtttctccatgttggtcaggctagtctcaaactcccaacctcaggtgatccgcccacctcggcctcccaaagtgctgggattacaggcgtgagccactgcgaccggtcagatatagctatccttgaaagtagttttttatagctatagctaatatagtgccagtggaaattttggaatctcattttaatgcttagttctggagattgtccttatatttttgataacttgtccgtttttgagttaataattgctttttgttttgttttgtttagagtcagagtctcactctgttgcgcaggctggagtgcagtggcatgatcttggctcactgcaatctctgcctgctgggttcaggggattctcctgcctcagcccccaagtagcagggactacaggtgtgcgccaccacacctggctattttttttttggctaatttttttttttttttgagatggagtctcactctgtcgccaggctggagtgtagtggcgcgatcttggctcactgcaatctctgcctcccaggttcaagtgattcccctccctcaccctcctgagtagctgggtctgcaggtgtgcaccaccacgcctggctaattttttgtattttagtagagacgtggtttcaccatgttggccaggatggtctcgatctcccgaccttgtgatctgcctgcctcggcctcccaaagtgctgggattacaggcgtgagccacagcacctggctgatttttgtattttgagtagagatgggattttactgtgttagccaggctggccttgaactcctgaccacaggcagtctgtctaccttggcctcccaaagtgctgggattacaggggtaagctgctatacctggggagtaattgcttttttcctctttgtttttggattctaggggccacttagaagatgtgtatgatatttgctgggcaactgatgggaatttaatggcttctgcctctgtggataacacagccatcatatgggatgtcagcaaaggtaaatgatatatttttgttattagcaggaagaaatattctaagcatctataaaagcctaaaagtctaacttgctttaactttttttttttttttttttgagacaggatctcactctgccgcccaggctggagtgcagtggtgcgatcttggttcactgcaacctctgcctcctagattcaagcgatcctcctgcctcagtctcccaagtagctgggactacaggcatgcaccaccacacccagttaatttttgtatttttagtagagacgggtttcatcatgttggccaggctggtctcaaactcctaacctcaggtgatctgcccgcctcagcctcccaaagtgctgggattacaggcatgaaccactgcccctggccctaacttaccttaactttattttttatttttatttttttggagacggagtttcgctcttgtccaggttggagtgcaatgtcacaatcttagctcactgaaatctccacctcccgggttcaagcgattctcctgcctcagcatcctgagtagctggactacaggtgtctgccaccacacctggctaatttttgtatcattaacagagacggggtttcaccgttggccagtctggtctctatctcttgacctcaggtgatccacccgcctcggcctcccaaagtgctgggattacaggcatgagccaccacacccggcctacttgctttaactttaaaagcaacacaaaaaattgttttagtgaactaaagtaggtggttggctcaacaggataggggttagtcccatatgctatggattgtcagagggtaagaggcttagcactggtgctgcaagttactgatgctgaagccaggcaaatcccacatggtggggccagcagataagatgacaggcccgggccctgcctttatggaggttaggatctcgggaagattaacaagtcacttataatttatagggcattgcatgctagttgatggggtaggtgggatcaggtttccattttagaagatcaaggaaagccagggacattctgttctctagttggggagacagtggacatgtgaaaagttatagtggtgtgaaaatagctgtgaaatgccaaaagcaagtatggctaactcctaatcatttttatcccctgccatcctttactcaaactttgttttctcccaaacctcttcctgccaattctacaactcaagtacctgggtagggcagttgttgttggctgccaccgcagcactgtgtcagcccagttctcatccagtctataaaaatttttgctctttttagtaccatgctgtccagccaagccatcctccatcctccgttctgtcttgttttgtgtggtttttttttttattttagatggagtctccctcagttccccaggatggagtgcagtggtgcgatctcagctcactgcaacctctgcctcccgggttcaacaattctcctgcctcagccctcaaggtagctgggattacaggcgcccgccaccactcccagctaatttttgtatttttagaagagatggggtttgcccatgttggccaggctggtcccaaactcctgacttgaagcgatctgcctgcgtcggcctcccaaagtgctgggattacaggcatgagccattgcgactggccaggattttaggttttatcataagtgtgatgggttgttactgaacctcaccaaaaacctcaaaaaaaaaaaaaaaaaaaaaaaaagaatgacttgtcaggcacagtggctcaggcctgtaatcccagcactttgggaggattgctcaagcctaggaattcaagaccagcatgggcaacatggcaaaaccctctctctaccaaaaaaatacaaaaattagctgggtgtggtagtacatgcctatagtcccagctactagggctgctaagtctcttgagcctgggaagttgaggctgcagtgagctctgacggcgccactgcactccagcctgggcaacagaaccacaccctgtctcaaaaaaaaaagaaaaaaaaaaaggaatggccaaggcttcataactctcttgtctttttatgcaggcgatctctgtgtgctaaatattttccccgaagtcccttttccatccctgttcgcattgtctgctctgggccctcctcatctctctcctggtctactcggtcacctcctaactagtgaccctctttgtcatcttctaaacctgtttcacctttaaaatgcagacagcttctcagcttgaattcacagccttttccttacacacaaggtctctgtaatacttctcctttcctccttatcttctgttcttggccctcctctgtacccattagcagttctcagctacctctccctgctccatattcacttcgctaagctgttttaacccagggattccctgacaataccttcttccacccttcatcccctcttcatcctgcctgacctggggaactgaacttagatcttctcagaccctccgccctgtgctgtcagctcccctcccccggtccacatgtgtgatccttgcttgttgatgggtctgtctgatctgtgggctccctgagggtggggactgcatgaagtcatctttgtgaccccagagcctgacacagggttttagtacagagtctctcacttactgcctgctgagtgatgcgtggtaaagggaataatatttaagtcatagtttatactatttgggctcaaacaggttttggtaatgctgttttggtgcgtgtgtgtgtgttttttttgtaggacaaaagatatcaatttttaatgaacataaaagttatgtccaaggagtaacctgggaccctttgggtcaatatgttgctactctgagctgtgacaggtaaattcagctttggcatttacttggaatttctttgtatttacttggaattttctgaagagaggtatttatcgtaacttagccaagatttatcatagtctaactttgattcttttgttcttgttttcatactcattcttacaacataatcagaaattggaaattaattaggacaagtgccttacacgaagtttgtacttagtaaatctttttttttttttttttttttagacacagtctcactctgtcacccaggcaggtgttgtggcgcaatctcacaatctcagctcactgcaacctctgcctcctggtttcaagcgattctcctgtctcagcttccctattagctgggattacaggcacatgccaccatgcccggttaatttttgtgtttttagtagagacagggtttcaccacgttggtcaagctgttctcaaactcctaacctcaaatgatctgcctgccttggccaatgtgctgggattacaggcatgagccaccatgccccgccctgaacttagtaaatctttattattattactatttttttttttttttgagagaggggcttactctgtcacccaggctggagtgcagtggtgcaatcacagctcactgcagctttgacctcctgggctcgagcaatcctcatgcttcagccccccaagtaattgggactacgggtgtgcaccaccacacccggctaatttttatatttttttgtaaagatgggattttgccatgttgcccaggctggtcgcgaactgttgagctcaagccatctgtctgccttggccacccaaagtgctaagattacaggtgtgctacggtgatttttatttttattttttttaaattgttttttgagacagaatctcactctgtcactctggctggaatgcagtggtgcgatctcggcatactgtaacctccacctcctaggttcaagcgattctcctgcctcatcctcctgagtagctgggattgcaagtgtgtaccaccatgcctggctaatttttgtatttttagtagagacagagtttcaccgtattgacgatgctggtctcaaactcctgacctcaggtgacctgcctgcgttggcctcccaaagtgctgggattacaggcgtgagccacctcgcccagcccagttattttaatgactccatttaaatggatataaaaataaactatttttgtgctttctgaaaagaagtcttgttgtcgtgtttactggcataattgcatttaattgtattgttggaacaaagagttagaaaaaatgaggagtgcctcctatattacttaatagtccttttgaatatttatctgactacttttaaataaaacaaattgaatataagatggccttggaataaaagtggtagggaggagttagtgtttatttttcatagaatcttctgttgtattctaaatgccatttattttctgacaagtgtgttttattcagacagtcatcagtaaaacaatctgattagctagtgggagtaatgtgacttaccaattttttttttttttttttgagacagaatctcgctctgttgcccaggctggagtgcagtgccacaatctcagcactgcaacctctgcctcccgggttcaagtgattcttctgcctcagcctcccgagtagcagggattacaggcgcccaccaccacgcccggctaattttttgtatttttggtagagatggggtttcaccatgttggccaggctggtctcgaactcctgacctcaagtgattcacccgcctctgcctcccaaagtgtcgggattacaggcgtgagctaccgcgcccggcctgtaatatcctttaggttgttaatacttgcttccttcttaattacccagttgtgaatatcattggtaaaagcttttgcaggctgaaaactgttgcggtggtaataggctgttggtaataagttgtttctgtgtgaagcataattcatttactagaagtggtaaatcagacatgttctttcttcagggtgctgcgagtatacagtatacagaagaagcgtgtggctttcaatgtttcgaagatgctgtctggaataggggctgaaggagaggtataaaatattttgccattctttttcagcagcgctttaactgagacttaggaagtcatgagctcctcccatacccttgcagccaaatcactggccacaaagagccgattccagaactacaataaggcttccttttggacagtcaaggctcagttactgtggtgggctagtctgtatggaaatggggacatctggagaccagggtagagccactgatggaggacaggacagtggttttcaaccctggttgcacggtggaatcacctgggaagaattacaaatatgggtgctggccgggcgccgtggctcatgactggaatcccagcactttgggagactgaggtgggcggatcacttgaggtcaggagtttgagaccagcctggccaacatggccaaaccccatctcaatgaattgcaaaaattagccagctgtggtggtgcatgcctgtaatcccagctactcgggaggctgaggcatgagaatcacctgaacctgggaggcggaggtcttagccgtgagcggagatcatgccactgcactctagcctgggcgacagagcgagactcgatttcaaaaataaaatgaaataaggctgggcatgatggctcatgcctgtaatcctagcactttgggaggctgaggcaggtggatcacctgaggtcaggagtttgggactggcctggccaacatggtgaaaccctgtctctacaaaaaatataaaattagccgggtgcatgcatgtgatcccagctattcaggaggctgaggcaggagaattgcttgaacctgggaggtggaggttgcagtgagctgaaatcacaccattgcactccagcctgggtgacaagagcgaaactcagtctcaaaataaataaataaataaaaataaaataaaaataaaaatatggatgccttggccccaacctgagtggcgtgattcacttggctggaggtaagcagggcctccatgattctcaggtatagcaagggctggtcactactgatctgggaagatccctacacgaggcaacagaagacaggcaggtcgagcgttggatctgtctggcagcaggcagtttactatcttggcaggtaggtagagagttttgctagcagacagcagagacccagccaaaacactggtatttaggaataggaaggattttgactttcaaataattggcaaatgaaaataggaccctttttgtaaaggaatcaaggctaccgaggcaggcagcgaggtgcggggagcaagctggttactggcttcacacggggacatggtgcaaatgcatccaaggaaccagggtaaggcagtgtgggctgggcgctgacaggcactgagaggtcacacctgtgaagtaagaatagtaatgcttcccgggtgcggtggctcagcctgtaatcccagcactttggaaggcagaggtgggcagatcacctgaggtcaggagttcgagactagcctggctaacatggtgaaaccctgtctctactagaaatacagaaatttgctgggcatagtggcgcatgcctgtagtcccagctactccggtggctgaggcacgaggatcactggaacctgggaggtggagtttgcggtgagccgagattgcgccattgcactccagcctgggcaacaagagcgaaactctggctcaaaaaaaaatatgtgtatatatatgtttttgtatatattatatataatatatactttaatatgttatatatttatattatatataatatatttttatattatacataatatatatttttatattatacataatatatatttttatattatacataatatatatttttatattatacataatatatatttttatattatacataatatatatttttatattatacataatatatatttttatattatacataatatatatttttatattatacataatatatatttttatattatacataatatatatttttatattatacataatatatattttatattatacataatatatatttttatattatatataatatatatttttatattatatattttatatatataaaaatatatctattacatatatatatatatgaatagtaatgccggcttccttgtgttcttaagaattaaatgcttgtttgtttgttgagacagtgtctggctctgtcacccaggctggagtgcagtggcacgatcttggctcactgcaacctttgcttcctgggttcaagcggttctcctgcctcagcctcccgagaagctgggattacaggcgtgtgccaccacacttagataatttttgtatttttagtagagatggggttttgctatgttggccaggctggtctcgtactcctggactcaagtgatccgcccgccttggcctcccaaagtgctgggattacaggtgtgagccaccatgtctggcaaatgcttgatgtttataaatagtagtaaaaactgtcccagacaggtgttaaagaaatgttgttttaaaagattaatgattaccagtttaataatccactattttctttttttaaagggtgcatttgttaatagctggatgtggtggcatgtgcctgtagtcccaggaggctgagacgggaggattgctttgagcccagaagttctaggttacagcgacctatgattgcgccactgcactctagcctgggtgacagagcgagactctgtatctaaagagtgcattcagttggaaattctaatgaatccacacagatagaaagcagaggtctcctggtcatcttcccactgtctgccagtctcaggccccagacatgccactattgaccctgtggtttgtgttcttaagagtttttaaaaataattttagaaccacataaaacacacatatatacatatagctttacctaacaaaaatgtgtggtcagttttcatgaatgtttacccttgcagtgttgtacaattatttgatttgtaatgtgtttcagtttcatttatgattatgtcaacaataaatgacactatgtaaagaaaaccataggcacatatagcagttgggaagcgtttatttgtgagtgtaaagatttggaaaaatgtttaagctttgtgtgtagaaaacaaacaaaaaaaataataaaaataaattttgtgtgcgacaggcaagaagctaccggatgtttcacgacgacagcatgaagtctttcttccgtagactgagtttcactcccgacggatctttgcttctcacgccaggtgtgtttcgtagctttggacttaaaggaatgatggccgagtggggatgtctgctcccgttttacgctgcagcttatcagctcagtgaatgctgattagagtgggggtccccgacttacctgcccattggaacctccaggagagcttcaaaaaacacattggtgcctatgtcccatccctagagattgtagtgtatgtaattggtctgggtggcctggcttttggaattttaagaagatttccaagtgattgtaatgtgcagaaaagtttgggagtaatgagtttaaaatgataggcattttctcttagataaatttaacttttggctgggcacagtggatcacacctgtaatcccagcactttgggaggctgaggcgggcggatcacttgaggtcaagagttcatgaccagcctggccaacatggtgaaacaccctctctattaaaaatacaaaaattaatgatgtggtggcgcataccctgtaatcccagccacttgggagactgcggcaggagaatcgcttgaacccaggaggcagagggtgcagtgagccgagatcacaccactgtactccagcctgggcgacagagtgatatcttatctaaaaaaaaaaaaaaaaaaaaaaaaagaaactttactatttaaaccctttcaatgaatgctttttcattcattaacatgtgtatggaagccatagcgctaaagccaaagataaagctcctttattgtttttattctcctcaataaagcgcatttgtgacaggattagactcatggacaaacttgtggaagcagcagtggtcaaaatcaaaaggtcagccaagtagcaaggactagataggtttattgtccctatgtccctaggaaggcaaggggctcagcccagcaagataaggctaggcattattgtggccacagtgttctcagaggagaatgtctgctcattgccgtggctccaggaccatcctgtgcatagagatgacaacatagcccagggttgggccaaacgggagggcactgtcttggtttgccactgagtcccatcccagctgagccagggagggcctgagaagggcgtgaatcacacatgcagctgtgtgggtggggctttaaagaacactgcggaacatgtgcgaatgacactttggcccaagaagtctcaggactaagaataagtagttgtttaggttatatttactaaagttagttattaaaagttattcactaaacccagtaataaatccttttttttttttttttttttgagactgagttttgccctgttgcccagctggagtgcagtggcacgatcttggctcaccactgcagcctccgcctcccagtttcaagcgattctcctgcctcagcctcctgagtagctgggattacaggtgtgcgccaccactcccagctaatttttgtatttttagtagagacggggtttcaccatgttggtcaggctggtctcaaactcctgaccttgtgatccgcctgccttggcctccgaaagtgctgggattacaggcttgagccaccacgcccggccctttttttttttttaaattatttattttatttatttattaatttatttattttgagatggagtttcgctcttgttacccaggctggagtgcaatggcacgatctcggctcacagcaacctccgcctcccgggttcaagccattctcctgcctcagcctccggagtagctgggattacaggcatgcgccaccacgcccagctaattttgtatttttagtagagacggggtttctccatgttggtcagtctggtctcgaactccggacctcaggtgatctgcccaccttggcctcccaaagtgctgggattataggtgtgagccattgcgctggcctttttttttttttttttttttttttttaaaaagcagagtctcgctctgtcacccaggctggagtgcagtggcaccatcttggctcactgtagcctccacctcctgggttcaagcgattctcctgcctcagcctcctgagtagctgagattacaggcgcctgccaccacaaccagataatttttgtatttttagtagagatggggtttcgccatgttggccaggctggtcccaaactcctgacctcaggtgatctgcccaccttggcctcccaaagtgttgggattacaggttacaggtgtgagccactgcgcccagccccagtagcaaatcctttactatttggccactctaaaaatattttcaattaaaatcaagtagcaaatggatgtctgttatcaacgttattgttctttgtggtgttagtaagtgtgggaaaaacaggaaaatgaaattacaaagattggaaaagaacagataaaaaactgcaataggattgtatttctagaaaatccaagagattttaaaaatagtattagaatttttaaaataatttgataagatggctggatattataaaatatataaaaattcctatctttcgtctatattggcagtgagtacttagaaatggaaggaggagaaatatttcattcagagtagtgcaaaacctgcaaaatacatagagtaaatttatttatttatttattttttgagacagggtctcactctgtcacccaggctggagtacagtggtgtgatcatggcccactgcatcagccttgatctcctgagttcagggaatcctcccacctcagcctccctactagctgggaccacaggcgtgtagcaccatgcctggctaattttcttatttttttgtagagacatggtcttgctatgttgcccaggctggtcttaaactcctgggctcaagcaccccttccgcctcggcctcccaaagagctgggattacaggtgtgagccaccacacccaggcagaagtaaatttaatgagaaaggggcaggacctttatggagaagtctagaaggtcttactgaaggttataaagcaagttctgaacaaatggaaagatatgtcgtgttctaacaattaacatactaatttcatttccaattagaattgcattaaagtttttttttaattggatgaaatctcagctttgtttagtagaataaatgctgaagaatagccaaagaagtattaaaaaaaaaacagtgatacttgggagggcatttgcctcaccacatatcagaagatcctataacactacttttagccaatcaatatggtgttgctataggaccaaacaaatagattagtggaccagaacacagaatccagaaaaagatctcaggatataaggcgatttaatatatgacctcaggtgctgttccagtggaaaaaaatctattatttatttgtaattaattgtatgttacttaaataattctcaagagaattagacactgaaggcagataggacaagagtatgtcattaagaaggttgggaagtgttgagattggacaaagacctattcctcttttttttgagagggtttcacccttgtcgcccaggcttgagagcattggcgtgatcttggctcactgcaacctccatctcctgagttcaagtgattcttctgcctcagcctcccaagtagctgggattacaggcgccggccaccatgcccagctaatttttgtatttttagtagagatgaggttttaccatgttggccagggtggtctcaaacttctgatctcaggtgatccacccgcctcagcctcccaaagtgctgggattacaggcgtgagccactgcacctggcctccttttttttttaattgacagatgaaattgtatgtagttgtgtatgacatgatgttttgaagtatatatatgttgtggaatgactaaatctagctaattagcatagcatggtctcacataattaggatttctgtggtttgaacgctttatatctcttagcatttttcaggaatataatacattgttatgaaccataatcaccatgttgtacaagagatggatcttgcaaagggaggactctattattgaatgagtagtgctggggtagccagctatgtggaagaaggtaaaattggaccccttgcctagatgtaaaaaataaattccaggtgaattcagtacttaaacacaaaaggtaaaaatagaaaactcttgtaaggaaatataggaggacattctaggaatggagaagacccaattaagactggaaactggctgggcatggtggctcaagcctgtaatcccagcactctgggaggccaaggtgggtggatcacctgaggtctggagttcaagaccagcctggccaacatggcaaaaccctgtctctactaaaaatacaaaaattagccgggcatggtgatgcacacctgtaatcccagctactcaagagcctgaggcaggagaatcgctccaacccaggaggcagaggttgcagtgagccaagatcgcaccactgcactctagcctgggcaacagagtgagactctgtctaaaaaaaaaaaaaaaaagtatatgttcaaggatgcttattgcaagcattgtttatagtggtaaaaaaccaaaagccaaaaaaatactcattaacagaggctgggtgaatgaatcttgcagtaaatattatgcagctacaaaaaaataatgcatcagtgctatgcaagttaactttcatgagtagttgattgaaacaagcaaaataaggagaagtgtcagttttgtaaaacaaatggactcaataaaaaatatcatagaggtatacatgtgattgagttataactgattgtaatgattatgtgagcatggaggaaatatacagatgacataatggtttgttgaatgttaaaatggatttcttggggatggaagaatggagtgggatgaaaagaggggcctgggtgcagtgactcacgcctgtaatcccagcactttgggaggcggaggagggcagatcacttgaggtcaggagttcgagaccaccctggccaacatggtgaaaccccctctctactaaaaatacaaaaattagccgggcatcgtggcaggtgcctgtaatcccggctactcaggaggctgaggcaggggaattgcttgaatctgggaggtggaggttgcagtgagccaagatcacgccatcgcactccagcctgggtgacagagcaagactccatctcaaagaaaaaaaaaagagggcagctatgtagaatgtattaataataataataaaaaagactattgatactgtctactgccctccctggtggatatgaaacagtcatatgtaaagttacgtgtgtgtatatgtatcaagaaatagcataaaacagggagatgtttccaagagcagcagtgtatgatggtcactctgacagggctgaactgttttaagtacagcagggggtgagtgtagaagagctctcagatggggactgttccccagagtgaagtcaggttctgaaggaggctggaggtttcagcagagggcaaggtctcctggcagcctcatggctggatagggaagttggggaaaggcgagtctcagcctttggatggcatccaaggctggaatccaggaaatagagatgagggtcctagggagaaaggagcctgggcagctgaatctagtcacggtgcttcaatcgaggaattgcctggaggctcaacggtgccctatggcaaaggctcactatgttctcctcgcccaagatcagaaccaggtccccggggattgcccacaggtaggtggagatgacaggtaggtagaactggagtaagggctgagaacagacagtgccggaatatatgtttttgtgctctgtcacaacattgtccagagaatataactgcagggggaagtattttgcaaaccggacctgaaggctcttgagtttctgttggtgaacagtttgctgaaacagtgacttttctttcctctccctcccttccctgttccccagctggatgtgtggaatctggtgaaaatgtaatgaataccacttatgttttctccaggaagaatcttaaaaggtatgcagtcaaggaaatgtttgaaatgtttacattttttttagacggagtttcgctcttgttgcccaggctggagtgcaatggtgcgatctctgctcactgcaacctctgcctcccgggttcaagtgattctcctgcctcagcctcttgagtaggtgggattacaggtgcccgccaccactcctagttaatttttgtatttttagtagagatggggttgcaccatgttggccaggttggtttcaaactgctgacctcaagtggtccgcttgcctcggcctcccaaagtgctgggaatacaggcatgagtcattgcacccggcttgtattttttttttttttttttttttagtagagatggggtttcgtcatgttggccaggctggtcttgaactcctgacctcaggtgatccgcctgcctcctcctcccaaagtgctgggtttataggtgtgagccaccgcgccctgccaaaatgtttaccttttatttttgcttttgcttagtcacagtgccttttcctaacactgcaattaatccattaggcccatcgctcatcttccatgtcctggaaaagccactcttgctgttcgctgctgtccggtctactttgaactgaggccagtggtggaaacaggtatcctcagagcctcaggggtgtgttatgttttctctccgaaacaggtcaccagagtggggtggagatttggattctgtcttatggggaaaggtgggtatctgggtttggttcagttcagttattttaaaaatattttatttttacatttaaatctatttatttatttattttgagaccaggttatcagcctggttaatttttgtatttttggtagcgacagcgtttcaccatgttgccaaggctggtcttgaactcctggactcaagtgatccacctgcctcggcctcccaaaatgctgggattacaggtgtgagcccctgtgcccggcctggtttagttatttttaaaagctggagcaaagactggggttatcaaaatacatgtcagtttttttttttttttctttcttcaggatatattttcttgcttaaggcactttaaaaggaatggacgtactccttttgtttgtctatgtctctcattatcaattttctttttcttttttttttttttgagatggggtcttgctctgtcgcccaggctggagtgcagtggtgcaatcttggctcactgcaaaccctgcctcccaggttcaagggattctccctcctatcctccagagtagctgggattacaggcgcatgccaccacacccagctaatttttgtatttttagtagagatgggattttgccatgttggccaggctggtctcgaactcctgacctcaggtgatccacccaccttggcctcccaaagtactgggattataggcgtgagccatcatgcccagccattttctttgttttcttgtgcttggggttcattgaacttcgtagatctatccgtttatagtttttattacatttgggaagtttcagccatttttccttcaaatgttatttctgttattcccttctcttattcaaatactcccattacacatgtattatattaggtcctttgaaattagttcctggcctttgatactacttactttttttgtttttttcttcttccagtgtttgattttggaagtctctatagctgtgttttgagtttgctaaccctttcttctgcatgctctgcccttggtcccatccagtgtgtttttctttgttgtggttctcatctctagagattcactttgggttttccttatatattctgtgcctctccatgctccatttttcctcttgctgctttcttttttttttttttcttgctctgttgcccaggctggggtgcagtggtataatctcggctcgttgcagccttcgtctcccaggttcaagtgaatctcccacctcagcctcccaagtagccaggattacaggtgtgcgccaccacacccagctactttttttatttttagtagaggcagggttttgccatgttggccagtctggtttcgaactcctgacctcaggtgatctgcccgcctcagtttcctcttgcttcttaagcatatagagtgcagttataatagctcttttaatgtccttgtatacaggttggttttgatttttttctcctcattgtgggtcatatcttcctgtttttgtttgcctggtactttttgattagatactagacactgacttttactttagtggatgctggatgtatttttattcttataaatattctttttttttttttttgtgacagagtcttcctctgccactaaggctggagtacagtggtgcaatctgagctcactgcaacctccgcctcctgggttcaagcgattctcctgtctcagcctcctgagtagttggtactacaggcacacacccccacgcctggctaatttttgtatttttgatagagacggggttttgccatgttgcttaggcaggtctcaaactcctgagctcaagtgatccacccggctcggcctcccaaagtgctgggattctaggcgtgagccattgcacctggtcagaagccttgtttctgtggttttactttgtctctgtccccaacccccaggtgtggagctgatgagtctgccctaccgcctggtgtttgctgtggcctcggaggattccgtgcttctgtatgacacccagcagtccttcccttttggttacgtgtctaatatacattaccacaccctcagtgacatttcatggtgagtggctgctaatgagggagagtgagtgaaggagaccgtggctgtatcctggaagacaccccggggttagggagcatttcattactaaagatggctttgggggacatattcaccaattttgtttcttatttatttttttgagaccaagtatcactctgtcacccgggctggagtgcagtggtgtgatctcgtttcactgcaacctccacctcccaggttcaagtgattttcatgcctcagcttcccaagtagctgggattacaggtgcgcaccactacgcctggctaattcttgtggttttagtagagatggggtttcgccctgttggccaggctggtatcaaactcctgggctcaacgatcctcctgccccagcctcccaaagtgctgggattacaggcgtgagccaccacgcccggccccaattttgttttttaaaggaatcaacattaaaaggaaagccgtttctagtttgccacaatacttgcttcttattttcacactggtgggttttgatggcattcagattgccttgtggggttaactggactttgataaactgaggggaggccttgtagactccctggccatttggggacttctgaggccctctgggaggaagcccttccctgcatgcccctgctgcccaggacagggaagtgccccaagctgggcctgtgtagaggatgtcactcagcactgtccttctgccaccttttggtccccaattcagcccccgtggcctgcttggcccagtgtgaggttttttttttgaaacagagtctcactgtcatccaggctggagtgcagtggaacgatcgtggctcactacaacctccgcctcctgggttcaagcaattctcctgcctcagcctcccgaatagctgggattacaggcgcccaccaccatggctggctaatttttttgtatttgtagtagagacagggtttcaccatgttggccaggctggtcttgaactcctgacctcaaatgatacacctgccttggcctcccaaagtgctgggattacaggcgtgagccaccgcacccggcctattcaagtgaaaattgctagtagcacagataggttgcagcgacttagcaaatcgcgatgaaactgcatgagtgagtcgctatcacacactcttttccagttgtatcttttccctggtttttgccttcaaacaagcttgtgattttgctcgaacttccctcttctaagtagatgtgagagtgttggtaaggtctgtaacttttccctgttttggggacgaaggtccagcgatggtgccttcctggccatttcttccacggacggttactgctcatttgtgacatttgagaaagatgaacttggaattcctttgaaagagaagccagttttgaacatgagaactcctgatacagcaaagaaaaccaagagtcagacacatcgagggtcttcgccaggacccagaccggtagagggaacccctgccagcagaacccaagaccccagcagccccggcacgactccccctcaggccagacaggccccagccccaacagtcatcagggaccctccctccatcactcctgctgtcaaaagccccttgccggggccttcggaggagaagaccctgcagcccagtagtcaaaacacaaaagcccacccatcccggagggtcactctgaacacactgcaagcctggagcaagacaacaccccggtaagaacttgttggaacaagatgtcattgcaaaatgaaacacaaaatgcagacagaacgctcccaccctgctgcaggtgaaatttcaggcggtgaatgcttcatgccagtaggttgccagagagattcttaacttcaaatccgagagtgtcatttcttgcatataggcctctgtttgttcctccagtttctgcctgtcagataaagcccaggctcctatgcacacacacagactgtgatttggctgcagcctgtcatccaggactgtggccactctctctcctgagtctgtggccttcatctccggcctagtcctgaatgtcatcttcccagagcactctctgccctttgaggcctctgtccttcccttctctggggaagccctggacacctcttcctcttggtgatgccaggagtctcctgaaagacccatttcaatgtaccctctctgtttgcagtctttgtggcccttcagcctttcccttgtcaccacacatcagattccatagcaggtgctttgatgctccagttcccctgctggttgtgagcccccaaggacaggaagcaggtcccattttttatttatgctgttctgcccaggatgtaggcaattccaggagtgtcttcctgagactgcgtttgatgtctccagcagcctggtcggtgagaaacggaggtcctgatctgataacaaataatccccaggaggtgcagagtcgtttcttccctgcttacatcagtgtggctggcacgcacgcctgtgtctgccacttctactggatacagagccacttagcacatccttctgccgtcaggcagcacagcctcctgtttccattcttcccctgcagctgatgtccagttacccctctgatcctgtatagttccttctccaccaagccctctgcctcccaaccttcccataaactgagtcacgaggagagctgggaagggggatgcagaggggagtggtggggatggtgagctggacagaagcgccctgtgcctctcagcctctcctgcgccaataggtcttctttggcaagttcataatatgtgtatgggttgctggctttaacgccctcttaaaatctctcatttctttctgcagattagcaatgtattttacaatttttctgtttgtttttatgtgacggaaggtattccttgaactatttttggtattaaattatttttcccctcttgatttcttctgaattatttaccaagcttcttgaagatgtaatcttttgcaaacaagaatagttgttgaaaattaagactctgggtttttatttatttatttattcatttgagacagggtcttgctctgttgcccgggctggagtgcgatggcatgctctctgctcactgcaacctccgccttctgggttcaagtgattctcctacctcagcctctcaggtagctgggattacaggcatgcgccaccatgcctggctgactttttgcatttttagtagagacgaggttttgccatgttggtcaagctggtcgaaaactcctgacctcaagtgatctgcccgcctcagcccgccaaagtgctgggattacaggtgcgaaccatcttgcccggcccaacgctctggattttaaaaaagtattacctgtgtttcgacgctttctatatatagaaaccatatctgactgccttttacagcagccagcagagtgttcacaagaccgtcggtaatgaacagaacacaggttttgaaacttttcgatgactggttatggtttaagttgactgttataaatgtgatggtttaacttaatacatgaatgtaatcctcagttattaaacaagtgggcacatcttactatttaatgccttgaaccagaagttcagctgaaaatttaagtatttcctttggtagttttgaaggttggtatcatacataaacaattcctgtgatactaatgagccatcacccctctacttttttttttttaaatcaaggagaataaacttaacacccttaaagacggacactccaccaagttctgtaccaaccagtgtgatttccaccccttctacagaagaaattcagtcaggtaagtaatattgttactggtttaatataatgaaaggtagagtatcttttcttttgttcttttggaaattaatgccgcctaattttaagtcagttctgagacagcagggatgcatcttattggaaccattgtttaaacccgccggctgcctgtttacgcctcagcagggggcacctggccagtgagagcatcctggtgagccagggagtgggttcagcaggagattgtctagctcaggtttctccacctgatgactgctgaccttgtgggccaggcaattctttgttgtggaggactgtcctgtgtattatgcgatgtttaacagcatccccggctgctacttcttgcccatgacattctttttttttttttcttttttttgagatgcagtcttgctctgtcgcccaggctggaatgcagtggcacgatttcggctcactgcagcctccacctcccacgttcaagcaattctcctgcctcggcctcccgagtagccgggactacaggcgtgcgccatcacacccgggtaatttttgtatttttagtagagtcgggggtttcaccacgttggccaggctggtcttgaactcctggcctcaaatgatccacccgcctcagcctcccaaagtgctgcgattacaggcgtgagccaccgcgcccagcttgcccatgacattcaaaaatgccactagacattgcccactgtcccttgagaggcaaaatcgcccctggttgagagccactctatagaacttccattatatcagtataggatcttgccaggcagctcagttccgtgtcttggctctgtattctgtaaatgtcagcccttgacttccagaattcttcatttacttgccaaccttatgtttgttaatgttgcagagacgcctggagacgctcagggcagtcccccagagctaaagcggcccagactcgatgaaaacaaaggaggcacggaaagtctggacccttgatgggacctcggcttctgctcgaagcctaccaggctcccggtgtgtgcagggagacggtaaagctggaggtgcctgagaccagggcttccatggagcgggacacactgtaaatggatttctataacagaagtgacatgtgtactgatttttctccagaaatatggatgctgttgtattcagtatccatttttaacttgggacatgaacgttttaacgtagtaaatcctctttttgatgagtttctgaaactggagcggttcaacgttatccagtgtgaaaatcagtgagtcctccctggcatcctcgtgaaagtgcacacacttcatggagggactccttttcaataagaattaggaagatgagaaagtaatttgagattttactctgtcgaattttagagtatttgaagtgattgttagatttcacttctaaggagttgattgattaaactttggaaggta

SEQ ID NO: 297 - DNA, 32744 bp, Homo sapiens
  source 1..32744: mol_type = other DNA
gagtaggcgcgagctaagcaggaggcggaggcggaggcggagggcgaggggcggggagcgccgcctggagcgcggcaggtgagcggcgccggtaccagggtcccggctcggggtccgggctggggaggggaacctgggcgcctgggacccgccgatgccccctgccccgcccggaggtgaaagcgggtgtgaggagcgcggcgcggcaggtgagtgcgcccgagggtcgagcgctggggccagccgggcagggcgcctcccggggtgctgggagagtgctgggcgcctgggaccccttgcgcacggccgagagccctcgccgcccctgttggcttggcatcgcgaggttggggcaggtggtcctgcgagtccctagccagttggtggaagagagtcccccggggtccccaaagctggctcctagtccgcctgccctccacggcccccgcctgggagcaccggtgcgccttttctctttggggaggaggactgggagtgctgtcggttggcttctttgtttgggggaaatctctgcagtcccgcagtgttacctgaactccttctgcttcttggttccctactgaggtagggagaaactggaaactcgctgagatgccgggaacgatacggccggcgcggcggggaccgctgggccaggctgctggagggcccccgggcgaggtgcgaacggccagtcagtctcggggagggactgctcgcgactcaggccccgttgcggcgacccgctggcggcgatcagggccggggcctcctggacacccggcaccggcaggaacccgcccgggaggagccggtctggctcctccgcttgcgctccgtgccgggttggggggaaggcggggcacctgggcgcttcggtccacctcatcctgtcctgcccggctcggcacagtggcaccctgagtggtcaagtgctccagtctggcagtgggcgctctgctcgagcacgggtccagctgaaaaactgccccatgtccagaaagtttgtgcgccgagagccctgagcgcttgtggcagaggagggccttcgcccgctccgccgtagagcacagcgcggtggccctgaatcctgttcagaacgccctggtggcagccctaatcacgaggaatcctggtggcttgtttgggaaggaaaggatagcacggcggcccgaggtgagccctgtgggcagggagcacccagggctcgccttcgaggctgcgcagcccttccctccgtgcgaacctgtgcagtggtcccgcgggaaagatgagcgcatcgcgcccaaggcaatgcctgacctcacggagctcccagccgcgagaacctcccgaatcatggaaaattacaaaggctacgcagcccagttacaaggcatttggaaaacctaaagtgagactaagtttgttgacctgtcccaggagatctgggaaggtactccaggaagtggggatgcagccagcctcccctgaaggaaggatgggggttgggagtgtggcagggagagtttaccagcgcaaagggccttggggacgcaagtagctaagtcagtcctggctcctgagctgctgctgtgaagggaggacctggtgggctaggtaaccgggagctcccccagaaagtcactggaggttgctcaggacttccccacctttactgagtgcttttgaagaagtaggacctgccctgctccgctacagaactactggacaggtgaggttagaatgaaacctagcaacaccctcgggtaaggacacactaggctggagagttcggggtgcaacctacgggctgagacctctgcctggagatggccatctacacctcggcctctggttatttttaattatcagctggtgagctggctgggcttttgttctctgcttggacatttgtttggtccccagcagcttcccttattcccaccagccaaggacaaccttctaacaacaagcttgtgctgttgctggagcctcaggcagggcctcccaggttgctaggtgctggcctgcctggcaccgttggccactctatcttgaactcaagtcaccttaattgtaggagtatatttggctgcactggcattataataataaccacagacattgatgtggcacttttttcagccaggcatcattgcaaaccctttataatgtacttaactcaattgtaaggaaactggggaagagaggttgggaagcttgtccaagatcttgtaacctgtaaggggcagaactggggataaacatggcctgtctggctccataggtcagtgcttccagtgtcgggctctgagttggagacacaggatgcttagaaggggctttagtgacaatcggcacagtacggattccttttgatccttccctgggttctccctccaggatgttggaatgttaccagcaagtggaggaaaggagggaaggaagctggaaacaaggcgcccggaatcctgattgaaaagggcttgttcctgggccaggctctggttctccccgacctgaaagagcccagcccctgcccacagccctacctgggctccgtgctgctccctctagcagtatgacatggccagagtgcctggaactctgaaagggggcctgcggagggctgacctcctaggccatgggggcattgagtgacaagacgctggtgcaaatgtcctgtaggtgaaaaggtagatgcgtgcagtaccttatgccagtaaccaccaccaccacgatcatcatcatccgagtgtgttgtccccctaccaggaaatgtaaaccaaaagtctggctgataactcttacccttttccacctgaatctgcggcaagattccctaggggatcttcgtaataatatgggatcattgccttggtcccaattattacatcagactctgagaatggggcccaggcatcttatttatttatttatttttctaagccctcttgaaaattctgggtttggggagcactgatcagatctaagccttggacattgaggtagaaaggaaaggtgaatggtcaatggagtgcttgttcagttttggttgctgaagacttggaaagtggccttgctagtggggagagtgagggcagggagagctccctgtggggaaccagagagcccaggagcattgaaggcccaggtgcatttctgctctctggtccctcctgctctgcactccctgagtgtccctcatcccacagtcaccaggcctttgctactcttccccgcccctccttactttccaggacacctgccaggggatcctccaatatgggatgcactgcgtggcctcaggattggggtgcaggagcattatgtacctgagagctgaggcctgtatggagtcagcctttgtggggcccctcctggccctaagggtgatttgggaagccctgacttgcaagcaccaggggtatgggcctgggtgtgaagaagggggcttatgatgtccccatggccattgaccaccttggccccaccgagcctgtggacacccaaggaggagcaaaagggggatctgtgacagggtagcagcttggttgagcacacaggcagctcttcagcatgacctagaacagaggctgggctccaggaggaggcagagcctgatctgggacttggttattcctggttgctgagcaatggtcaggagagaggaactgaatgagtggaaatgcgctggttgggagtcgaggctggttttctggcaggggtgtgggtggttacttttgttgtaaacagagtgaagtttgagagggcaggaaactcgaagacaggcttttcatcctcctggaggtgagtctgggagagggaggtgagggctctgacatctatgtgtggatggcgctgagccattgggcatccatggcaggagggcaggaggagtttagggcacagagttgtggtaagaaagcaggaagtgtttgaagggcaccttggcttgtggttgtggcagcagaagtctggaagttcactcaagggcagactaggtggaaaaatcggggctgtcaagtgggactcagaatgagaggttgtgacaattggatttgttagaaaaatattttcaagcgaggtctgacttggcagatggaactaagctgaggctttttattattgcttgtttgtacgaggtgcacaatgcagtgtcaaattccctttaaggccattgctttccaaggggctgtcctggcggggcactcagcctgaccccactgcagtatagcccaggggtcatgggagaccatgctttctagggacgatgggcttggagttctttgtgcaagatactgataacagagaatttgctgacattttcaagttcactggtgatgatgcatttataaggagttgggagtaatatgaaagatcactatgtctggtcttgatgctcaagcctaattctgttctggaatatgttggagaaatgatcctccagtcttgaaacatacatttttaggtttgaggaattcggtacattctaaggtagctccaggccatatgtgaactttctaattgttggaaccttgatttccccagatagaatccaagcctgctcttctggaaattctgatcatgattctggtattgtcctttggatgtatgcagaataaactgaattccttttccacatagccggctcttacgtgttggaagataaaccttatctgccatcattatgttattattgagtgctcaccatgggttgggcactgagctacggccttgctttctcacttaatccctgcaacaaccctatttctgtatcatccccattttacagattgacttggacaagttctttaagcctcagccagtggcttgtgtgtggtgttgaagtctccgcctggagtgacctgagggcctctgccgcctgcctgcctgtcatgccaggttgcactcagcttgaggcacctggactcctgggaggtcacccactgtcctgacttgggctgctggtgttgtctgggtgtgggcatcttatcgccctctgctaaatttcatcttactcatttggcctttggaactcaaaaaatatatattttttcctgcaaattgcattgtatttcaaatttacatttccgatcgtctgttgttggtatataaaaacacatagatttttatattgatcttgtatccctcaactttgccaaacatgcttattaatttttccccaatagtttttggggtacaggtggtaagaactccataaaaacatttaaatactgtctttgtaagctacaaagtgagatttaaaaaacaaacagaaagagagagaaccagacctgatatctgccctaaaaagtttgtaatctctttgggacaatgagtcattcacaggaaaagaaacttggatgatgcaggcaatacctctcctaaggtgatctttctgtttctcgctcaacctttctctctcagtagaactcttgtgccaatcattgtgtatgcaatttacctgattatacataaacaagtttctgctgaacagccactgaaatccactgttggctaactcatttagtcatgcattctatccttaggaggatagaacatctcgttgtataatgtgatattagtgcggttattttggcataaagggctctttttgatgatttggtcattggctgggatgtgtccgtggatggtggtggtggtgctgtctggattttgaagaaggggcactgagtctgaggctgtctgttccctctcacacctccagcaactcgaaccgtaccagtcacaggtgggggcttcgagaaggagaaggtgtgtgcacaatggtgcacggtgaggtcagtggagacttcattgcagagaatacccctggatcttgggtgggagtcagtgtctacaagcctaacttcattcgcgttggcttggttgtttggaaagtaagtctccagtaaacgtgtcctgagatctccagaggagagaaactaggagaaaagattcttgttttggcagtaacttcatcatgtcatgggatgcggatacgatgccacagcatcgtcctgctgcatggtggccaggcaggtgactcatgggctgactcagctctcagtccaggatggaccaaaacagtgcgaggacagctgtgtgccattgtgagattcaagtgggtgacactgtctgtattgaaggaagagctccctgccagccaggaatggagcctgagtgccacccactgttgctctttcacacttaaaggaaaatttccccaagtgctcatggtggctggctttccagaattgagagccatcatcccggtcctttaaatgacaggagcaagcattcgctaaacagcattgtctctcgccatctactttacgtcttgctcctttcagaaatgagttaatgcgatgtacaagcttgtgtgaatgaggaaatgcctgttttgaagatgaacaggactgaatgtgatttcctggtcttttcgggacagcagtgcttccccttgcagatctaatgtcagagcgggacattcccccccttgttttattttcaattggagaatgttgttgttgtttcttttttttttttttttttttttttttttgagacagagtctctctctgtcacccaggctggagtgcagtggcctaatcttggctgactgcaacctctgcctcccaggttcaagtgattctcctgcctcagcctcccaagtagctgggattacaggcacccaccatcatacccagctaatttttgtatttttagtagagatggggtttcactatgttggccaggctggtcttgaactcctgacctcaggtgatctgcccgccttggcctcccaaagtgctggaattataggcaggagccgccgtgcccggcccagctggagaatgttactggcagcatcactctggtcttccattccaaagtccatggtaactgacttgggcacacggaatatttttgtttatcatgttctgattgctggaagagataggattatcctgtgactgcctctgggtcccatggcttttatttgacaattaatggtggtggctcccggtgttccttccttccctggcttccttgttagggatcgtgaatgaatagcaagtgtgggttttgagtattgattcttcactcctttcagagggcttctgagctgggagagctgccaatgggatcgaattttcacttcctgaaacttcaaccaaacctgtaactggggagataggacagccgagaaaccagaggcatgaggatgtgtttggttaggcaggactctttgaaagcaatcttaggatggtactgagttctgtcctgcttatgagacaagaatgcgggatttattgtgttgtcaagcctgaggatcctctctcttcacaaagcagacataggcaaggtctgttaagatgtggctaaaaggcttaaacgtttttgatacattttaaatggtgatccttcccacctgtacattagtcactttcctttccttatacccaggaaggtgtgaactttagttttaatcctagaaaaagtcccaaagctacaacatgacctggttcttgtatttttatctgtaattgaagagtaaataaatgattggtgcatgtttgttgtaacctgttgggtgaggtttctcgagactaaaaagccatatactcattttcattcatggcaggctgttggggttttatagtttaatgattcagcaaccagttctgcttaggacacaggaaagcgatggtgtactgaagccggccccactctacttggctccgtggtgggcttcatgttggtagcctgggaatacttaccgaaggcaaacctgcgaatcaagacagccctcttttccttcagcaggttgttaaatgtttatcagctttataattcctcttatttaatggaaagttatatagcactcattttatgctaagcatgaagcacttcattagtattaactcatggaatgccctggaggtaggtgttactattatctgcatttgcagatggggaaactgaggcacagaaccttcaatagcttcctccaggtcatggagagtgagtggctgagcctgagtttggatctagagtctagtctcagaggtcaggggctgaaccgctgcccagtgctgcctgctgctgtttgagcacctgctttgtgccagcaactgggaaatattcttctgtggccatgtcacagacagtggacactggtctggccaggtccgaagcccagagcctcctccaggttcttgttccctcattgggaacatggtcttgtggacggataatcttgaaccccgtttcttaaaatattctttggtcatttaaagccaagcgggaaggggtggaaaaaagccctttatttgctcaggaaggtgcatgttaaagaaaaaaaaatcgtccaatgagacttgttaaaatggtgaagcgaactttattcaggaccacggaggcaggtacagggaccacagccagcagattttgcagtgggaagaagagactgggatccgcttgagtacagtatgggcaagtgggagttaatttataaccaaggatcagggtggggttggtgggtggaaaaatcacaaagagaaaacatcaagggtaagggggattctggctaaaccaaccaaacaggattcttgctgaagacaggctgggtgatcagacatcacctgtggcacggtggaggctgaggaacccgatcagatatccagagtgatcagataccgagggtgggaggttctggctaaactgactgagcaaggttttttgctaaaactggattttacaaggaaatgcacagatggcctagaaggttcaggagcttgatataagtttgatcaagcgaagaatctttgtccatggagagtgatgtcagaatgcggctttactatacagcatttcgtgttgacggcatctctagctattattgttaactgttcacaaaggacaacaagcaaaatggcccacagctttcttttcattactgctaatcttagcagtggtcaaaatggttggctctgaatttctttcttttttgggtttggggtagtaaatggagtgactgtggacatgttttatggattattttaagcgtatgtatctattaaaaattgagagggcccacatggcctgctttaaaaagtcaactgtgagctgtatttggtgctgagccctgaaccacccgctgggcagtgggtggctactggcagtgcctgtggacgttctcggggaaagacggtctgattgcacctgctcttcctcagttcctagtactgtgaggcactctttccccactctcccacaaccctcagcttaacacaactgtggtgattgctttgtccgttttcccatgaggaccctgagatttcaacaaggttcagtaactcacacatcgacacttccagggagctgtgttgccaggaactggcccaggtctttccctcctgggcccatcttgtccttaatctctgctgacattgatgggtttagttaccttgtcgtgtttcttcagtgttttatgccatacagtctcccttgagtagatgttctgtataggggatatcacagcttcctggtgagaactgggttaagtccagcaggatgcctgggcttagtggcactggagttgtgggtggccttgagccccaggcagtcccctgagagcccttcccgatggatgtttgagtcactgagtgtgttccttcttctttctggtcaggctgtcctggccgctgcacttacaattgcaccccatcctcctacccactctgatcccagaggagagtgcttctgctgtaacctctaaggcacaagtgggtcccaaagtccttaaatatggagggatgtggggaagcagtggtgaagatgcaggccaaaggtcagcaggcaacactggtctttgttgtaggtaaccttcatctagagattcttctagttctttccagatttatcttctaaaaactaactggtatggaaatattacagtcctgtaattctttcttctaggtcatattgaacattccagatacctatcattactcgatgctgttgataacagcaagatggctttgaactcagtaagtggttaattattaccttcctggccttttctttgttcccttgtcccttctgttattcccaacattgtttggggtcagcaattgcaagggctatttgtagggaacgccgggccacgctgatgctgttcaaggcaccctctagaaagagtgagtcaggtgcgcagccacacagctgcccaggtgagtcgcaagagccatggctgttgggtacacgtgggtgatatgcattctcaccttgacctcatcccttcctgctttgcagggcagggggcagggacaaggagtggggacagatgaggcaggatggcgataacaggggtatgttccagggaagagacccacgtgggatcccatcgatgcccaactgaaggactaggaaaagtcataactgcatgaggcatgggcgggccttccctctccctggagcccactccctttggagacaaatgtggctaatctctgctccccattgtaactggcccgtttgccttatacctaaaataagtgcatttagtaaagagttttaaacacttcctagattctatatctggaaaatagaccttgttttcccctttatttgttactgatattcattttttactgggtctgtgtttaatttcaagtccactgctcaggaattttcagggacaaacctgcttgctagtggatggcaagttcttagatggctgagattgcagcctctgactccctcatttagatgagagattaccttgtgttttccctctgtgtgctgctctggttcagagctgtaatcttcggacttttgaaggacagcattagtgagttattaagtggaggtgaactctgcgggccttgtttggctcattccattgtaatcaacttccctggaggcctcatttaaagttctaagagctatgctgcctctgctcagaacacctgtccattgagtacaaacttgctgtcattctctgaggtcaataagagacaaggggcaggctgggcgtggtggctcatgcctgtcatccagccctttgggaggccgaggcaggcagatcacctgaggttgggagttcgagaccagcctgacaaatatggagaaaccccgtctctactaaaaatacaaaaattagccgggtgtggtggtgcatgcctgtaatcccagctactcgggcggctgaggcagacgaatcacttgaacctgggaggcagaggttgcggtgagccaagatcgcaccactgcactccagcctgggcaacgagagggaaacactgtctcaaaaaaaaaaaaaaaaaaaaaaaaaaaaggagagagagacaagaggcagaaattaatgaataggaaaaagttttgcatgggggcccttagatacagataagaggaaaacgtggcctcccagagtggcccagccaacaggtaaccggggagagctgaaagaaggggaagatgtgggctggtggggcccagagtggcctgtttggggcgagtcttgacagggtaggtctcgggaaggcaatttttaagtaggctgaggaaggggaggtgggcattctaagaagataggcaccagctgaaggatggagctgagaataaaatgctacttctaggcagttcctttcacatttatgtatggccacactctgacccagaaatttcatttaaagggatttagctacacctttctaccctctgcacaaaaatgcatgtaatgtgtcagaatgtttattgcagcagagctgctaacagcccatgttgtgaaccactcaaatttccattaatagcagatggtgagtgaatgacgatacattccttatatgagagaagaggatgtagaagaggtatttgcaggataacacagagactatgctcctttaggaacatttcttcactcagtttttttctctgcaaaatgtttgtattaattcatacctgtgccagtctcgctggcagcgggagggattatggtgagcgctcaaggagattatgagtacaggagcctggcggcagctgagttctccaatgttagctattattcttctcattataattatgatattgctagtttacagttttgtatatcaatattcaaggaaaagactggaggaactaaaagtacaggattttggcttaatggattctaactccaaacctctacacaactttttaaaattattactatattttactaaatcccaatgtctgccacttttttttttttttaattttaaagaatacatagcccattgggcaaacttgggtttgcatgcttggcttttcagcagatgcagaagccctggggtgggtttgccctggcttgtgtggttctcgagtttgagtctgtacgtcttgagtgggtcaggggccccagagctttgctgccattgatttctccccaacagcagacaaagtctcacaatgacctcaattttccctctttctttcttttgaaggacccatttttcatggtacttgtcttgactgttttcatagtggttttttttttttttttgagacgggagtttcgctcttgtcgcccaggctggagtgtagtgacgtgatctccattcactgcaacttccgcctcccgggttcaagcaattctcccgcctcggcctcccaagcagctggaactataggcgtgcaccaccatatccggctaattttttgtatttttagtacagatggggtttcaccatgttggccaggctggtctcaaactcctgacctcaggtgatccacctgctttagccacccaaagtgctgggattacaggagtgacccactgcgcccagccaaatctgtatttttgtatgtagagggaaataattttctcaactgtaatcgtgaataaatattgtattaaattgtcatgaaggaactcctgtttaataaatagacatgtaagaaaaaaagaatgaatagtaaaaccaaaccaaaacaaaaaactttggtaattgaaagttctggttagtttttattctaaataagttcaatgtttgacatagttgtagacacctagggagaatctgtagtacctcttcttttctattacttttttttttttttttgagacatagtcttgctctgtcgccaggctggagtacagtggtgagatctcagctcactgcaatctctgcctcccaggttcaagccattctcctgcctcagcctcccgagtacctgggattataggcgcccaccatcatacccagctaatttttgtatttttagtagagacagggatccaccatgttggccacgatggtctcgatctcctgacctcatgatccgcccgcctcggcctcccaaagtgctgggattacaggcatgagccaccgcacccagccttgtagtacctttttaatatcttgtcactttcttattaatctctaactgtacaagttgtatagacaggatgcatatttcacaaaataaaataaaaacattatcaatttaaaagatcattggtatagctgtggtatgatgtgatagtttgtatgtaaccctttagtgcaaataagagttttatattattcatcttcttttcaactgtttaggggtcaccaccagctattggaccttactatgaaaaccatggataccaaccggaaaacccctatcccgcacagcccactgtggtccccactgtctacgaggtgcatccggctcagtactacccgtcccccgtgccccagtacgccccgagggtcctgacgcaggcttccaaccccgtcgtctgcacgcagcccaaatccccatccgggacagtgtgcacctcaagtaggattctctttgtgtttatttcctgtaataaacccggggtcccgggtctacctccccagtgggctctctgctcccaacaccactgtcgccacctctcctggtctgacccttctcctccgtcttccggagccagcctgtcttcatgcctttccactctcttcctgctgggtcaaagctgtcgctgccaggcctagcctcttgcccagggcctgcagatacctccctcttccgttaactctcctgtacagctttgcctgttctactcagcgtaggcttcgagatcaccttctctgggtttcttggctgtgtggtttattggtggctgctcttgaataaatggtaagcttccaagagcagaaatcaactatcttacctttgtcatacagtcccctggatatgacaggtcatgtttaagatgctctctgttactttgtgtttagtagatgacctggctggtgcggttgtcacacagaagtatctgagctgtctcattgggcttcagggtcctgcgggtggccggagcaggccagagcgagcgtgggaggactggaggttaaattttatttgctgtcacttcagtccctcctcttcctcaccctaccattcatctcctttctttgccatttcgtttggtctcatgtctttccagtccgcccctcttgcactgcctcccagctgttaattcaggctagtttcagtgctaagaattgtccaggtggaacccgcacagcagtggctacgccaaagatcttttacattgatcttttaattgatagtgcttttattttattttgtgaaatgtgcatcctgtctctacaacttgtacagttagagattcgtcagaatgtgaatttccatgtgtccacatcacataatcagtcatcaacgtgattaatgccagtgctctgtgaagccctgtctgtccccacctctcccccactcaggacaagtgctgccgctcctgcgtttctacccctcctctcaccccctcacccttcacaaatggctcttccaccctgttcctctccagccacctcctgtctctgagttttctaccccttcatgagccttaattcctttctctcccttctctcattctctctttcccttcttccgatgctccccaccaagcagatacttgtgtttgcactgatgttcttctgggggtggttgggtaggtcaaggccagtggttctcagtcaggacaatttggacccccagagacaattggcggtgtctggagacagtgtgggtggttacaagtggggagggggtgctgctcctaggtaggcaccggggatgctgctcaacctcccgcaaggcacaagacagccccccgacagcaaagaatcctccaggtaaaatatcgcttagtgtggaggttgggaactcctgatctttgtccaccgtggggatggaaggaagccagggtgaaggggataaggaactgtctgtgtgagctacccccctaagaaatggcagtgaaggccctctcctgaagtcagcatctccagacggtggtgttcccaccagtgatggctaaacccaggaaggcagacgaacccctggcccacatgatggacacatttccacgtttcctgggaaagactagatgatgacagagttggacagggatatatcagtcccttatcagttgcttttataagggaagaatatgaacctacatgtatgatttttgcattataaaatttataaactcagaaataatttagtaatttaattgaacttaccctggtactatttttaagaaaacactgttggcatctaatatatagaaatgtatacattttgaaagtgtaatgtttggctttgaaactcttctcccagttattgagtagcaccaattcagaagcacccatcaggagtataaggaatttttctagacttaatgtatttatttgctttagcaacagccgtagaaggttgatgattgagtaggagcgaacacacagcttaaaccttaggctttggagaatcgaaggtccatagtcctccaaatgtgcgtgtgaaacaagcagctaaacgtgagaaaccatgaggctgagttgacaaccttaagttggtcatgattgagggaaatggatagtgggttttgtgtgcgtgggttttttttgttgtttgtttgtttgtttgttttttgagacaaagtctcgctctgtcacccaggctggagtgcagtggcacgatctcagctcactgcaacctctgcctctcaggttcaagcgattctcctgcctcagcctcctgagtagctaggactacaggtgcactactgcttctggctaatttttgtatttttagtagagacggggttttgccatgctggccaggctggtctcgaactcctgacatcaggtgatcctcctgccttggcctcccaaagtgctgagatccactcccaaagtgcatgggtggtatgagccactgtgccgggccagtgagttgtaattaaactgtgcaacagcagccgtgacaagccaagacccagtggtgtctgtactgaccacgcgctgactacagatgcctgtccagcaaagtaaacttgagggcttcccgctttacacactctcctggtgagaactgtacagattggcacatgctcagtgtgaggttcaggatacctaactgaatagccctcatctcagcagaccagttattttatcttggataaaatggcactcgggaagccatagacggaggaaagtgtccttggtaatgggccagagagggcatctggaatttctctcatgaactaccttggccccagcttgcctccatcatatataatcattgcagccgagttatgagaacatcgtgtgcctgggcatggccctcagaccagtggtgctggcctcatctgtgagcctgttagaaattcagattcaggtcgggtgcagtggctcacacctgtaatcccagcactttgagaggctgaggcgagtggatcacttgggcccaggagttcgagaccagcctgggaaacatggtgaaacctcatctaccaaaaatgggccaggcatggtggtgcacatctgtggtcccagctacttgagaggttgaagtggaaagatggcttgagctcaggaggtggaggctgcagtgagccatgattgtgccactgcattccagcccgggcaacaagcaagaccctgtctcaaaaaaaaaaaaaaaaaaaaaaaatgcaatgcagattcatgcccgacccccaactgaaacagaatctctggtgatgggaaccaccacattccccaggtaattcttaagcctgtaacagtttgagagtgatggtagaattatcagaatgttgtcacaaagagagaggtatggcatcgagccctcagcagatgggtcagctctgagcttatcgccctggcagacctccggaggcacaggtgtggccaggtggggagttccaggctgccacaccacctctccagcctgggagggtctgttcaaatgccttctcctcccctctcctccacctctgcacctttcttcagggaaagctcctgggagctcctggacctggggctgctgggcatcactggggtgatggggatggatgccctccctcctggcccatgagctggctgagcccagcgtctgactctgccatgcctctctggcacctgtagctgtcttctgaactctgtgtgacttttggcttaccctctgaccaataatgctatgtctcactagagaaaaatcagtgaccttttccaaattcgttttttttctgaaatgtgcctttcctctgagtttggtatttctgcacttggaccaaaaggcctgcactggcgctgtccagcaggacttagggacaccatgggaaggttctacagctgcactgtctgacatggtagccaccagccacatatgatgactgagcacttgaatttacatcattttacttaattccatgggacattaattaaatagccacatgtagctttggtggatgtccgaatgggacagtagcatccattcgctaaatagccttgggtaagacaatttattctgctttgagtaccactaacagagtgatgatagtttttaggacagtattattattttgcttatgcttgtaattaccaagatgaggtcttagttctttttttttttttacattaatcatctgcctattttaagaccctcttttagcatactatctttttttttttttttgacagagtttttgctctgtcgcccaggctggagtgcagtggtgtgatctcggctcactgcaacctctgcctcctgggttcaagtgattctcctgcctcagcctcccaagtagctaggattacaggcacctgccaccacgcccagctaatttttgtatttttagtagagacgaggtttcaccatgttggccaggctggtcttgaactcttgacctcaagtgatccacccacctcagcctctcaaagtgttaggattacctgcatgagccactgcgcccagcgaagcataccatactttttaaaagagcctaacctcggtgtactttgctgaagatcacagcttcctcctgttggtctccaaattgcataaggtttagtgttatggaagaagtaggatcgtccatgatatttcttaaaattaaaagtcacatttttaagtgtatatgaaataattatttcttaatgtggtgtactataaaaataatagataacatttgagagcatgacttctaaacaactctggtctgaacgttgcactctcctccttcttccagagactaagaaagcactgtgcatcaccttgaccctggggaccttcctcgtgggagctgcgctggccgctggcctactctggaagttcagtaagtgcagggagcctcgatcccaccatgtgctcctgcagtccccagtgctctgagccagaccctgctctctgggctattgagacctctggaggccctccgtgaggttcctctcttacataacgaggctgtctctcttcccttctcttgtttagctatgagattgacacatcatggggaaagcatttagaatgtacccagtgctttggggtgcttggtgccacccagcactgtgagcacaggttcttctaccttggggccacacccagttacctgtatctcactgcacagcagtggctgttggggaccaggcccacccctccatgtcccacctcctgcaactgcagcctgagccttcccatcagcctggggtggtgcagacccatgtgccattgtggatccttcaagttacctgtgtggcagagaggacgtgtgagtgccgtccaaacccaaacactgagagggtccttcccattgcccccacggaagtaaggtgccccagtgctaattccacttatacttgctggtggcaaggacacttctcctccttattaaagtgggggattggctgggtgaggtggctcacgcctgttatcccagcactttaagaggccaaggcaggtggaccacctgaggtcaggagtttgagaccacaagcctggccaacatgttgaaactccatctctactaaaaatacaaaaattagtcaggcgtggtggcgtgcacctgtaatcccagctacttaggaggctggggcaggaggatcacttgaacccaggagttggaggttgcagtgagccaagattgtgcccctgcactccagcctgggtgacagaatgagacttcatctcaaaaacaaaacaaaacaaaacacagtggggccaggagttggaggctgcagcgagctacagtaatgccacggtgttcctcactccatgaggctcattgcgtttctcagcctgaagggcacctctcttctgttttctctgcaagtgggcagcaagtgctccaactctgggatagagtgcgactcctcaggtacctgcatcaacccctctaactggtgtgatggcgtgtcacactgccccggcggggaggacgagaatcggtgtggtgagtcagccttgaccttgggaagggactcctctgctcaccttggagacagcagccgggtccaggggcctttgggtgactgggcctggcgtgcgtccagtacgctgacacatgatgtcattgaatccctgctccaggctgagccctggggctcagagaggttgtgtttccggcccaacctcacccagcaggtgggagatgacagggccaccgaggactgtgtcattggaaccacacgtgctctgaactgccacaggaagtcagttaagatgagcaaactgtttataaagttggagatgcaggctaggaacggtggctcatgcctgtaatcccagcactttgggaggccgaggcagatggatcacctgaggtcaggagtttgagaccagcctgaccaatatggtgaaaccttatctccactaaaaatacaaaaattagccaagcgcggtggcgggtgcctgtaattccagctattcaggaggctgaggcaggagaatcacttgaacctgggaggcggaggttgcagtgagctgagatcacgccactgcattccagcctgggagacagagctggctcaaaaaataaattaattaattaaaaacaaaattggagatgcactatgttattttcaaaacaagctgcctttaaagatctatctgttgtcacagggtgggctcatctgtttcattttattttctgtggtttatctatttattcattttaatgaactaggaagcattgctcctatttatggcataccacatgatgtttggatacgtgtatgcctgtggcatggctaagtcaagctagaacatgggccttacctcatatacgtgtcttattaagaacacataaaacctactcttgtagtgattttcaaatatgcaacatatagtttattaactgcagtcactatgatgtacaatagattgctcgaacttattcctcctgtctaactaagattttgtgacctctgaccaacatctccccagtgttgtcaccccccgcccccagcctctgatagctgcctttctactctctgcttctgtgagtttgatgtttatacattccacatgtaagtggcctcatgcagtgtttctgtctctgtgtctggcttgttcacttagcgtaatgtcctccagcttcatctatgttgttggaaatgacaggatttccttctttcttgtggctgaatagtattgccttgtgcatatacaccacattttctttatcccttcattcactgatggactcttaggttgatgtcatgtcttggctgttgtgaaaaatgccgcagtgagcgtgggcgtgcaggtccctcttcaacacacggatttcctttcctttggatataaacccagcagtgagattgctggatcacatggcagttctgtttctcaccttttgaggaaactccatactgttttccataatggctgtagcaacttccactcccacccccacggtgcaaagtctccatttctcttctacaacctcaccaactcctgttattttccatctttctgatagtagccatttgaagaggtatgagatgatacctcattgtggttttcatttgcatttttatttgtatttttcatgaatttttgagggtgatttcaagggtagttagtgactcgaacagggaaacgatcctgagtatgagggttgtgctaatcatccccctcctgccagctgcgtacggaatggggctctgcagatggcagggagctggctcgtttctctttaagagctgccttttacttttcttcctcttcctttaaaacttatttcctggccggacgcagtggctcatgcctgtaatcccagcactttgggaggccgaggtgggcggatcacgaggtcaggaattccagaccagcctggccaacatggtgaaaccccgtctctactaaaaatacaaaaattagccagacgtggtggtgcgggcctatagtcccagctactcgggaggctgaggcaggagaatcacttgaacctgggaggagggggttgcagtgagccgagattgcgccactgcactccagcctgggcgacagagccagactccatctcaaaaaacaaaaaaaagttatttcccaagcacagccatgtattccaggcttgtggatcagcgttggtggtggtgtgtgctctcatatcttagttccagctaagcacactctgacatgtttacactagaaccatttgttttttctagaaatagaaatttcagaattgtagagtcagaggacttaccagaaatctcttaggtagttctcctcccctccctcaagtgcagtcctaacctcctggagttttctgtagaaaccacaagcctcagagctggccgagaattctagccaaagatttttccatgccaaagtaatcccccctctcctaagggccatccttggtggggactggtttcctgttaagccctcgctgtcagtcctggctgtggaatttcctggtgaggagcactggcccgtggagctcggccctcgtgccggccttgagcaggcccaagtgttccgtgttcttgatacctttcctccagcacagtcttgcttcccagaaaaaggtttgcacttgaaaatgatgcatttgctgattaaacatagttcttttgctttatttggtttctaaaataaagtgggagtttttgagattgagtaacgtgaggttaagatagcacgtggaatggctttttcttttctttctattttttttttttttttcctggagacagggtttcactctgttgcccaggctggagtgcagaggcatgaccatggctcactgcaacttcgatgtcctggggttaagcgatcccccagcctcagccccccaagtggctgggactacaggtgctcgccaccacacctggctaatttttgtattttttgtagaaaatgggtttcatcaatgttgtccagactggtctcgaactcctgacctcaagcaattctcctgcctcagcctcccagactgctgggattacaggcgtgaactaccacgcctggcctggaatggcttttgatgttctcctatgtgcacatgtgggtgaataaacaccaacaaagtccttatgttacctgaagagttgctctcttcttaatatttaagtcgtatttatttaaatactttaatagttgtacactattaaagtattattaggtcaaaatcaaggaagtacaaaagggtatgctgtgaaaaatctcttcttccttgctctgcttacttacctaccccgcatccccccatacaccccagacacacacacacacacacacacacacacacacacacgcatcactcccatacatgcccacctgtttaccagccaatcacatttcttggggcaactcatctgagttgcttctctttccagagagtttttgcataaagaagcacaggtatttctgcgttaccatgaccctatttcccagtggttcctagccagttgactctcctgcactggataccatcctggacagcattccttagggaaatgagccccctgttttttcccaccatggcacagttggtcctttgcatggacgcaccattattgcccctgtctcttcttggtggaccttaaggttttctccatccttttgctgtaacacacactgctccaagtgtgtgagcatatcagtaggaaacgcttccaggagtagaactgctaggtcagagggcgtgtggatctgtaacctgacagacctagaccggcttcagtttggttttatccagtttccatattgattattcatataaaaggaaacagacaaacataacgctgtgcatgtattctctcttagaccagaacaggcatagggtgcacttttaatttgtccatttcgtagagtagaaattgtttttgctgaaatgaacaccttaggatgctgaagaatatgacccgtcccatggaaaacattcaaaaatgtgtgtagcgctttcttcccaagggtgtgtgtgcgcatattttaacactaattcactttctacttccgttgctatcctttctgtgagtctttctcagaatctcagaaaagaaactaaattgttcactctagttatcaatgctgtactctatacctggaatttgctaaaagggcagattttaagtattctcaccacagaaaagagaaaagaaaatggtaattatgtgacgtggtggacatgttaactagctttattatggtgagcatttcacagcggatatccagtcatcacgctgtacacattaaacatgtacaattgggtttttttgagacaaggtctccttctgtcacccagtctggagtgcagtggctcagtcatggctcattgcagcctcgacctcctgggctcaatccatccttccccctcagcctcctgaaaagctggggccacaggcatgtaccatcatgccaggctaatgcatatatatttatattttttggtggagatggggttggtctcgaactctgggctcaagtgatcctcccgccttgcccttccaaagtgctgagattacaggcatgaaccacagcaccaggcctacatgtaaaatttttatttgtcaactatactttgacaaagctgagaaaaaaaatcctaatatttaaaaaaaaaaaaaaaaggactagcttgagaccttttccagctctctggcttatcagctgccgtctcttccgggtgcagatagctggaagggaaagaaaatccctaaaattacccacaagccaagaatgaagtgtctccctttgagccacagtggcagttttgtttttaatcatagaagtgtattttgagccgggtgtgctggctcacgcctgtaatccccgcactttgggaggccgaggtggggggcggagggggtggggatcgcctgaggtcaggagttcgagaccagcctgaccaacatggagaaaccccgtctctactaaaaatacaaaattagccggcgtggtggtgcatgcctgtaatcccagctactcatgaggctgagtcaggagaatctcttgaacccaggaggtggaggttgcggtgagctgagatcatgccattgcactccagcctgggaacaagaaaaaaaaagaagaagaagaagaagtgtattcatttcagttacttttaaaaaagtgaacagactttatattttagagcggttttaggtttacagaaaatgaaacagacagggcagcgagctccttgtactcctccccagcacacagttgccctgttatgaacatcccacatcagtgctgtgcgttcattaacaccgatgaacctgatgcatacattatgatgaactgaagtcctggacttcaccctttctcttgtacagttctgtgggatttgacaaatgcataatgctgtacagccacaatgatagtatcgtccagagtagttctcctgccttaaaacctcttttgctgcacctgtttctctctccccactcaccccagctatctgatcttcttagtgcctccgaagttttggtcttttcaggatgttgtagcgttggaatcatggagtatgtagccttcaccacatacaccttccttcactttgttggcttcctttacttagtaatatgcattcaagtttcctccatgccttttcatggcttgatagctcatttctttttagcaccaaataatattccgttgtccagatgtagcacaatgtttatccattcatgtaacctgtgaccgactcacagataggatgtggaatcactcaccacagaggcattagacaataatcagacccaagtcatttcatgggggaacaagcccacaggtaccagactgtccagtgagtcagggccactcgtaggaagtaagaagagaggctagagcatagccaggtcctcactttatactttaagcccatgtgtatttctcccaaaccacacagcattgtttccatgctttcagctttgcatgaataacgtgatacttgaacgcatcatttatcacttgctctctttcccacagcgctgttttcaagcttcttcctgttcatgatgctctgcttaacccttaagctgcatgggattctgttctgtgaatacgcccaccccatgtattatcctgcccagcaaaaagtccccaaaactctggatggtggttacctctagggagggagagaagagattgggaatagggagcgacttcaacggtgtttgtaatgttttgtttctttaaataaaagagctgagatcatttcagcagaatgttgatttagagtctcctggacaatttgttgctcaaagtgctctcttaaagagcactttaaaaaaaaaaaccttttatcttattatttatttatttatttattgagacggagttttgctctgtcacccaggctggagtggagtggtgtgatctcagctcactgcaacctttacctcctgggttcaagcaattcccctgcctcagcctcccaagtaggtgggattacagatgcgtgccaccacacttggctaatttttgcattttagtagagatcggtttctccatgttggccaggctgatctcaaacgcctgacctcaggtgatctgcccgccttggcctcccaaagtgctggtattacaggcgtgagctaccatgcctggcttatcttatatatttttaaaaacagcttattgagatctaatttatgtaccataaaattcaagtatataattcagtgcttttatatataaaacatatatatgaaatagcttattgagatataattttttatataaaacagcttattgatatgtaatgtatgtaccataaaatttaaatatataattcactggcttttatatattcacgaatatgtgcaactatcaccacagtcaattttagcatattttcatcagctcataaagaaaccccaagcccttgaactatcaccccatatccctcctcccagcccgtccctcctactcataagcaaccactaatctacttagtgtctatagatttcctactctaggcattccatgtgagcgggatcatgcaatacgtgggctcacacaatataagtggcattccatgtgagtcggctcatgcagtatgtccggctcctttcactgagcataaggtcttcagcactcatccaggttgcagcctgtgtctgaatttcattccctcttctggctgaatcgtattccattgtgtatcttggacatatcctattctgctcacccagccgttggtgggcgtttggagtgttttcgcctttcagctgttttaagagggttgcagtgaacatttgtacaagttttggacccaatgcctgttttcaattctcttgtgtagagagcactttttagcagaaaaagaatagatttgtggcctccctttgtgtgcggtcagtgccttgagaagagtgaactgtgctgccacctccggagccgtggagagcgcggggcttgggtagcagctaggacgatacaagttgggacaaggccaggtgcaatggctcacgcctgtaattccaacactttgggagaccgaggcagggggatcacctgaggtcaggagttcaagaccagcctggccaacatggtgaaaccccatctctaataaaacagaaaaattaactggacggggtggtggacgcctgtaatcccagctactcgggaggctgaggcaggagaatcacttgaacctgggaggcggaggctgcagtgagtggagatcagaccactgcacttcagcctaggtgacagagcgagactccgtctcaaaaaaaagaaaaaaaaagaaagaaactcatggataatcctccctctcgtgcagttcgcctctacggaccaaacttcatccttcaggtgtactcatctcagaggaagtcctggcaccctgtgtgccaagacgactggaacgagaactacgggcgggcggcctgcagggacatgggctataagtgagtatggggcagcacccgccgagtgacagtaacagacagcagaaacacgagaagaccctctctctgcctccctgtgaaagcaccggcacatgagtgctggggacaattgtcaccttccaaaagctgagccctataaccagcaggtggaatttgtcctgctagggctgtgcccagcacacagaccttggctcactgccaccttgccctgcctcctccttggcctctatagactcctggttgctcgggagtgcccagtgctgtggtcatctggtcagaggggtaggctgagggcgttaggtgcctctttttccaaggtgcctctcagccagggtccattcacctccctgggtagaggttggaccagaacagctggcgaggagggttgggctggggagagcagcagagacaaatcctgtgccagtttcacttcattcgggagccatggaagccttttgagctggggagagaatcaatcaatcagactgatacttaaaaaatgtcattcctgctcgtagctctgagggaaggtgggaaggcttaacagggtgtgtgtcgcctgacagtgattcctaacgggggtggggcggtggttaccatttaccagcactgcctggggagatgcggcagccctcaggcatcgggggagagggtggtaggatgctactgccactttgttttccatgggagggtccccaggtgatttctatgcaactttagggtattcaatatgccagttttcagaatgaattaccactcggtgagaaagttggcatcttagctagtcactgtgacatccctaaacagcaggggtgaattacacagcaaagcccccccatcacagtccaggaacctggtggaattgataactggggccatgttaacatctgtaccttttattagattaaatgtgtgtatgattatacaatcctatgtccttctcatagtttcttgatcctaacctggataagaaacacgaccaatgaaggaattttgtctgacactttagggttattgaatcgaaaaatcgttacaatattctagcacttggttagaacgtgtgattttttttcctaaatgctaaggtttttccctcttattctgaatgtcgtatgagcggtattatgacatagtataggatttgtgtttgcttatgccttaaccattatcacaaataaggttttcttttttaggaataatttttactctagccaaggaatagtggatgacagcggatccaccagctttatgaaactgaacacaagtgccggcaatgtcgatatctataaaaaactgtaccacaggtatgcagcaatttcttcttgaaaaattttggaatgaaatcaactaggagacaccatggggaatcgttgtcctgagtctgatttctctgagctgcaatactcggtctggatgggttttgcattgggaggagattagagtctgaccaggcctggttactctaagcagcccttggtttattcataggaagtggctgaggtttctctgctatttcattttcagcctctaccgtctgcccttgttggtagcggctcacacttgcaacatcgacattcaactctatttagttttctttcctcttcagacatttagaggtgtacctattttgtcagggcgtggttctaggaatccaagataatgtctcagtgtcccagccagggtgaccggctcattccagtttgccagggacttcactggcttgagcaagggaagtcctgctccattccaggcagctgggctggctggtcccgttagccccaaccccgggacagcagtgccagagggtgctctgtgagggatgggcagcattctggcggcctgggaatgagttgtggtgtttccagggggtagaagtgggtacaagccacaggtcacatgatgagtggctgacctggctgggagggcagaagaggggatggacttaggctcttccttttgctttgcacatatttaggatgtttgcagacttgctatgattgttgctgttatgtgttttctgatgtgaaagatacacagtgtcctttgcccatgagctctccttgcctcccaggtccccagggcttatgcctggtgtctaggcatcacctccctgcctgccaggtgccaggtgctgcatttcgggggaggatgaactaatcaccccgcgccacctttcctctgagtgggagcctggggcaggtttgcattcctggaggccgctggtggaggggtctgggggcctgacttccactgcagcctgctgtcctggggaatgtggcagggcaagcccagtggggagggctgtgcacggccaggtgcacccatcaaaacagcagggctgcggtttgtccctgtggagaagctaaacacagctgcctgggcactttgtaaatgctgagtggttctttgtctttctgggttacacacggaatcagggagccaagtccagccgggcagggacggggggaggggaggaggtgctgccgtcccttggcaagagccttgggaactcacaaggaggctggagggcttggaagaaagaagagaaggccattgtctggtaggctctattctatctcggtggtggtggtggggggaggcgcacttcttttcctctttctgtgcagcagttgccctttgatgcctgagttcttggcttgttttctgtcgggcttctgtgaataaccacatgtgccctggcgctgtgaccacacagggctatccctaccgaccttaggattcttaggaaatgtcttctcttaaaggggacatgtcttcacttggccgtgtcagtgccccagagccagagtccacctggaatgcacctgtagtcactgagaacccggggggtgtgccttagtaagaaggtgtcaggaaggacctattattgtagggcctgggctcctgcaaggtggtttgggggtggttggaggaagcagagatttgctctggattggatgctgtcaggaagcaggggtaattctgtgaggctgctttattattttttttctaggaggaggttggaatgaggctaggctaaagctgtgattggtaaagaaacgtccgtcgctcaagttagccaggacaggaggagacatcagatcgtgattttgtggttgtgagcacaaggttcctgttctgtctgttcagacatcatttcggaggaggctccttgtgtcttgccccatctcaggcatggaggggcctagtccgatattgacgctcagtgaaataattcaggttccgcagagcacacggcccagctatcagggcgggccagctctgcatgccaggggccgcgtcttcccttctcagcatagcctgggaaattcactgcaggacaaaatgcatcagttacttcctcttcatccataacctgggatgtttgactcccaaatgagtaactcttacgtttcttctaatcctagggaaactattggttatattgctttcaacactacaaatttaaagcagttataggagcccagaggtttccaaatggcttccttaaaaattagaagatgattttaaattccaagaggaaaaacaaaactagcattattgtatacttaccctcacaaccgtcctaggagctggtacaattttaagagaggttaagtaacttgcccaaggtcacactgtggggatgtgagccgcgtaccttggctcagtgtctggtctttgccactgtccctatatggatttacttaccttattggagttgtaactagcagacccttctatgtctcagaagacaggagagggaacatcggaagaaatgactgatttctaagcatgtgagaggcaggtgactccgcactatcgtgaccagaatttcccctgttctttttgcagtgatgcctgttcttcaaaagcagtggtttctttacgctgtataggtaagttcatctggagtcccccttttgatacttctaactaggaaaagctctctactttcagaacagtactccctgtgtctctgggggcgtgggagggaagaaggtggggtcacgggttggaatgtgcccagcggcgtctcgctctttccaaggagctcctggtttagatttccatggcctgtagacaccttcagccttgggtccaagggacaccccctgagatcaggcacgctcaagaagctgacaaagccctacactttatgccacccatgagctggaggcccggcaggtctctttctccagaaagcaaaggggggtggcgttagtgagccctggcagccacctaacgtggacttggagcatctgcggggctgtggtccagcaccaccgtgtggccaccaggtgctcatcagccagtgggacccgggaggagggacaagaccagagaacaacagtgctcttgcctcttctctcctgaattttggacggtggcttagacttgggtgtccccatctctgtgtttagagtgcttacagtttccaaactgtttgcaaatgtggaagccaccgtccctctcctctgggatggcccagtgctgtcgtggggccgtggtcctgagctcagcttttcatttgaagaggtggaaggagctgacaccgtcccatcccggcagggctggctcaggtcttctttaggtcctgagtgggggtccagcacagccccaagggtgcgtggcacccgccctgccctctgcccatgcactcatctcctggtggagaagacactcacacacaggaagcagggaaggcagcagacctcactcacccctcaccccctcactcaccccctactcaccccctcaacctctcattcaccacccaccccctcgccccctcactcaccccctcactccctcaaccctcactcacctcctcactccctcaaccctcactcacctcctcacctcctcactctccccctcatccctccctcaccccaccccgtcacctcctcactcacctcctcaccccctcactcacccttcaccccctcactcaccacctcacctcctcactcaccccctactcaacccctcattcacccctcaccccctcactcacccctgcaccccctcactcaccccttcatccactcacccacc

SEQ ID NO: 298 - DNA, 32744 bp, Homo sapiens
  source 1..32744: mol_type = other DNA
tcccagcggcggcggctgcagcgcggcggtccgagcgggtgcaccgcggcggaggaggcagcatcccgcggcgctgacggtcctggggagagcatggcgccgaggtgaggccggggctgcgggcaggggttgggggacgccaagatgcggctgcgggggtcgcgggggtcgcggggctcggccgggtcctgcgggggtcgcgggggtcctgcggggtctgacccgtgcctgtcccgcgcaggtgcccctggccatggccgcggcggcggcgcctcctggacgtgctcgcgcccctggtcctgctgctcggggtccgcgcggcctccgcggagccaggtaagacccgggcgggacgggaaggttcgcgccggtgcccgccggcctcgccgccctggctggggtccccgcccggctccctcacccccgccccggccgctctgggttcagccccggccctgcccacgcgcgcaggaggcgccggagccggacggagcggggcggggtggccggagtcccgcccattcattctccccgcggggtccgggccgggaggggtgcgcggtgcgagcggccggagtccccgcgcggggaccgaacctccgcggccggcggggtcgtcggtgccgggagggctcggggcggggccgcggggtctcgggagacgcggcctctgtcgccgtcacggcctcgtccccgcagcgccgggtcccgggactgaccgcgggcggaaggcggcggagcgcggggcgtcgtctccgcgtttccaacctgttgaggctcctcgccgcgggccgggccttgtgcgcctctgtccccgccgccctcaggcctctgtccccgcgcccgccgtggtgtcgggttgcgcggtcccctttgatgccaaccgagcgccgcgcggtccgagaacaatgcccagaagccgctgccccgccggcctcgccgcttcccgtgcgcggcaaacggtgcgcggggcccgtggggaccttcctgcctccaaccccgggacccagttccccaccacctgctaaccggggcctcctgcctccagccagcccagcagaggcccgggggaggcggcggggacgcggaccccaggggagccccgcccaaagggcctgggtgccttgtcgcgggtggaatcccacccgggggtccacgcagccagcgcctgcctccgactcgactccacacctgcttgctacagcgggtgaggaagcaggaaagggggagggagggatgtcgtctggattcctgtaataatttgtttcattgtttccaatcgacttagtcaccaggttaaatagtagcatagacctttcaaaaaagtagctagcttataagtagatgtattgaaaacacctgcttgttgagtcgtagacaattcctcatttactgtgtgaactctagggggtgaaacacgggcggagagcggctgtgagctcacgcggctccatccccacagcggcccagggtcactcggggccattaatcaggccgcagagctgccctctgagccgggccgccagcgcccacagggcccagaccagggctccctgggcgggatgttttaaatcgcacagggacaaaggaaaggaaagacgctggggcccaagcccgagcttatgaaacgttatcaaggaggagatgtaaaaggtgatggtttttttgcctttgaatagaaaaaacaaaaactgttaacgcgagctttggtgagatgcaatcttgagatctaagagtggggtgtaaagtcagtgcaggcctcagcagggaaagttacggttggccaaatgggctgtgcgttcctcttctgtcccgggcctgccccagcctcaagcactctggggcaggaaggccccttggaggtgtctaatggaatgtggaaggcgggtggccaggaggctgaagcggaagcaggcccagagaggggtctgcatgctgcccacacacccctcccccagcccggagagaactcaggctccaggccacccgcagcccgggttccagtccttgcaggaccaagtccccctgaaatgggaaaacagtcgccccctttaggggttattggagaagagctaatgtgtctgaaatgctgactctggcgagggtttcagttgttctcaaaacttaaaaagcacccttgagagttgaaggcctgaggcccagtttgctgatttgcacatttttttctggccaagaatgatgcatctttccatgtctctgtgctacacttgatccctagaaaagtcttttgcttttttgtgtcaggattggtcgctgtgatgctgaggttcttgaatggtgtttgtgcctttccctgtaatcaggaacctgggctcagtggtcacttggccgcttggttgccacccagctgtgtgaggtgccgcagtcttacctgcaatctctcctctggtggatttgtgtgtgcgaaacagccgtgacccccaagaggtgcttgtagtcagtgcttcagagtcagagtggagctgaggaagaggactgtgtcaccggggcagttgctgatgcccatggccacgccaggagcctggtctcatgagtctccttgtctctgagcctctcctacactccaccatggcatcaagctctacccctgcctccctgcagcccccagaagatgcatgtcctgcccctgctcaccactaggacctcctcctgtctggtggtcagcacagagcccagtgatgtgggtacaaggcagggtccctgcgcctcacttcccactccctctgaagccctgcagggattgggcttcagtgacctgggttccgtgggtgtggctcaccccagggcacacggcgcctaggtaacgagagaccctcccgcgtagaaggtggtcttgtttctgggctcacccactggggagtcttcaggattcagatgcaaggactttggaagatagttttgaatttcagcaaaacttgtttttcagggcactcctgttttcctgtaaatgaaagcagagcaggggaagtcctctgtaggaaaacctagaaggagtgaactgccctgctccagagtgcaggcgccagacactgggggccagtccaggagagccccacttcacctgctgctgctccatttaaaagtgcaaggcacatgcatacacgggcatgcacaattgtgcacacaggtgcacattcccagtcacgcgaagtgcaggggcacaactgtgtacatgcacacacacacaaaagtgcacatgtgtgtgcacacacatgccccccgcaggcgtgtgattctcacagtcatgctgcatccacacaaagtcttcctccctcagagtgccttgttctgtcttcacctggattgttgaaaaggctgggggctgggttctttgggccccgggagtgccaggggatcctgtggtatgatcaacagcaccaccgccctgggagcagctcctgattgctgggaacagacagtaggggctgggctggggtagaagctgcagcctgcaggcagcccagagagaggggcccccacaacaccctccccagcccccgctgattgtgtgggggcagggagtatgcaggcagctcggagagaggggcccccacaacaccctcccacccccgctcactgtgttgggggaggggtgcctgcttctgctcaggaaggagacccggctgggtctggctgtggagcgtatgttggagacccgaggccaccctggaactctccaggtgaagcctagggatccaaagaacctcacagctgtgggggatggagtggggcaacacctgaaacctccagcaagtctcttcctctctcagccccaggcctgcagaggagggtgtgccagccaactgggcctttgtgccggcactggctccccaccagtgctcaggggtcaggtgcagaggctggcagggacaaagctggctgtggctgtgtctggaggggctggccatggccctcaccccacccccggcatggggcactggaccatgcagagaaggggccaccccagtgcctgccagggccagtcagagctgccaccctccaggctgtctgttagcgggtgcctgtcagagaacaagacgacaggcctggccaggcccaaccccacagcgagatttcagcggctggccagtggcagacggcgcagggtctgagacagatattccctcgtatggtgctgtgcagggcaggggcagaatcctgggaaactaaaatgcatgttgggcgcccttatacgatgatgatatttggtacattttgaaatactgtggcccatgaagatcctgaaagcagtttggggcactgtggggtgttctgtggcctctgggcttgggtgctcctcttatccaaggcctcccaggcctgggagtttggggtctaaggcccttttcaaggcccaggcacctgcccagaatgactgggcagctgagacccgcctgctgggagccttgccagggccagcactgggcggtcacaggccagagccctgcaccaggcggtcataggccaggacctgtccaaggcagcggagtgccaggcaagtgaagccctgccatctggtgcctgagcgcagaccctgctccacggccagtggctgtcaccagccttgctgcctcagtttcccctccttaaccccggggcgggagtggctgcttcctctaggggttctgtgagcggccgctggcaattgtgtaaaagccacataccacacactggatctttgtgccagatcccgtgtcacttgaggagacagccagcccaggcagggagctgatctgtgttgtcccctggcgctgcccggggccacagagagtgagggagcggtgcttaccggccctggcggtaacgttttagatggcgagtttgggcctctgcagaagggctgtcaggaggagcttttgatcacggatgcgctgagtcagatgaaatgtggaggctgcaggggaagtgtctgtgccccgtgcctgcaggagcacgccttccccccgcagctcctccggcgcgggcaggccccggcacggcctttctggcttcttccacaggagccgtggaaaggggaattattctcaagcccctgcatctttctggcactttctggcatttcatggtggcagatggggtcacctcgccacctcggggctgatcccctgtgggcccctcgttcccacaggagccttgtgatgggcagggcaggcaccagcaccaggctgggtggcggtttggctctcaccacgccggcttccagaaggccagcaggcttgcgagtgggcacacgctggtgctggggccgggcactggtggggggtcaagggctgaccctgcggggacccctgcagacagacactgggccagagccacagggaggaaggccagtgggaacggcaggaggagggagcgtgattggttacggtggcggaactcgcacccacccccgcagccgtttgttcgtttgctcatttatttttggtctgaagtccatgcttttgtatttccccaccgttccgttgagcagcttcaacatttgccgcagttaggcctctctggaatctgtgcttagagattgtgagacagggtcaagtttcagcagctcggactcctctgtctgcagagaacctgccagcacagctgctcctgggggcaggagaggcactgtctgttttggggtgacgtgagctgatgggaaagccaggctggacatagctcctgggccggcagcccatcttggtggcggcttcacgccgtctggcatctccggtcctggagcatgagggctcaggaagagcctctgattcggctgctctggaggcctcgtctggacacacctgggcaggcccgagtccacacaccctatggcctcaggaaccgagagagaccttccttccatgtttcaacttagacaacaggagactttgttttgggaggaatcactcaattcaggtggacgctgcagctgggcgggacatctggcctctccctgtggcagggaggggcatgggagagacaggggtagtgtcccaggaactccgtgggcctgtggcgaagtcccagccctgcagctgccagtgcagggtgttatccaggggcaggacatcgtctgcagtggctctgccttccccgatgccaggtgaccccatggagccagtgtctgtgacctcttccatgctggggctaaagaggccagcaggattgggggctggcattagtggagaacctcagagcccagggctgtgggctgatgggtggcgaggcccccgccagctgcttggggatagcccagccactgttcttggtccacccggcctttgattcctttttcctgtgtgcatttttgagcaccttctgtgtgcgagaggccgtgcctgcccgagaagagaaggaaacaccacaatgagcctcggacacccacagtctgaagggcccggagtaagcctcagacgcccacagtctggagggcccggcgctgtgaacgagcagtcacagggaacagcgtgcccttatcgctgacacaggctctggagggcccggcgctgtgagtgagcagtcatagggaacagtgcacccttatcgctgacacaggcgagggcttcgtcttctcacagctcttatcttgggtgtcaccccagccagagtcagggctgatggcggggggtggggggggggcaggctgtggtcagggacctgcaggagaggggagggcctcgcttctgatgggcgacgttcatttacacacagctctgcggcccaaacggccaggctggatcctgtcttttaaaaaccttgctaatttggttgatggaaaatatcatctcagagttctgttttgtgagtccccattgccatgcgggcaaacattttcatccactaaggggccgtcgtgtttctctgggaacgtggcgttcaccgtgtgggtgaactttttcacgcactaaggggccgtcgtgcttctctgggaatgccgggtttgtggctcgtgcccactgccctgcaggtgcattctctttccccgtagctttttgtctgttgatgctttcagctctggatgtcctattttgcgtacttttattgtttatggtcagcctttaactgggggtatgatatttctttaactgggggtatatttcttttttttttttttttcgagatggagtctggctctgttgcccaggctggagtgcagtggcgtgatcttggcgccctgcaacctccatcttccgggctcaagcgattctcctgcctcagcctcctgagtagctgggactacaggtgtgggccaccacgcctggctaattttttttttttttttaaagtagagacggggttttgccatgttggccaggctggtctcaaactcctgacctcaggtggtccacctgcctcggcctcccaaagtgctgggattccaggcgtgtgccactgtgcccagccatggggtatatttcttaatgtgtggagttgtttttcctcatttttctggtccctttagagatggcaccctggagtggccagcagagctcaggggcctgcggcccaggcacacagacaatggagctggccctgccactttgctcatctgtggtgcaggtctgctgaggggccgtgagggtcctgcaagtgaaggtgcttgaggcctcagtgcctgtggggaggccacgtggcacctgtcagctgttagcgtcttgactctgcctttgtggatatggaattagagatgcttctcacagtagtggctaaactgtcaggaagcctggccgtcatctatggtcctctttgccctcatgggtgggatgccgcctagtgtgatggctgagagctcaggctgtgaccctgagtgtgtgtggccacgggcaggctgctcaccctctccgtgtcttggtctctaatctgtgcctggggatggtggagcgtcatggggccatacaggaaggatgggacatcacacatcggcttcctggggtgtgtcctgctgacagccctctgaggccagccggtcctgaggctctaggggggacgccacagtggagagagggctccatccccacccttagggcagagccccgtaggagggactggtttgcaacgtgagtaaaatgggtccccgtgagcagacacagcttttgtgctgcttcttactgagccccgcgctgtgcctgctgaactgaaagatgtgtattagagagggcagccattcccacctcctccagccgcgctacgtgtccgcaggccagggcgcctgcaccatgacaggcttcaacgcccctgtcgcggggacccagggaacacctgtctcctccacttgctggatttgtgactgggcggcaaacattttctaaagtctcccgctacgacccctcggctgtcaggagacttctgagaaagccgggcctcttttgccccagcgaggagctttcttgtgaagaggcagttcccggagggaggcgtctgtgctttgtaaagtttagcctcatgtgctgcctctgaggaggagttcagagaacatccgcttcctttctgttatcatctcagccttccagccagaaagaaggaagcgtccatggatcccgtccacgctaaccttggggtccctctgccagccctgcacatccttgtccctgggcactgagggaagcaaaggccccgccagccatgcccagcacttgtgcctgggcctttgcagaggctagaggcagggtagaggatggagagggtttaaaaggcaggttcccaggaaattccctaggtgtgggattggaggggtgctgagggaggtggcggaccctcaggggcaggagccttatggagtgagctggtccatggagctgggaggcgtcttctagtataaattctcatttcagctaaacagcttgccctctccaagcccgtgtgcacctgaaccatctctgctctctgagccttggtcccttggaggagcaggaggaggtggaggaggaggatcgggaggaggagggggaggccctttctgtattggatgcaccgcctggccccaggccctcctgcccagccttgtggctctggccgtcaatcagctcccttctcctggctttgctgctgccctgcctcttgctaggaggccatggtgtgcctgtgcctggcaggcagtgttgctgctgacctctcatctgttttgggtccccaaatctcagccctgtctccctttcgggggcacatcttgatgcggggtctctgatcccctcggggcagcaggacatccctgttttccagctgaaatgagacttcacccccaaaggaatgggctccagtccgacctactcaggttgttagtcacacgtttctattgtgaaaatgactgagaatgttgtgggaggtttggaaaccaggaagaccacctgtcccaattcagcctttcctgtcatcacaggggacgtctggcattttaacagacctgggcggcctcctgcagacaaggctcggaccctgcggccgactctgccccaggcctggcccctgctgatggccatgctccgggcatgtggcctgagggcctcacggacagccagcctcccagaccagaaaacagccctgcccgccagtgagagggcagacagatggacactaatgtccccgaacctaagaaacaaaacccaaaaccctcatttatgcttccacttccgatcacacgcatagaaggccgaatactgaccccgagctgaccaccccggcctgtgggacccgtgagtatggcctgtgtgtgggatgaggctcaggatcaggtgcagatgaccctggattatcaggtgggccccacgtcattacgagggtccttatagagaaggggcaggacagggagaggaggggatgatggagatggagccgctggggagggcatgagaagaccaggaagtgggttccccctggagcctccagaggacccctgcgggcaccgtgacttctgacttccagtctcctgagctctgagggatgcctgtgttgctttaagacactgactgacttgtcccagcagccagaggtgacagtgcggcgtggtgttggttcaccgaaggggtggcattagtgaccatgggaataagggcctctcacctgcgaagggccactctgtggggcaggaagtcttggatgtgtgccggcttcagcaggaccctcaaggctgctgggggtcagaatacgagcacttcctgcacacccagggccaccccaggctgcaggctttgtggagacttaaagatgagtcctcggccttcggaatctcctgactcaatggaacctctggtcttcaggtccccaggatgacctcccaacaggcccagggcagcagccaggagctggacacccagggctcagagctcaggaccggctgccacgggtggggcaggaggaggggcaggaccatgcgcaggggcggcggagcggggctgtgaatggagccccccttccggaagatggatgcaggtgggaaccagcgtggtgtggagttgagagcgggggtgcggcaggcggccggggcaggccccggacgggaaagtgcaggcggtgccattgatcagaccctggctgggggcctggggttcacgccttgcctggccttcagagaggtgcgagctctacttttggagaatgaggcaaaggcgcagaagcactcccggaaagtgccatccagcccagtgcctggcgctgcagccgggtggagccccaggtggtgctcacgcagccaggcgggcatggtgtgttgggggttttcataaagaaaagctgaccaggcacgtgccaagcaggccctcagccctgagggtacttgccgggggccgggagagtgtgggcccccgcttatccagaacactgcgtgggccctcggctatctggaatgcctcgccgggcctttcaattatccagaacacacagccagaccccttctgttatccggactgcccagcaacaccgggcaggtatgcctctgtgaccctgacccagctgagttgggaacgtggccacaccggcccttcctgtggggcccgtgaaacctgtgaatcacgcctctcattggcatctggatcgtggctccctagacccggctttttaaacctattcttggggaatggggaccttctctgaggtccatcttggtcaggagcagtagggccggccagcctggatctctgtcctgcagcccactttctggccaggagactggggcagcacacacagtcttgccatgcccagtgtcctttgtgaactggggccggtgtgggggtggccggggcacagtctccccacgcctggtgtcctttgtgaactgggggtggtgtggggaccgcgaggctccgcactggtgtgggggtggccggggcagggcggtgtttgcttggattcagaaatccaggcccctaggtgttgaacctgaggacagtgtgctctcctgggcctcggtccgtcctctgtgacctggtcacccagcatctcttagatttcctctgaggacagtgtgctctcctggaccgcggtccgtcctctgtgacctggtcacccggcatctcttagattccagcttaggctcagcaggtgctaaatattagtcagattggagctgcatgctgactagcacacagtttctagttgaactccagaggtgcagcctctactctcccacttgattggaagcagcacagctcactttgcctgggtcttttatccccagccccagcgcctgcccctgacaactcttcccttccctcgttctgcatatgctcgttctgcatatcctcgttctgcatttcctcgtctgaattgcaagctggtcttgctctcgagagagtgacagtgctttcagtgtcaggtatgttttcttgttccgtgagttttcagatatttggaagcagctaatttgatctttacccttctgttttcagcagaaataattctagttccctaagttatttttgttaaagggcttttctgactgtcggtgttcttggttgcttttggttgtggcgggttgctgtttagataatgtgtgttttgggaaatgatcttcccaaaggtggtgctgggatcccggagagcccgcccagattccccaggagcagctcctaccctcactgccagaccctgctggtttttgtatttcacgtggactcacctcctggcttgtcagggccttgtgggattcttagcctcttaatggatacgaatggcaccggcttgccttacctccttctggcgcttgcttctctgtgcttgtgggctgttccactgtagtctctggattggcccccgaacgtgcctgcctgctgtgcagggatccctgggttccccggggcttggggccctttcacctgcaggttccctgtcctgcggtctgtggcttgctcagtgtcctcaggtgtcctcttccgactcgagggtctcacgggtgcccccgccctgcctggcccagctgccctctctgtggcatttctaggaccgcggtctctctggcattctgtgtgccaacttctgctccctccagctccctgatgggcttttcagcacatccaggacctgtgcaccaggcctgttaataacaacggactgtggggtgaccgctctcggccgggggatgtggtttggcccaaatcctctgcatccgttgttgtagccactgtggtctgggcagagctgggccctccatcctgggtgccactcccatgaagtggtgaaggaggtgctgctctgtggaaaacgctaagggtggggagaattgcaccgtagggaagagagaaaagggggttctggcctccaacctccttccccaggccccacccacagcgcagctggcagcactctgtgtctccggcctcttccatctccccagacacgtctttcctgggaggtggccttggcatggccagtcctgctgccgcaggaaccgagaagggcaggtgcctgttcgttaacgtgtgccgcccccggagcgctggctgtgagtgggggcgcctggcgtggggctggacggccagggcctgctgtctagatgtgcagtgacaagacccttcccttccaggggagccggctctgactccgagctctttgtgggctgcatctgcagattgaggacagcgctgagcggagctggccgggtgctcatccctggtgggggcagaggggtctgcatcccggcccccggctgccgaagtggtagggtgggcgtgcccttcccacgcctgcccgccagcatcgctgagggtccccgagctggggagggatgtctctggcagggcagctcagtgctgggctcattcttcccacgtcaaggcagccgtcccttcttggtggtttcccttgctttgtggcaggagctggtggcctgggaacagctgccgggtgtttagatgaattcccgggctggctctggggcggcgcttgcccggtcacttgtctgctgcgatcactgcagaggctgcctccttgctgagcctcggggtgctcaccggcggttcccacctgctctgcacagcccgcctcgtgcacctgctgaccccaccgtgtccacagcccgccctccttggctcacatctcttcctggggtctcagggaagcggcacctcctcaggggcctcccagccacctcacgtcacttcctggggtctcagggcagcggcacctcctcaggggcctccaaggctgtctctgctttagcgttgggttcccgggtccctcccaccccgacctcctgtgcctgcggccctgcgaggcgtgatggccaatacacaccctctagaggggcttgtgtcatgtggaaccagccagaccccccggacggcttgcaggcagggagatggagaagcaacccctccatggggcagacagtgccatagtcttcaccgcctcagtctgggggcatcagggctgcaggtcagctcttccctgtcttcagtaaaggatggacgcgaggaccagggtccccagtgtcagtggcgggtcagggatgccaaagtgctgagcagaagttggccagcccttgccagaggctctggagctgggccctgacacacgatgccgtgtgtagtgacatgcaattccatgtagtgacgtgattccgtgtagtaaggcgatgccgtgtgtggtgacgtgcagttccgtgtagtgacgtgatgccgtgtgtggtgacatgcagttccgtgtagtgacgtgatgccgggtagtgacgtgatgccgtgtagtgacgcaatgccgtgtagttacatgatgctgtgtgtagtgatgcgcgatgccgtgtgtggtgacacgatgccgtgtgtggtgacacttaatgtcatgtagtgacacgctcgcaggatcgccaaggccaggctggctccaaaggcttgggtctggcttcctggggccactgggtgctctctgaggccgcccatcactgttcgggccctggggtgggagctgggctgcaaagtggcctggactttatgtcctgccaggtacagtgtttccctcagcagatttatcaggcgttttgggtgtaaatgccaggaagcctggctggcgctgaaggaccctcctcaaagccacggatgggcaccatgcttaggggaggacctggggccacttggttgcattgtgaaatgttcatgatttttaaacagttttattttttaaaattactgaagtccaacaggagcattattcagcatttgaggccccagccagtacagcgctgcctggaataaaaagtaaaatgtcccccggaaccccagccctcagttctccctccctggacccccctcctgagaatcttctcacaaccttggcttactgactccacattacggccgtgtccccgctctgtggcccggtggacgcaggtagctttgactcaaaacaggaatttgtttccatcctttcatggtcacaaataataaaaagcagcttctggacaacaatgaagttgagataaataccaggaccagaccggccacgggagccgtgggtgagccgagggtccccctcaggacccctgcatcctgcctgagtgtgcagcagctccccccgacaggagcgtcagggccggtctcctccgagtctcctggcagaggcgttgctgtcgcagctggcactgtgcatggctggcagcagaagtctgtgcttggcagccctcgacacctgctggatgtgtttgcagggctgggcaggcacctgtcccacggcccagccccgagggtctcgtggcaccagcctggcaggacgggcagcagggagttaacgggagccactgcgaggacactgtgatctcagagctgcgtcatcgctgatggaagaggtgacgtcccctccacagaaagcgcctttgtgggcgaccctggctcgtccccctgcagcccccacgcaggtagtgggctgccctctccctctcccggagtcccctcggggcaccgagaacagacccctccttcatccctgctgtcagctcatgacaccggacaatttgggtcccaattatatctagagaaccaggggaaaggtcacgttgtctagacattaatccagcactgtggcattttttcctgggcctgtatcctggcaacaggagggcgagtgggggccccagctcctcccctcctcagaaccttctggggctggaggtgtggcatgtgcagggaaggcagcctggagaaggcggtgcccttgggctgggcctgcagtgggcagccatgcaggactccatgggaggagaaaccacagctctcggctgtgctggggtggggtgaacagtggcggggaaccttggggagctgtggatggcccaacctcattggaagctgtgcgtggccaagctcaggcacctgctctgcctctcccagtcctgcctgtgtctgtcctggtcacggattcctacctctgtcccaggagggtgtgaggacagtctgtgccactcacccgtgtctgctccgagccaggagactctggccacccccaccccacccagccctgcctcgaggtcctgcactggtccctgcccggtaccgggtcagctggtgcctgcctgtcctgccctgcactcctcaggctcctcaaggacagacggacagacaggcactctagagaagggaccttggccagacggctttgccgcccccacccccataggtgcttgctttgagccccttgcaaaggtgaagccagatctgggatcccagggcctggtgcggctggacatgggaggagggccacggtcacgcttgcacggggcagagactcccagaaccacaggcctcaggagagctgggaagggaaggagagggcactgcggtgcctggagagccagagtccgcccgtgtggaagtgttgggggctgtgttgcagtgacagccctggcgtctcaggagcggagcaggacaccgcgtttctggctgtgcaaggctccacgcgggtcagcagcccatcctggcttgtcatgctgttaattagattggaaaacctcggccttccatttcttaaattgctcactcctgcagtcctcttctcttgcctgcaggcctggaaggtgtggagcgggtcaggtggctggcaggttgccaggaaggaagctcacactgtttcagggttggccgggtacttgccgtgcctgcctggcacagagaccctcattcctgccacctcccaggcagtaggcagccaggtggaccaccgagtggagagaacctttgaacacctcagcacctgaggctcagggccctgtgacaggacacagcccggggtcccccagggccagttgcacccctctggaattcctgagcactgtgactgtgacctgtgtcatatgtgcggcctctcagcttgcaaccctccattcctgcctgtggtgtggtgccatcttcaccccattccatgccaacacactcacacagacacacgctcgggccgatacgcacacatggctgtcacacacacaggttcacagacacacaggctcacgcacacacaggttcacatatacacagctcacacaagctctcacacacacacgttcacacacacaggctcacacatacaggttcacatacacatggctcacacacatgggctcacacacacacacacgcatgcaggcacacacaggctcactgtgaggtttaatctcagcaaagtctgagcacctggacttggctcagggaccctggcacacccgcttgctctctgtctgtagaggggcaggaggccctgggtttggtgggctctgtctgtagaggggcaggaggccctgggcttggtgggcaggcatttggagtgcgatggcggggcctcgcctgtgggcactgagggtctcacctcttcctgcagcttttgaagggatgggaggctccaggatagagttgcaggacagaatagatggcagaagccaggagccggggcctttgcgtggctgcctggcctgacgcacctcgcgccgtgccaggacccgggcagggcagcaaaaggcatctgtgagtcgccgtcctgtgcgggtctcagggcacagtgggtggcacgggctctcccagccgtcggttggtgaaaaacggggcctccgcccagcaccctgccaaggaaaggggaggtagcggccccaggtcaggccactgggtgaggcggggctgtgggcctcctgggtggaggggcctgttctttgggagaccacctggtgggtggtgtcaggaaggtccaagtggcttttttttttttgagatggagtttcactcttgttgcccaggctggagtgcaatggcatgatctctggtcactgcaacctccatctcctgggtttgagagattctcctgcctcagcctcccgagtagctgggattacaggcatgcaccaccatgtccagctaatttttttgtatttttgcccagctaattttttgtatttttagtagagacaaggtttctccatgttggtcaggctggtctctaactcccgacctcaggtgatctgcccgcatctccttcccagagtgttgggattataggtgtgagccaccgcacccggccgaagtggttttaatgtccccacttttgaccacttctccttctccatagggcaaatcaagcttggaaatggtgtcctggagcttaagggagttggaaaccatggcttatgttccatggtgacatggttcttgagggttagctggtccagttcccgcgtgttggccggtctggtccctgagtgttggctggtccacttcctgagcgttggccagctgcccttgctgtgctggggtacattccccgagcttccacagtttccctttccttgctgctgtattcagtgatttgcagagagaaaggcgtggagctccacaagcacctcggacggcagcaggaccctcccaaagctgtgtccacacacagctgggcgcccgccccccgccccccgccccccggagggcccggctccaagggtcatatgagtggatctggaggtcggcctctcttgaatcccagcctcctcggggtcagcccaggttgtccccacccccacctgagttactgcggaaccaaggggctcatggccattgagtgactccagttaatgctgaattaggtacctcaggcttgagtcaaatattaacagaggaggccggccagagctccccagtgtttggaggatagcttggttttctccctgagtgcattgcccataccgggtggaggcagttccgtcctgcagactccgtggttctgagttggagcccttactggccagtttaagaccctcttggagcagggttctgcagtgtcctgggggcagaggcctgacgcactcagctgctcgcccagggccctcctgttgggcatttggatttggaatctgaggctgtaggagcagctgcctcccagtgaattctgatgcacagacaggggcctgtcctgccagcaggtcctgcagacggagccgggccagggtgctgggcagtgctgcggggccctggtggaaacagtccctgcagagggtcccgggcactggtgctggggggagggtagggcttaaggaggcctcatgtcgggaccctggcaggccaccccacctcccgcagtgcccggtccgccatccacagtgacacagggacaccttctcaggtggaggaggtggcagtcacggcaattcaggagcaaacccaggcttcctgtgcctctgtggtgggccctggtggtgttggcaggcccagggcacaggcaggctcagggctctgctggggagcagtgggaggccctctctgcagggcggagagccaggtgaggaggtgtgtggcgcaggtaaacacgcctggagcgcagctctgctgtgggttagccgtgggtctctgggcgagggttcccgggatacagacacctgccccaaggtgccccacagaggatgacccccagggcagccgtgcctgagcctgcgtggtcacctcccacagtgccaaggcgctcccccaaggcccctgcggcccacctgaccagtggagaactcgcgagcactcggccagtggtgcctccaatttgcagcctccaatccctggtcagaggtgtgacctgaccctggaccagagcgctgggccaggtcctggtggcttctgcccttcagcttggaagctcctgaaaaccggctcccttccggggcagcccttggcccccactgaccctccctcagtcctaggtgtgcagtggcgtggggaccctgggaggcccgtggcgcagccccttcccgcctcctgcccgtcggtttccattgctcaggcactgcctcgcccgcgcctctttctcccagacctgagccaccgctgccaggatccttccccagctggttttccttctctttgatgtgtttccactgagggtccaaaccggtccaggcgcgggttccagaactttcttcagatctctcgcacctgaaaatttcctctgtagccattcgcaggaggtttctcagatgccccgggctcgggggccagtcagtctcatgaggacggggtgggtctgacttgtggcatcgcggcctctccatcggtgctgctgggcctgtgagccaatgggtgggcagcaccacccaccgcctccttcctcacaccagtcttgggctgcgcagagccccagccatgtgtgtgctgagtgcagtgtgaccgcgtccgcccgtctccccggacacgcctgttggagccccggccgtgtgtgtgtgtgtgctgtgagtgcagtgtgaccgcgtccacctgtctccctggacacgcctgtcagagccccagactgggctcccctggaggaccctggtgctgacacagagtcagcgggtccctggggtccctgcaactgtcccccaagaggtgtgcatggaggtggaccccctgcctcaccctcgggtggcccaaggcctctgaaaaccgtcacggcaggggtcacaaccccactcacccacaccctcctgcatgaacactgcacagctacctcccgtgggctgccctgtgaggtgtggagctgggctgcagacttgcacaaggtggggtcctgtgtctggagtcagagggtccctctcgtcgtccagcctccccggctcctcagggggaggttcggggcctttggtctctggacttgggcagcagaaaggaaacatccctgggggcctgtggtgacccccatcctccccagggtggtctggcaggggacactgttttccaaagcaaagccagagcgccaagggctctcgggattcacgagatccacatttatcccaagttagaacagcacatctgtgcgtgcaaacttcattctgacttcggccggctgtccttcttgcccaaagcaccgtgaggcctcatccctgcatccctgttgcttctttcatgtgggatgagaacccaggaaggggctgagtgtgactcctctggtttttagagagcactgcccccgccccgccccctcctgcttccccaccttttcacagttgcctggctggggcgtaagtgaattgacagcatttagtttgagtgactttcgagttactttttttctttttttgagacagagtctcgctctgtcgcccagggtggactgcagtggtgtaatcttggctcactgcaacctctacctcccgggttcaagcgattctcacatctcagcctctggagtagctggaattacaggcgcccgccaccacacctggctaatttttgtgtttttagtagagatggggtttcaccatgttggccaggctggtctcgaactcctgacctcaggtgatccgcctgccttggcctcccaaagtgctgggattacaggtgtgagccaccgagcctggcctggagttattttgggagagggcagcccctggttcagcgtggcgaggctgcgcttgctctcccgggcgggcgtccacaccctcctcgccgagatggagaagcccaaacccctgcagcgctcccccatcacgtccggccctggaagcccccggaaaccctgccacgccctgagtgggagagcgcaggtccctttccggccctggaagcccccagaaacccttgggtgccaggcctggccgggacagcagcgacactgcatgctcagcccttgcgtgagaccacgggagtgtccgccctctgcacgtgctgctgattgcccacttcgtccagcaggtttgggagcttgtggctgcatcctcctgcagacacttgcccattctggggcctcctctctgtcttttctcctctgttgaggggtctgggagggaggccttggagggtacccatgctgctgggactgatgctccccgcggtggaaggagctgcctcttgaacagcagggggctgagcagaggggaggggatgcgggggtgccgtgcacacaggtgctctcaggacgcaggggcttctcagccctgctgtcccagggctgcactccagcagggcagactcctgaggtgcagacaccccagcttcacgctcacacttctggaaggcgatgtctgtgcgtttgctttctgctgcagtttaaaaagccgggctctctccggagcgtgtgtagggcctggtcactggaatatctggactcagtgttaatggcagccacgctgggggctgggcccagctttctgttctccgtgtgggtgccatatccacctccatcgcagccctttctctctcgaccttttaaatcacagtgtcacctccccctgctgtcctgccagtggcccctggaggcttctccccacccctttcttctggggcaattcttaaggctggcattgaatcaggaggccagatgtggcccctagtaactcaccagcagtccctgaggcttctggctcccctggcccaccagcctcccatgtctgcctcaggcctcttgacccgcctggcactgaccagactgtgtgcccgggtgccgtgcccatgggctccgcctcccccaggcaggccccctcttgctccgcggccacccctgctcttgacctcacacctctgcggtgtgtctggacacaccagcaccacggcgggcggggagcggaattctccaggtggggtgggcaggccggcgggtgttgaggtctctgtgcatgcttgtgcgtaccctggactttgccgtgaggggtggccagtgctctgggtgcctttgccagacaactggtctgccgggccgagcattcatgctggtcgccatcacgtgactcccatgcgccctggccctggggttgggtctgcaggactgagaaccagcggaaggggggcgaggcctcgggaatgcgccggcaactggcgatgagctcaggcctgactaatgagcccaggtgactcatacacccggggcctggatgagtctgactgggtcaggacttccctgcttgttctgtcctgggagatgttgtccctggccctgcagagccgggaggacacgaggcctcctgggtcacagccaacgcagcctactcctgcccactgctcgcgccggccaaggcccgtcggcaccacctcctccatgaagccttcctgactgcccccatccctctgtgggcagctcgagtgtgcatcttgagtgctgtgcaggttggggtccggcgctcctgcaggcaggcggcgtctgggcctgggggctctcagagtttgaggagcgtgtggtgagggtggcctcgggcctcaaagacgcagcgctgtgggaaccgggagactggctgagcccgctctgaggaaggtggggccaggggcaccctcagctgacccggcgtgcaggggtgaccagccaggcgtggccaaggatggggtctctgggatcaggagacttcagtagcagccaggaccgaggccaccagtttccaccctggcattttccatcttttgaaggactggaaacgattggattctttaacttttttaagttgaggtgaaattcacaacgcataaaattaaccatcttaaagcgaacaattcggtgacatttagtacagccagaaggctgtgcagccatcaccactgcccaactctagaacattcacacgccggagagagggagccctgggccatcacgcagccaccgcccggccccaagaacctgcgagtccactttccacctctggatcggcggttctggacgttcatgcaggtggttcccgcagtgcgaggccttttgtttcgggctcctctcacaagcctcacgtttccaggtacgtcgtggtgttgtgcagacccacaattcatcccttttcatgggtgtgtaatagtccaccatagattctctacgttttaaagcatgttttatgtgcctgaaatgtctctgcactcgagactatagcttgctttctttcttttctttttttttttttaatttgagacggagtcttgctctgttttcaggctggagtgcagtggtgcgatctcggctcactataacctctgcctcccaggttcaactgattcttttgcctcagcctcccgagtagctgggactataggcgcgccaccccacccggccaatttttttgtatttttagtagagatggggtttcatcatgttggccaggatggtctcgatcttccgaccttgtgatctgcccgcctcggcctcccaaattgttgggattacaggcgtgagccaccgcgcccagccgagactacagctttctttaactgcatccctggagggatctgagagtctctttccctgtctcctttcctttggaaaacatttcagccagggctccccaagatgaaaggccagagtcccaggcatgggcgttgcaggtgcacagttgccacggggagctgtgggtgatggtcgctgtcagcgatggctgctgcaggtccctgtgaggaaggggcagtgccacagcaggaggagagggagtcagcggacgttgattggcagtgcccgcccattccatcattcagtcacccactgtgcacccagcacccaggctcggctgcatagaacatggcccaggaaggctccacttcctgtctcctcttctcccctctccagtctcatgatggggctggaggcatcttctagttttgagttctgagctaatgaacatgctcatgagcaggcggcaggatcccaggacggtggagctgggagcctgactgcgggtgacggacaggctctggcagcccctgtcagcatcctctccagggcatgtgaaagccagtgtgtcctcagctgccagtgccccctccccacctcctctgggcccatgtgcacgggacctgggctcccccaaccaagcctgcccgccttggttcagcagaacggctcctgtctctacagcggtgccaggccaggagtgctgtgtctgtgaagcggggtcatggttttggggccctcatctccctcgcgccctctcattggggaccccccgtctccctagcgccctctcgtcctctcctgcatgtgctgtgtctgtgaagcggggtcatggttttggggccccccgtctccctagcgttctctcgccctctccagcatgtgaagtggggtcatggtttgggggcccccatctccctagcgccctctcgttggggaccccccgtctccctagcgccctctcgccctcgcctgcatgtgctgtgtccatgaagtggggtcatggtttgggggccccctatctttctagcaccctctcgccctctcctgtatgtgaagtggggtcatggtttgggggccgccatctttctagcgccctctcgccttctcctgagcgtgtggaactctgtggtggtcagagctaaggttctgaataggtcgaagcacctccccggtgcctctcaccctgaatgctctgggaggacacagccttttcataggctacgactgacatggcaggaggggcctgcctgccacccgggtcctctgctgcctgctgcttgctggggagggggctcgagactgggatcctgggcttctgctccagctgtgcccaagggagctgctgaggagggaccgggtggggcatccactctgggcaggttcagggtcattcttggtgaccccgggtccggttacaaaggctgatggagcgcgtgggtggctgcctaagtctctggaagcccaagaatgtggagatggcgcgtctcggcccggggtctcgtggctggtctgggagaacttgcctttatttctaggcaggaggctgcactgcaagggagcgtcagtggcccggctggctttccccggccctcagcccgcactcgtccaccaaagcaagctcctttgtggggctgccctgggaagccgggatcacgaggctctgccggccgtggtcaccccatgaggcagggtcagctcgggagcaaggcggatcagatggaacagaacacgtagaccacctcgcccgcccttagtcagctgggccattgaaaatcaagtccgtagaaagacctagaaataagtcccggggtgcccttgcctgttgacgggcgggccgagcaggactgttctcaggcaggcactggtctcttggcttccaggtggtttgtttgctggtttgaggctgggggtgacgctcctgtgcgggaggaggtcgcattccattcatagcggcttatctgggctgtcaggcaggcctgggagggagcctgcctctgtgctctccaagggtgggcgacggacagacagggtgtcccaccccttctgggccaaggacagagggtcagtgtttgcagagacctggggaggcccaggtgacctccaccgagcacctgctgtgtgcagggccagtgctggctgcagagacagcggagcgtgtgtggacccggcggcccaggggaggggggcaggcaggacccggcggcccaggggaggggggcaggcaggacccggcggcccaggggaggtgggcaggcaggacccggcggcccaggggaggggggcaggcaggacccggcggcccaggggagggggcaggcaggacccggcggcccaggggaggggggcaggcaggactcggcggcccaggggaggggggcaggcaggaccaggcggccctgggggtcaggggtggaggccaggcctagacggcccacaggagggtggactcattctgaccgattcctggaagcccccggaaagtggtgatgttctggagggcccagcagaccccaaggcccccaagacaatcccagctggctctctgcggctctcggtgtctgccatttgagacaatttgggcacaggcagggcaggccgtcgcggacggtctaagccgcgcgcattggtgggggcagcagagcccctgctctcagctcctcggggtacagcgggggtaccaggcgggtgagtgggtgggtggtcactgctcctgccaagggcagccctggtttggtttgcacttgctgccctggtgacggctgctctcattcctgccccattgctaacaagggtgtcataagctactttcccggcccacatcctattaagcccatggagaccctcccacagctgagcctgctgtgggctgcaggccctgggcggtgcccacctcggtccccactggcctccttccagcactttagagcagacacaggttggagataaggaaagttccagagcacagactggaacaagccccaggcctctccctgccccagcagggcctccctggatttgggggacaggtgccctcatggggggtcctgaaggtcagagctggggctggggctgggctggcggaggtggccttggcggaggccacattccagggtctcagtgagagtctgtggcaggcagccttgcagatgccgctgagggaccccccacttcatgttgtgggtgatgtggtccattgattgcctccaggtttaaatcaggtggatatttacctagcggcctcctctccctctgcacagggcctggagtgggatggactggggtgctcagctggaggctctgcagacacagccccctgggctatgcaggccctgctgggagccacattgccatttttcatcacccactttttgggtgagaaccccctcgagtcctaacatctgccgcatctcagagcctgtggctccagtcagagcatctggaccatactgctggggtcagagcgcggcaggacaatggccagtttctgtgtgattgctggcgggaatcttgagccattccgtgggtccgtgggctgggatctggaagcttccttgaaatgtctctgggcacgtggctctgtgggtcagggtgggacatggccccgtagcaggctgtcctacagcaaaagcctgctctgtgagccagccctgtgcaggcctccctcggtacagccgggaggggcctcaccctccacccacagaaatcaaggctgcagaagacagatgcctgtgccaacccctccggcagagttatgccaaatgtcccactaaattcacccctctagggagaggtgcctcctgcatctacttttcctagaataagtatgagaaaccccaaataggttctagaaaaaacagcagtgtacacagatgttaatcctcttcgaaacttgactgagtcatttagccaaagaaaacagcaacaatggcttcatttcgagagggtcacggacaccctttcatgtttgattccttctgaccttgtgagtttatagaaggacaaggagagagggacgcgctgggtttgttcagatgtggacagaaagtttggatgataggacagaacatttagttcaatctttccacttacggctcttaaaagccctttatttttataggtaacatgctttaaacaaactttaaaatttgaggttgctagtacccattgtgtgtggattggaccagctccatgagagtggagcccgggagcctctctggtcgtctttgtgtgcgtctgtgcctgtgcctggtagtagttctgtctggaaggtgagcagggccacagagcaccaagaaaataccagggactttgcaggtctcgggtggattcaggttgatccaacagatgccggcccagggcctgcaaggaggctcctttcgcgtggctgtcgtggcccctgtgagctgggcttgtcctatgagaagagctcctgcaagaacaccttttgaagtcacccctgggggagatgagctggatggcatttggagcccccagcagctcacattcctgagctcttggtcccatgtgggattcgataattttctttacactgacaggcagcatctctttggccagccgtgtgactgttgggtcatgtgtcttctctgtgcctcagtttttctcccctgcaaatgggttcactgaaagcactggccaggggaggggctgtggcatggcatgacaggctgaggggcactgagcaggtgccaggagccaggtggtgtcaggtgagccccccaggaaccccagtttttgtgcacggtgggaaagagaccatcaggggcggaggggaatgaacacccaccctttgggggctcaggtgccaaacagatgtgtgtgcaggtgcatgagccaggtgtgtgagcaggtgcatgggccaggtgtgtgagcaggtgcatgggccaggtgtgtgagcaggtgcatgggccaggtgtgtgagcagacacttcctgtgcaagcctgtgctcctgtggctcatgggtgcatgatccagaaacccagaggcagtggcttcaccggggggtggtgatattcaagctcttgcaggagggggttgtggcagggcaggacagaagcatctgaccagagggtgcagggccacagcatttctgccctcggggacaggcggcccgtgctgggacgggcgcaggagctcctgaaacctctgttctcagttcagaaaccaggtacctttcccatctgaccccccaggcagccattaacaggtccaggtgagagagtctgtgcatgagacctactttccttgctctctccgggggggtttgcagcagttctgagcatcaggccagaggctgggactccctgcctgagtcggggtgagggcttcccgtggctctgtgagcttcagaggcttggcatgtacaagcagggctgttacaacagcctttaaaaaatcatggagaagaacccagtgcatcttctcctcagagggtggcagaggctgaatgaatttgcatctggacgttccacttccacctccttcctaaccaaagactgtatatgcaggtggttcgtggatgtatctgggctgactggcagtggggagatgggggctcccccacgtcttggcgggggtcccggtgggttgcagcccccagagccgggcttcccggaaaggggcatcgcttctctcttttgggctgtgctggggtctctctggtgaggggtgacccagggcctttgaacagccggtcctagaccaggccctggttcctgtgatgctgacaggctgtggcttgagagcctgggtcgggaaagcccagtcagaggggaagccgggggctggttctgaccctgcatggtttcctgagggacgtgctcagtgggatttgtccctggagcaccaagggctgaaggaaagccactgtcctgctttctcgcagccctggtccccattcttctgtgggtgcaggtggggatggtggggtgaacccgccctcctggggacagatatagggatgccgggatgccgcactgcaggtgtgagtcctgggaagtgggtagggggtcgatgggaggaagagaggaaggtggggtgggggcgggaggagagaagaggaagaagggggtggggggagggaggaaggaagaggaggaaggtggggtgggggtgggcggagggaggaggaggaagtgggggcgtccccatcagagacctcctgcagacctccagctgtttggtccatgggtgggttggttaggtctgggttcagaagccccttcagtgtaggtgctcagctgggccatggagtcctggccttccctctgagcacagacccaccaggaatgggcagcccgttcttagtgaccctgggggctggggagcacccaccctctgagccccagctcggcctccatgtgtcaggtgggaggcacgggcagggccaggctgtgggagtccgggagggagtcagaggttggctggggcagaggtggggtcagggagcaggaagtgagcgtttgcccactggggtagacgctgggtggatggggagctgggagtcctatagggtgaagggtctgccgtgggctgaggcatgttggggcatcccgagtacctatgggccccttggacgtccccccggcgctccctggcacaggtctgctcggagggtgtcggcctcctctgcattcaggatcgtgggtctgtcaattgggacacctatgaacaaatgctcttcccatcagtaactccgtgtgcccctctcttgagcccctgtgagatgcaccctggggtcccagcctcacccactatccttcacagcagagctgtgggtccatggcccaggcagggtggccaattcctgcccactgcagtcggcaagggggacactggggcctcaggctcatcttctgggtgcgtttataaagccagcacaatgtgcagcgtttgcagacagtatcctctgtgagcaagagcatgtttaaagggggctcatttgaaaccctacctacagggctgccatccctctggtgaatgcccacgtgggtgacagtgattctagcccttgatttccttgagctgatggtgggcccctgggctgaggagaccctcagccaggaggtcccaggcccagggatgagtgagctgtacagcagtgtcacagcaaagcagccaccctcacccggggcccatccagcgtgtgcagtgggcagaagcctgcgtgagctgggcagggacgagggactgtgccgccgccccattgtgaatctgtgttcattttcctgacttccttcatttcttgtgattttaaagctggggagtggagattctacttcctgctctatctggaaggagagggctttcggttcggcaaaaaagtcgtctttgtgggcgcctgtgcctcaggccacgtggaggccacatggaactcccattggggaggggaccatgggactggatggcgggaaagtgccccacccctgcagccctggaactgtggctggggtggggctgaggctgggggagggggtctggtggggagggagctgaggctgctcaggggactgctggtggggggccctagaaggagggagccgtggctgtggggtccctgatgggagggagatgtggcttggcggggaagctgtggagggagggagctgtggctactggggagctgtggctgggggagtgccgtgcctgggggtctgtgactggggagttgctggctggggggcagccatggctgggggaaccctggctagggaggggctggctaggggcgagccgggctgcgcggggccctggctggggagcagctggctgtggcaggagctgtggctggggcttctgctgtctgcatccgttcctgtacatagtgaaggtgggttctattgccaaggttctgcaggtgagggtgtgtgctgttcacaccacagcatcacacaggcactctcctgcacacacactcacacacagacacacaggcactctccacacacactcacactcagacacaggcactctcctgcacacacactcacacagacacacaggcactctcctgcacacacacacacagacacacaggcactctcctgtacacacacacactcacacactcagacacacaggcactctcctgcacacacacacactcacacaggcactctcctgcacacacacacactcagacacacaggcactctcctgcgcacacacacacactcagacacacaggcactctcctgcacacacacactcacactcagacacacaggcactctcctgcacacacacactcactcacagacagacacacaggcactctcctgcacacactcacactcacacacaggcactctcctgcacacacacactcagacacacaggcactctcctgcacacacacacacacagacacaggcactctcctgtacacacacacactcacacactcagacacacaggcactctcctgcacacacactcacacaggcactctcctgcacacacacacactcagacacacaggcactctcctgcacacacacacacacactcagacacacaggcactctcctgcacacacacactcacacactcagacacaggcactctcctgcacacacacacactcactcacacacagacacacaggcactctcctgcacacactcacactcagacaagcactctcctgcacacactcacactcacactcagacacacaggcact

SEQ ID NO: 299 - DNA, 19305 bp, Homo sapiens
  source 1..19305: mol_type = other DNA
cttccatctgcccagagaggagcatctggatcaaggtgctggccatgtcccagctggtggaatgcgtccccaacttttcggaggggaagaaccaggaggtgaggcccgaggagctggtcaagcatctagggctgatggggcagcttgagtggctaaggcccaggccatggaggaggtggtgggcttggtgtcccgggtcgtcttcccaggatgggcagagccgctgcccgtgggccccaaggacatcccgtggctcagggccctggggagtgcctgacccaggggtgggtggaacacgactggtgcttgtgggggctgaggcttggctgtggcttcaggggcctttcgggtgctttcggtggggggttgggcagatctctgggcctcaaagggccttggtgctcccccctgaaaatggggctcctgccactgactgaaagggctgtgtgaggccacacgaggtggcccagcatggtccccactgccgcctctccatctccactggagttagcttgctgagcccccaccctgcagccaccatcctcactggacccaaaacgaagtaggcacagagggggcagcaggcccccaggtccggcctctcgccttccacagccctgaggtccaggctcctccgggaacaaacgcaggccctaagggccacctggaaggcctcccagagcgcagcaccaggccacaggggtcacccgcaggggtgcagggaggcctcgtcatgccgggattccagccagcaccaaggccctgggacagggcaagatttggggctgagcccctgctcccagcagtcctgccacccggaaggttctaggcccttcaggcccctcccccatgctggtgatctgtccctcccctgctcgggggtgggggtcccggcccctctgtgacctgcgcctgtggtcaccttcttggatccccggccacgtctctggcatctgtctgtcggagcagagcccgtgagtctctcctggaggcaccacctgcagccccttgtggggactgtgcttgggctggagtgactgtggctgctgtgagggttcccgggcggccgctgtgtgcgggcactttcggtgggagctcagcttgtcggagagcccccaaaggcttggcccgcctcctcagcccccatttgtgtctcggggtgcagccacctccaagctccttttccttctttcaaacggggagactgaggtgtgggggccgggcctgtgtcccaggtgatcgacgccatctctggagccatcacacagaccccgggctgcgtgctgctggatgtggacgcaggcccttccaccaaccgcaccgtgtacaccttcgtggggccgccggagtgcgtggtggagggggccctcaacgctgcccgggtagcttcccgacttatcgacatgagcaggcaccaaggtgaggtctctgggctctcctgtggctgccgtgtctcagaatgtcagggccgagccctgtcctggtgtcctgggagagggggtaggcccggggcccaggcttggaacgtggggtccagtggggctggctctggctctcctaggaggaccctggagtgtgggggtcatggcccccatcctgcctgcagggctgtgctctgggggacccccaggtcgccacgctcccacagcaccgggccaccttcacggctgggtggggggagggggccacgccggggaaggtttgtgggccccgtccacctgcccactcgtcaagggggctgagagccagtcttggagcaggcactggtgggggaagggctgcctggaagctgacctgtcaacagcccacaagccaaacacctcggtgggcaggcagggccaaaggtgtgtggacacacgggcgctggccaggggctgggctgtgggccgctcatgagaggccagggatccacagtgatcctgaggggtggatggatgagaagcttatctctaagtggccagccctgggcggtggcggcaaaggcgggggaggctggcgtcccctggggtgggcgccgacccacggcttggtgtagccacagcgagggactcagctagtgagaagaatgctctggaaacgcagagtggattctcggcttcaggggagggggttggggtggccggaacccagcctcgagcgccccctcttggcctggccggggctgcctgagagctgagctttgcacccctttcaaagttatttttgtgagtgttaggagagggacaggtttatcccagagatgccagaccacccgctcaggtgctgctgctcctgggctgaaggacctcccccacactggctgggaggacggtgcgggaacttccgttgtcccgggagggctggtgctgccgctggggcagggctgggagcgcccagggccggcctcctccctgtgggtcagtgtgagcagcttgctgggtgtgtggactgggggctgcccaggccggagaggacagagggtccgagaaccccgtggagctcccacccgctcccacacctggcctcctgcccggcctcgccgtctctctgcaggagagcacccccgcatgggggccctagacgtctgccccttcatccccgtgaggggcgtcagcgtggatgagtgtgtgctctgcgcccaggcctttggccagaggctggcagaggagctggacgtgccaggtgagcgtgcccccccgcccccctcactctgctcccgtctcattggtgtgggttattggctccttctgtatcccccagttccctgcccttgactgctcttgcaagggcagagtgttccaaaaagccaacatgcagaagcgcagctccctcaataccgaaataaacgcagcctcgcctgcggccgtgcaggcccggggcctcctcagactacaccgcagagcagctgcacaggcaaaccaagagccttaaagtccacgccttctagagcagaataatttcactttgggaaattaactaaatcaagaaaatgatatgaaacaaacagagacaaacgggacaaagtgcatacccacccctaggctgcaccaacccagcgctcctggaaagaaatcccgaggcagggacgtaggtcacagtcacgccagcgtgcagggcacacgtaacccccgtcacggtcacgccggcatgcagggcacacgtaacccccgtcacggtcatgccagtccccccgaaggaaatcccgacgcagggcccacgtcacagtcacactggtgtgcgggttcacgagtttttcctcttctctgccgttatatttatgtggttgcttgcggttctgtttatcatacaaagaaaacagaagcatgaacgtcctgccgttagcatgtcccacatgttccatcctaaccctgcaattcgccttttcagggccctctgaggagggggtgggcaggggtgctggcccacactgagggtccactgggaccacccgcatccatccaaggcggagaacgggcactccccaggagagggtgcagtagaggcccattcctgggttaggctggagggagcccctccacctgcgtcctccaggaactgagtcctggaccccctgccggtccaggcctgaccgccgggctctcctgcagtttacctgtacggcgaggcagccaggatggacagtcgccggaccctgccggccatccgggccggggagtacgaggccctccctaagaaggtgcccccaccccgggcggtcgggcctgggaaggaggtggacctgcccctttgtcctggctggggtggctgggccgggcccctccttcccgggaccccggggggctgttccctcccgtgggggatgtctcaccccagagcgaacttgctcacagctccagcaggccgactgggcgcccgactttggtcccagctcctttgtccccagttggggggccacggccacgggggcgaggaagttcctcattgcttttaacatcaacctgctcggcacaaaggagcaagcccaccgcatcgcgctcaacctgcgggagcagggccgcgggaaggaccaggtgaccccgttcactgaccccatggagccccacccagcccctcgggaaagggttagaggctgagagcctcaggcggggaggtcggtggggatggggcaccggccggacagggttcggcctcccacctgcagaccggcccagcctccgcgtccacaccgtgcggggaccgcgcaggtcggcaggtcaggggcggagtgaagctggggagctctggcctcctggggattttccagggaacgaggcaggacttccctttgttaacatgtggcagcatttccatactgctgggaaacagcgacttccggagtcccaggtgccctcaggggccccccatatccctccagatgccttgggagccccgacacccctacaaaccttcaggtgcccccaggcctttccctccacgtctgcacagcagtggtcacccggtctgagcgtcactccgggtatagatacccggagaaagcgggggggaccacctgcccatctgttccccactcagagaccccggtcccacaaacagccaaggtcctgggacccggcttcccgacctgcagactcagcacaaaagcacagggacctctaagtcctgctttaggccccggccaagggcagaggtcagagtccccccacgtggactcagtcaccccgacaagtgcggggctgaggggacttgtcgggagcggagcagatgggatgggagaacggcatgggggtgcctggggccccacccctcagcattcccccaacatctaggacacagcgtggctggaaggcagggcctaggctgggcgggggcctgccggggtgggcctccggtgtctgacccttggggcctccgtttccctgtggcaagcgaagtttctctggccctccccggccagctcagtgagggacggaggagaaccacagcacccacccaggcacaggctcctccccgtccagctggggaatgcaagtgccaggagagactggcagggccaggcaggatgagcttcctagtccaggctggggaacgctcttcctttgcagccaggacgtctgaagaaagttcagggcattggctggtacctggatgagaagaacctggctcaggtgtccaccaatcttctggactttgaggtcacggcactgcacacggtctacgaggagacctgccgagaagcacaggtgagcccgggagcagccgctgctgctgtgaggggcgagccgatctgtcccgtgggcagggcgggggccccacatcctccagccagggccattctccagccagcccccagggggtgacgctgcctgtgccttggcaggagctgagcctcccagtggtgggctcacagctggtgggcctggtgcccctgaaggctctgctggatgcggccgccttctactgcgagaaggagaacctcttcatcctggaggaggagcagcggatcaggctggtgggccgggctgccgaggaagggtcggacaggggcgtgcagggagggtggggaggcggtggcggagctcacagccctggggcgcagcttccctccccctcctcccccttcattttattgacttgtgttcagaagatgagatttcactttttattttggacaccttattgaggtttttttgtgacctatgatatgctcagctgtgcaaattccacggagaggacaccccaccctttctgcttggtcttgcctcctgggccggccatgctcccgtggaggggcctgtgcctcctctcaccacctccatcggggcgtcctgcacccctggaactggcagctcatggatgtgtgtgcctttagctatgggacttagatccccatccacggagcggctccttcagaaagtgattccttttgtcttgtggacacctgggcctcaaggcttctggagtctgggttccaccggggcctcaggtcctgctggggtgtggcagcgtctgcagagccgctgtccgccttggtctgtcctttcactcgaggtcactgcagagccgctgtccgccttggtctgtcctttcactcaaggtcactttgttttaggtgtgtttttcgcaataagcacaatccacttaactggattttttggggacgttttgtctgtttgtgtttttactgatttagctctcgtgacttgtggattccgtccttgtttagtctcgggcatattttcttctattagatcgctgacccagttatttagttctctagctgtaggaccccgtgatgctgcagcagctttgatgtcttctctgcctccgtctttactttctcttccactcctttcctctggattcacagtggttttccaaaacccagcctcaatcattggtgcgtttgtggccttgtctgttgtattcttggctgttaacaaaattttttgtgactttacattttgtataatttcttacagagaagatacaggtggccctccactcctgcctcccacccatattttccaagtgcttgcattttgccccatttatttgtgtataatcatattatatttttttccggactatttaaaagttgggttgaagacattgtactcttttacccctaatttattaaggctgtgtttcttaagaacagggacattctcttacataaccacagtgtaattatcaaaatcaggaaattcaacactgatacaatcctagtatctaataatcctcaggccataatcaaattgcttcagtgtcccagtgattcccatcatagcgatttctcctccaatccgtgatccagttcacgtaacacagagcactgagccaaccttttctcctttcttccaactgttcctgtcttccttgtccttcattgaccttgacatagtttcaaaggacagacttttaaaagcgcctcagtggggactagtctgatgttgcttgtggccagatgtagttgtgcatttttattttaatttaatttgttacttcttttgagacagggtcttgctctgtcacccaggctggagtgcagtggcacaatcacagctcactgcagccccaaactccagggctcaggtgatcttcccacctcagcctctcaaagtgctgggattacaggcaaggaccactatgtagtcctggctaattttgtacagatggggttttgctctattgcccaggctggtctcaaactcctggactcaagcaatccactcacgtcagcctcctaaaagtgttgggacgacaggtgtgcaccaacacgcccagccagttacgcatttttggcaggaaaagcatagatggtattgtgtcctcctcagagacgccgactccccatgatgctcattttctcagggtgccgacgtggacccgtcacttgccaaggcgacccccttcctcctggacccttcactgcaatgttactatttttccttttgcaattaatacgttgtggggagtacttgaaggtgtttaaagtattgagtaggtaaatacctgtttattactgaaattccagagttttaggagccagtgacagcattccaacgtcatcctttctgtctaagcagcagctgtcgcttctccacatttccttgtcttcttatgtgtgaggccccgtctgctttccagtgtggcgttttgtcttcttcttttttttttttttttttgagatggagcctcactttgtcacccaggccggagtgcagtggtgtgatctcggctcactgcaacctccacctcccggattgaagcagttctctgcctcagcctctcgagtagctgggattacaggcgtgtgccaccgcacttggctaatttttgtattttttttttttagtagagacggggtttcaccatcttggccaggctggtcttgaactcctgacctcgtgatccgtccgcctcagcctcccaaagcactgggattacaggcgtgagccaccgtgactggctggggttttgtcttctttacctgaagggccccatgcctgcggcctgcacaggtctggctgtgcccgtggctgcgtgctgcctccttgtggtgaggctgctttgctttgtgttgtgtgatttttgattgccagtgcatgctctgtggaattttatctatggtaattcttggacacctgggttcaaagttttctcctccaaggagggtttgtgctggcgcttgtggacactgcctcacaggaccccctgaagctgagtttttggcttggagttctggaaccacacaagagtgaattcggtgtcgggtgaggcctgcagccctgtcagggtggcttgtgattaggaattcccaggagatttttttttttttcctgcttcacccaaagggaaggcagggactgggaagtacctcaactgtttcctctggcgggtggctgtttctaattcatccttgggggtgtcaccttccaggggtctccagtcggaccccactctgaaggccccagacctcccccactcatcaggggctgccagagaggggcagttgcccccagggcagacccagctccaggctggcaggcctttccggactcgtctttctggtcgtgtctggtttcgaatgatgtcctgtctgctagcttagccaggcctttaaaatgcccggcatcttcctggggttttctgcggaaggaggctttgccttgtggcttgctggttctatgccacggggaggcactctccaccccgcccggctgctgtccgtctctgtggggtggggtgggggtcgcatagccaacgtgttctgaatgggtttcccagaatgaattctaatcttaaatgggactgtcacaactttattttgaatttaggtaaaactcacttttgtggcatacaagtttatgtgtgggtgacttggggctgttcctcagcttttgaggacttgttagatgtgaagacttggtgaattaaaatctttcccgcccgtcagcgatggggcagtggtgctggggggcggcgaagcatgagcagcagtttgctgaggggtccccagggggcaactcctttctctgggcctcaggttccccaagggcaactcagggtgatggctgtttccagaagcctgtacggggtgcctgctggggcggggcccacagggctcctggcggggcagaggtggggggtgccagccacgcccctgccctgctccccgcaaaagcacctgtgtgctcggggcagggggcggctgccgcaagggtgggacccgcgggttccgaggctttcctggtggtggagacgcgccgaggccgtttccactccaagccccttttccaggtggtgagccggctgggcctggactccctgtgccccttcagccctaaggagcggatcatcgagtgagcctctgccctcccgccctcttctcacccctcccgggctctgcctctcgggccttgcggggcgctggggtccctgcgtggagacccggctgagtcctcccagcgcctccctttgggcgcctactcggcctgcgccaagccggggtctgggggctgaggggggcacagagaccccggccgggtccccgcaggttctcagccgagtggtcacctccccgtgggtgcagacgggcgtggggcctggggccgccccgggaggactgcgctccccccaccaaccccggccagacccgctgagccgcgcccaccctgcaggtacctggtccctgagcgcgggcctgagcgaggcctgggcagcaagtccctgcgcgccttcgtgggggaggtgggtgcccgctctgcggcccccgggggcggctcggtggcggcggccgctgcggccatggtgagcgcggggggaggggcaggggaggcgcagttgttggggggagggcggggagggggaagggcgctgttggggggagggcacggggtggggagggcgcggtggggccgccctgggtggagacgtgggggccacacgggtgggacccccgcagggatcacccgggcccctggctcttcctggggtcggtcccgggccgtctggggtccctgcgacccccacatccacccctctcgcagggtgcggcgctgggctccatggtgggcctcatgacctacgggcggcgccaattccagtccctggacacgacgatgcggcgcctgatcccgcccttccgcgaggcttcggccaagctaaccacgctggtggatgccgacgccgaggccttcaccgcctacctggtgagtggcggccacagcagggctccccgggccccaccaacagcgaacccccagctggggccccagtgagaagcgggtcagcctccggctggggaggggctggggaccaggaggggcctgagggcgtcaccactggccgctgtctggaccttgaccaccagcaccgccctcaccccggcaagtgcttgggcccagcagggtttgagggttcggccagggtgaccccacattcacaggccatggcagccggtacaagggaacaggcccctcccagcaggggagccaggagcccaggcttgggggaccccacagacctggagcaaggcagggcccttctttagaagcctgcaattccaggaaaggaggcctgcaagaatctcaggaacacagtgatgagtgctctcaggcaggccagagacgacccgtttcagccacagcataagacagaaacaccatcttcagataacacccactcaggcaggcagtgaccccacctccctccaaacgggacaggaacatgagcatcagctggcaggatgtgcccacagatgggtgctgggtgctcagagcctagggcaggggccagagagcctgggaaagggcagtgacaaggtcaggatgctcccaagcagttccagcccaggagaggacaggagggaagggcagaaaagagagagagagggaggggagagagaagagagggagagtggggagagaggcagatggcggagagagagagggagggagggatggggagggagggagggggaggagagggagagggggagagagggagggggagagacagagagagagggagagggagggagagagggagggagacagagggaggaggggggagagagggagggggaaaaggggagagagggagagggggagagagggagggagaggggaggagggaaaggggagggagagggggagaggggggagagaggggagagagggagagggggaaagaggggagggagggaggggggagagaggtaggtggagagagagggagggagagagagggagagaggggagagaggtgtaggggccagccctacagggtctgtgggtttttctccccgtgtgtagagatgagagattatagaaataaagacacaagacaaagagaagaaaagacagctgggcccgggggaccactaccactaagacacggagaccggtagtggccctgaatgcctggctgcgctgttatttattggatacaaagcaaaagaggcagggtaaagagtgtgagtcatctttaatgattgataaggtcacgtgagtcacatgtccaccgcacaggggccccttccctgttaggtagctgaggcagagagagagaggacagctcacatcattttttttaatcctctttttagaaagattaaagactaatacttttactaagtttgctactgttatctagagggcggagccaggtgtacagagtggaacataaaagtgaaacaggagcatgagctctaaagcacagcatcacagggagacgattaggcctcgggataactgcgggtgggccctttacaagaggtggtggaccagagtcttcttcaaactcccctggagaaagggagactgccttttccgatctgctaagtagcggatgcttttctttggcactgacactaccatagaccatgctccgcttggtaacgggcgccttcccagacgctggccttaccgctagaccaaggagccctctagtggccctgcccaggcctgacaaagagctcacactcgttttttggtcactttttagcgtgccccttcaactcctatctgtgtatggcctggtttttcctaggttatgattgcagagcaaagattattataatgttaaagagtaattgctacaaactaatgattaataattatatataatcatatctatgatctatatctagtacaactcttgttattttatatattttattgtactaaaacagctcgtgccctcggtctcttgcctgggcacctggctggcttgccgcccacaagagggagatggggagggggggtagggagagagggaggggagtggggagagagggaggtggggagagagacagggagggacagagtgggagggagggagagagaaacatgtgccccagcctctggagcagggcggtgggggcgcctgtgtttctgggagggccacaagacccccagccctaagttgggaagtctaccttacaaggctgggtgagaaaggcaggccccaaatgcacgtggaatccacacacaggcacagagggagccaagatgagggcctcggataaacagtcccggatttgcagagggagtcgcctgagggtcccgttctggtcctgtggagaggtgaagctggctgggcttctgggtctggtggggacttggagaacttttctgtctagctaaaggtttgtaaacacaccagtcagcactgtgtctagctactggggtgggaacttggagaacttctctgtctagctaaagtattgtaaaaacgcaccagtcagtgctctgtgtctagctaaaggtttgtaaacgcaccaatcagcactctttaaaaacggaccaatcagcactctgtaaaatggaccaatcagcactctgtaaagtggaccaatcagcaggatgtgggcggggccaaataagggcataaaagctggccaccgaaaccagcaagcgccaaccgtggcgggttctgttccaagctgtgggggctttgttcttttgctcttcgaactaaatcttgctgctgcttactctttgggccttcgctacctttacgacctgtaacactcactgccaaggtgtgtagcttcactcctcaagtcagcgagaccaccaacccaccgggaggagctaacagctgtgctacgcgccacctgtaagagctgtaacactcgctgcgaaggtcggcggcctcacggggaggaagaaacagctcccgacgcgccacctgtaagagcttaacgctcactgtgaaggtcggcggcctcacggggaggaagaaacagctcccgacgcgccacctgtaagagcttatggctcactgtgaaggtctgcggcctcaccgggaggaagaaacagctcccgacgcgccacctgtaagagctcactgagaaggtctccggcttcactcctgaagtcaggcaagaccacgaacccgccagaaggaagaaactccggacgtatctgaacatcagaaggaaccaattccggacacactgtttgcagggaggtgtagacgctgatcaccgtttccagtcattttaaaaattcaggttttatttatttactttttacagtagataggcccttcgggggttcaccccgccttcgccacagcccgcccagtgctcgcctctcttgctgcctcagagctccgcctttccttcccctcgcacacagccccgcccgctcccagcctggccccttgggttttccactgggggaagcacccccctccccgggggggcccagggcacccaacacctgcttgcagaaccctgctttctgggatgcgcttctcattaccgggcaggttaagcatgttccgtacatttagcagtggtttttacttcttttccaggaagttatctggtgaatattttttgactccttttatcttagtttctcttggggctttcgctgccttctagtattttttttttttaataggggaggcaggccttgttctgggctcagctttccccgtttgttgttcgtctttggactttgcgtgtggggcttctgacaatgactcttaatctttatgtcgtggaatgtgtcaatcctgactttatattttttgggtcttgtatcacagttcaaatggcctccccagaacaagatgatcttttctatactttaatgggttgatgaactttagacccggacaggcatttgaagacagtcatgaatttaagtataaatattagaaataggccaggcatgatagctcacacctgtaatcctagcattttggaaaaccaaggtgggcaaatcccttgagctcaggtgtttgaaaccagcctagaccacacaccaagaccctgtatttacccacccaaaaagaaaaaaaaaaaataaagccaggcgtggtagcaggtacctgtggtcccagctactcaggaggcttaagtgggggtagcttgaggccaggagtttgaggctgcagtgagtcgtgattgcaccactgcactctagcctgggcaacagaacgacaccctgtctctaatgtaaacatatgtatataaaacataggaacaattttatgtttagaaatttaaaataaggtgaataattaaaaaacaagtaggaaaagtacatagatgaaaatgtaatcaagggacaggaaggaaacaagacgtgtggtttagagaaccatgagcggggacagtgagactgtgctaggcatcagtggtcgaaatcagtggattggtttacgctccctgtgagccacgtgaaggtggacggggagtgctggattggtttacgctccctgtgagcaatgtgaaggcagacggggagtgctggattggtttacgctccctgtgagcaatgtgaaggctgacggggagtgctggattggtttacgctccctgtgagccacgtgaaggtggacggggagtgctgggttggtttacgctccctgtgagcaatgtgaaggcagacggggagtgctggattggtttacactccctgtgagccacgtgaaggtggacggggagtgctgggtgggtttacactccctgtgagccacgtgaaggtggacgggggagtgctggattggtttacactccctgtgagccacgtgaaggtggacggggagtgctgggttggtttacactccctctgagcaatgcgaaggtggacggggagggctgggttgatttacattccctgcgaacaatgtgaaggtggacgaggagtgctgggttggtttacactccctgtgagccacgcgaaggtggacggggagtgctggattggtttacactccctgtgagccacgtgaaggtggacgggggagtgctgggttggtttacactccctctgagcaatgcgaaggtggacggggagggctgggttgatttacattccctgtgaacaatgtgaaggtggacggggagtgctgcattggtttacgcaccctgtgaggcacgtgaaggtggacggggagtgctgggttggtgtacactccctgtgagcaatgtgaaggtggacggggagtgctggattggtttatgctccctctgagcaatgcaaaggtcgacttttgaaaaacataaggagatatctgtaccttgcaccaaatacataagtaatttccagatggaatagaaaactgtatttccccaccaccaacacaaccaagcctcacgataaatcacagaaaacaaaacggaccgggcgggcaggcctcggccggacgcagatgaggccacctaaagcacacccttggccaagatctgcccagggagaccatggacaccgcaaggcctgggtgtgagagagtgttcgtagcgcgagtcgcagcttgaggatggctgtcctgcctccgcctgcaactgctacagacccttgtgcagaggacagcctgggagaggggctgcagccaggaggcctggtctggatgatgccccagccagtcagggagacactgggcatttctgttcctcgatcactgctgtcggaatggtcaaaggatccagatctggctggcgcccagggagcatttgctctcatccatggtcgagggtaggggctgttgatgatgactttctggtggagagttggctgaatcttccaagatgaagtgagcatattccccactgagaaccccttggccagggctctggccacagtccgtgtgagtagggctcccagtgggtccttggaaggttggtgtgtggtcccagctgtgctcttccacacggggtgggtccgaggagccgagtgccttacggtgacgccgtgagctacacacatgagcacctaggaaaggccagtgcctgtgaccggggcagggacatgaggggctttgaggtttgctcttggtccttctgcacagtctgagcctcttatgcccaggcttgggggcggtgcagctgcttgtgttggagacacaggcccagagccactcctgcctacaggttctgagggctcaggggacctcctgggccctcaggctctttagctgagaataagggccctgagggaactacctgcttctcacatccccgggtctctgaccatctgctgtgtgccccgaccccccctaccctgctcctccaccaagcctgatgctaagggctataaaccactggcccaacagaagcttggttcccagagaactggtccctgcctgggacatgctccttgctacagccccttgtgggagctcagagggcatggctgctccccctacggtccctcgcccagtggttctgtctctttatggcaggaagcaatgaggctccccaagaacacacctgaggaaaaggacaggtgagcctggagggccggccgcaccgtgggcctctgtgtctggggagttggtggccaggatcccgagtacctgggtgctgtgacggggcgtggttggcctgggcgtgctgggtgtttgggaatgacttcccatcgcccgcttctgcagcctgctcagccctgttggggtgcagtgtgtccactgcctgcctgtgtgtgccgctgtgctcaggctctcctcttgctcctttcaggcgcacggcggccctacaggagggtctgaggcgggcagtctctgtgccgctgacgctggcggagacggtggcctcgctgtggccggccctgcaggaactggcccggtgtgggaacctggcctgccggtcagacctccaggtaggggggcccgggggaccccaggcctcctgccgcaaagcaggaagcagctgttggggctgagttgctggagagcacggtggttggctgggctgagccaggtagggagacctcacttcacgggcagttcccggggctttggcctcctccaacagggccggggtgtccgctgccttctaagatctcgctcacggcggcaccacagacggagacccaaatgtgtctgcagagcccaccctgaccactgtataagtgtatactcccccaagaccccttgtatcacccccactgtcttgttctagaaaacacctatgtcagcccaggcacaatggttctcgcctgtggtcccagcactttgggaggctgaggcgggaggatcacttgaatagaggaggtcgagaccagcctgggcaacatagtgggaccctggctgtacaatagatacatatgagccaggcacggtggtgcctgtggtcccagctacttgggaggctgaggcaggagaattgcttgagcacaggaggtcaaggctgcagtgagccgtgatcacaccactgcgctccagccttggtgacagagcaagaccctgggtcaaaaacaacaaaacacgagaaagcacacaaggcagctcttggaagtagatgcctcacactgacaggggccacagctgggcagagggtcccagagaaggagcgtctctctcatgggctcagcactttctgcagctgccctaagacctcatggtcttcgggttctttataggaaagacgcctcttttcagcatctggtcccagagaagtgtcccctcagtccctgggaagtgtccctgggcagtgggcgggccgttagcctgaagctgcctccgggggccctccaggggatgactttgtctctagaactgtggtcctggttcctagagtggcggagagcctccagtgtgactgctcccaggcctcctgtggggctgagccctgcttggataagagaaagttttgttttctaagctcagtggtggggcttagccctctgtggggcgaaagcgggggctgcgctgggctccttgtgaggaggaggacgaagtccggcctgtcccagagcccgtcaggcagagaccctccttccggcagtttgctcagccttgatccatgtaggggctccctggggtccttgcaggtggcggccaaagccctggagatgggcgtgtttggcgcatatttcaacgtgctcatcaacctgagggacatcacagacgaggcatttaaggaccaggtgagcaggaggcaggtgtggtgcccggaccccacgtgggggcctggattcacagcctcagggtgattgccgactggctgtgggcagtgggggtcggaggttgctgcccagcaagctgggctgaagactggaactaccagacccctctttccctgtgtccatcagatccaccatcgtgtttccagcctcctgcaggaagccaagacccaggctgcactggtgctggactgcttggagacccggcaggagtgacggtgcgggaggcctctccgggctctgtggcccctccctcgcccatccccagagggcagagctgtgacctcggtggggacacagcttgttcgtgtggggcccggagggtaggtgggcaggcagcggggcatcgcctgggaatggaggcgctggcagggacagaaggcccctagtcccatgtgacctccagtaaagttttggcaccaaacctgtgttgtgtgttggcggttttgggggcagggctgagagctgagctgcgggtcttggggcaggagcaggacatatggtcagtggcccatgggagccagggttggagggaatggggttgcagcgtgaggagacagacctcagcgccagggtccccagacacccagtgcagcccacagtgggcagggtcacaggtattcagaggacctggggttcagtgcaggtccctgggctgtgaggccccttgtctgagggaaaggggccctggttctgtgcatgggacagaaaccccagggacagcaggaccttcgacgctggaaggatagcctcgcttcccaggtgcagctcccggcaggtctggacagttccacagagcacggtactggccctgtcctcagttcccgtccacccttcaaccagtggctcctgggagacttttcctccctgcctcagctccctgcccagccagcctcctgtctccagagaagttctccattaaaaaataatttagcaaatc

SEQ ID NO: 300 - DNA, 27404 bp, Homo sapiens
  source 1..27404: mol_type = other DNA
ggaagctcgggccggcagggtttccccgcacgctggcgcccagctcccggcgcggaggccgctgtaagtttcgctttccattcagtggaaaacgaaagctgggcggggtgccacgagcgcggggccagaccaaggcgggcccggagcggaacttcggtcccagctcggtccccggctcagtcccgacgtggaactcagcagcggaggctggacgcttgcatggcgcttgaggcaagttcggggctcattttggaagttttctttctagcacagacatccaactctgctcctatgccagtcagataattaaggaattaagtaataattgtgctctgcaaattatgatagtgatctgtatttactacgtgcatatattttgggccagtgaatttttttctaagctaatatagttatttggacttttgacatgactttgtgtttaattaaaacaaaaaaagaaattgcagaagtgttgtaagcttgtaaaaaaattcaaacaatgcagacaaatgtgtctcgcagtcttccactcagtatcatttttgtttgtaccttatcagaaatgtttctatgtacaagtctttaaaatcatttcgaacttgctttgtccactgagtatattatggacatcttttcatggcaggacatatagatgtgttaatggcattaaaaataaaacaaaaaactgattcggccgggtacggtggctcacgcctgtaatcccagcactttgggagatcgaggagggaggatcacctgaggtcaggagttacagacatggagaaaccccgtctctactaaaaatacaaaattagcctggcgtggtggcgcatgcctgtaatcccagctactcgggaggctgaggcaggagaatcgcttgaacccgggagcggaggttgcggtgagccgagatcgcaccgttgcactccagcctgggcgacagagcgaaactgtctcaaacaaacaaacaaaaaaacctgatacatggtatgggaagtacattgtttaaacaatgcatggagatttaggttgtttccagtttttactggcacagatacggcaatgaatataattttatgtatacattcatacaaatatatcggtggaaaattcctagaagtggaatggctgggtcagtgggcattcatattgagaaattggaaggatgttgtcaaactctgcaaatcagagtattttagtcttaacctctcttcttcacacccttttccttggaagaaagctaaatttagacttttaaacacaaaactccattttgagacccctgaaaatctgggttcaaagtgtttgaaaattaaagcagaggctttaatttgtacttatttaggtataatttgtactttaaagttgttccagaaaacaaggcaaatactgaaaagcatttcatctgaagtttctttctggtattgaacagagttggatggagagtgaatgcaggttaccgatgtgttcgcaggaacaaaacgggagggagagtaacacaggtgcacggcttcatattgatttatcaaagaacttgcttttggactgttaaaaaatgtgttgcacagttctgacacttttacacaatgatgagcttacaaaggggaaaatgcttaacataaacatagtttcaaagaaggtaagtcctagtttttccacgagctgtttttttttttgagagagagtagtcccaaaatttccctattatgtggtttttcatccaaagtgttgtaatccgtgtgttctaacccgcatattacgattactcaagaaatgcaaaataggccgggcgcggtggctcacgcctgtaatcccagcaatttgggaggccgaggcaggtggatcacgaggtcaggagatcaagaccatcctagctaacacggtgcaaacccatctactaaaaataaaaaatattagctgggcgtggcggcaggcgcctgtagtcccaactactcgggaggctgaggcaggagaatggcgtgaacctgggaggcggagcttgcagtgagccaagatccggccactgcactccagcctgggcgacagagggagactccgtctcaaaaataaaaataaaaataaaaaaagaaaaaagaaatgcaaaataatgtgaacacgtcatcgagactgcggtctacaattgtggttgccatgatggggtgggtcggaagacaccgaggctgcttgaatcatgttcctggcaggttaattttgttccttttagggcatctaaatgttggagttggctttcctggcagagagtccagttgtgagtggagtattgggtggaggccccaccctccccaggttttctgcagcttgttcctggctcttctggggcttctctgaggaccccgattggtcctggggcttctttagtggtgggcctgggccagttccttccgttgctcacctctccccgaagcttaaggataacatttcgggaagatcatgagagaacgtgaaccaaaaaaaaaaaaaaaaattcaggtagggtgggagctaagttagtttagtatttgggatttttgttttgttttgtttgagacagagtctcaaacaaagaccccgcgcctggcctgggggtctttttttgagtcagcagttgagtttgaaaatccccttccttggaatccgcccaggctgttttctctggtggatgcttattgcccctgctaacttcagctgcggtctctctgctcgccttgccctccccatcctccttagaccttttaagcttcactttcctttccttgctgccccgcctccctgtctccccagtgtgatctaccctgaaaggctgctgtattttgtttccctttgggaccgagcctgctcaaatgatctgctccatgaggttttactgctatatcctactgaagtatctgggaggtcttggcggagaagaggacaacatcttggaaaatgcagcctggaacctctctgctctctttcatcagctttccctcaatgatgagctcaaaatcctctttcttgctgatggaattgtctgctgtcatcatttcagttgagtcctcctaggctgggccttgtaagaagaacaactgtttataactattgaaagtcaatatttactaagaaaaagaggttgttgttatctgagccatccaacatgaatttaagaatatattccaggctgggcgcggtggctcatgcctgtaatcccagcactttgggaggccgagatgggtggatcacctgaggtcaggagttcaagaccagcctggccaacatggtgaaaccccgtctctactaaaaatacaaaaattagccatgcgtggtggcacatgcctgtagttccaactatttgggacactaaggcaggggaagtgcttgaactcgggaggcagaggttgcagtgagctgagattgtaccactgcactccagcctgggtaaaaagagtgaaattccatctcaaaaaaaaaaaaggagacagggtcttgccctgttgcccaggctggagtgccgtggcacgatcataactcactgtggcctcaaattcctgggctcaactgattctcctgcctcagtctcccaagtagctgggaccacaagtacatgccaccatgctaggctaattttatttttatttttagaaaataaaatattttttattttatttaggcaacatgctatgttgcctagactggtcttgaactcctggcttcaagctatcctcttgcctcagccaaccaaagtgctgggattgcaggtgtgaactgccatgcctggctttctattctctatttctaggagataagctttttgagctttcacatatgagtgtgaacatgtggtatttatctttctgtgcctaggttattccacttaacgtaatgtactccaggctcatccatgttgatgggaattacaggatttcattctcttgtaatggctgaataacatcccattttgtgtatatagtccacatgttctttatccattcctcttttgatagacacttaggttgattccgtatctcgggtattatgagcagtgctgcagtaaacatgagagtgcaaatatctcttcaacatactgattccctttcctttggatatatattcagcagtggcattactagatcatgtggtatatctatttttaggtttttaaggaatctccatactgttttccataatggctctactaatttacattcccaccaatgatttggttgagtttattcctcactctgagcagcatgttagctggacttaaaccccgtccagcttgtctacatctggcccatcacttgccagtgggaaaggcacttacttctttgtatctcagttttctcatctgtcaaatggaaatataacagtaattaattcacatggctgtgtaaggataaataagacagtacatataaaaggctttcaccttttataagaaatagtgcttcgatgttacccattattattattttatttcatcttatttatttatttagatacaaggtctcatttgttgcccaggctggagtgtagtggcacaatcatagttcagtgcagcctcaaactcctggcctcaagtgatcctcctccttcacccttctcagtatttggggccacaggcgtgcaccactatgaccatctaaatttttttttagagatggggtctcagtatgttgcccgggctagtcttgaactcctgggctcaagtgatcctcccacctcagcctcccaaactgctgggattacaggcctgagccaccatgccaggcctcatctctatatctttagggttagtcactggcaccttaatttgttcatttggtgatgtcatgtttctctgattgaccttgatccttatggctgtgtgtcaatgtctgtgcattgacataggtacctaagccagtcttcattgcctggctttgtttgggctcgtctttcatcaggaaacccataggagattagggagaggctgattggtcaggaccctaagcccatgactgcttcagctgttgtagtgctggggggtgctctaagcccagcatcactgtggttggaattctttggccactgaggctgacacagccctgggttatgcctgaaggccatagctgccgagactggcacagcactggggcacgcccaagacccacagctgtgatggcgtgcttgctgctgctgaagttattcagggcccagggccactgtagttgtcaggtagtgatgtgggccagatcgccagtccctgttactggggctgtgggttctcatctggcactagggtggggtgagatctgcctgtgggtactggtctagtatcagggtgatgaggctctgcccagtactgggttttactgtagtgagcctagtcctggtgacaggtgacagcgtgctggcagccatcacagccctcgctcgctctcggtgcctcctcggccttggcgcccactctggccacgcttgaggagcccttcagcccaccgctgcactgtgggagccccttcctgggctggccgaggctggagtgggctcccttagcttgcggggaggtgtggagggagaggcaggggcgggaactggggctgcacgcggtgcttgtgggccagcgcgagttccgagtgggcgtgggctcggcgggcccgcactcggagcggccagccggccggcctgcaagccccaggcagtaaggggcttagcacttgggccagcagctgctgtgctcgatttctcgccgggccttagctgcctcctggcagggcagggctcgggacctgtagcccgccatgcctgagcctccccaccccgcagccatgggctcctgtgcggaccaagcctccccgaccagcgccgctcccggctccacgccgccgagtcccaccgaccacccaagggctgaggagtgcgggcgcacggcgcgggactggcaggcagctccacctgcggcccaggtgtgggatccactgggtgaagccagctgggctcctgagtctggtggggacttggagaatctttatgtctagctaagggattgtaaatataccaatcggcactctgtatctagctcaaggtttgtaaacacaccaatcagcaccctgtgtctagctcagggtttgtgaatgcaccagtcgaccctctgaatctagctactctggtggggacttggagaacctttgtgtccacactctgtatctagctaatctagtggggacgtggagacgttttgtgtctagctcagggattgtaaacacacccatcagcaccctgtcaaaacggaccaatcagctctctgtaaaacagaccaattggctgtctataaaatggaccaatcagcaggatgtgggtggggccagataagagaataaaagcaggctgcccgagccagcagtggcaacctggtcaggtttccttccatgctgtggaagctttgttgtttcattctttgcagtaagtcttgctactgctcactctttgggtccacactgcctttatgaactgtaacactcaccgcgaaggtctgtagcttcactcctgaagccagcaagaccacaaaccaaccaggagggactaacaactccagacgcgctgccttaagagctgtaacactcaccgtgaaggtccgcagcttcgctcctgaagccagcgacaccacgaacccaccgggaggaacggacatctccagatgcgccgtattaggagctgtaacactcaccgcgaaggtctgcagcttcactcctgagctagcgagaccacaaacccaccagaaggaagaaactccgaacacatccgaacatcagaaggaataaactgcggacatgccccctttaagaactgtaacactcactgcgagggtccacggcttcattcttgaagtcagtgagaccaagcacccaccaattccggacacactgggttccaaggcgaagtactccacttacctcttcttcccccaagcaaacagtgtctctcttcacacagctgtgctgggttgggggagggtacacgggtacccctatggccactgaggctgagacaatattgagtcacacccccagaattcatgccatgagaccagcccagcaccaggatgtgcctaaggccgacaggtagctacagcctgcctgcagctaaggtttatctgactgctgcagctggccggcagtgttgcgggccagaacacgaggctgttctgccagggccgcaggtccccttgggtgttgggcgggttgagaggcttcccctgtatgccagcctggcatcaggggctgagagttcttgcttagtgctggctttttactgaagtgggcctggtcctgggttgtaaagcaaagtcctatgcgcgcttccctgtcctttcccaagagggcgctcccggttaggatttggcagtcggctctgaggatgaatggaaacgcctgggacccaggttaggggatgtgtagcctagctgtcatttccagcctagagctctatgagtcagtctccccaaacatttatctccctctaagacctgctctttggcatcagaacggattacatgaatacacattcctccttctctaattcttgcctacccgcattgtattttcacagagattccatcgtgcctggctcacataagcgcttcctggaagtgaagtcgtgctgtcctgaacgcgggccaggcagctgcggcctgggggttttggagtgatcacgaatgagcaaggcgtttgggctcctgaggcaaatctgtcagtccatcctggctgagtcctcgcagtccccggcagatcttgaagaaaagaaggaagaagacagcaacatgaagagagagcagcccagagagcgtcccagggcctgggactaccctcatggtcattagacccctcccgttttcctcttcttgactgcatgtaaatgttcggctcaccccctccgctctgaagccgcagagctttgtattcgacggctcatgctttcctgtgcctgagtttctgcatcttttagatggggatacagcctgggccatagtgaaaccctatctgtaaaaaacaaaaacaaggtcgggcgcggtggctcatgcctgtaatcccagcagtttgggaggccgtggcaagtggatcatgaggtcgggagtttaagaccagcctggccaaaatggtgaaaccccgtctctactaaaaatacaaaaattagctgggcgcagtggcaggtgcctgtaatcccagctacttaggtggctgaggcaggagaattgcttgaacctgggcggcagaggttgcagtgagctgagatcacgccactgcactccagcctgggtgacagagtgagactctgtctcaaacaaacaaacaaacaaatgggggtaataatagtaccaagcacatagggttgttgggaggattaaatggggtcatctgtggaaactgctttaagccagtgctgggattctagaggcacttagcattagttcccatctttactgctacctttgtatgggtctgtctggaagcaatgtgctcctgatagtctgggagtagaaatctgtgctcacctgtgaccccaggttgttactttcttactgtcctatcttgtaagccaaagccctttccccaagaatcctgagattagtggtacttcccttgtggggtctgctgagcctaaggttgggttggaaaagaggaggttggttgctaggggtcagacaaatgttatcttttgtttttctcgtattcttataagttccttctgcctttcagcctctcagggtgacactggattaggtgaatcttccccaaagtaaccttctgatttatttcctgcctccctgtagtgggaactgggcagagacctctccgctggactccaacatagacatactggggagtccctcttatccctgagccccacagatgcacatttggacttagctccgtggagaacgatttgaatgaaaggaagccatattctcagttatgctttctctaatgtttttttttctctcccaacaattgctcatactactcatttggcagtgagtaatatatacttttggtgacatctcacttttcctaatggactatattaaaacttttcttgttatcgaactttttgtgtgtgtgtgtgtgagatggagttttgctttgtcgcctaggctggagtgcagtggcacgatcttggctcactgcaacatctgcctgccaggttcaagcagttctccttcctcagcctcccgagtagctgggattacaggcatgcaccaccacacccggctaatttttgtatttttagtaaatatgaggttttaccatgtaggccaggctggtattgaactcctgacctcaggtggtcttcccgcctcggcctcccaaagtgctgggattacaggtgtgagccactgtgcttggcccttgtgatagagctttttaaagattcatgtttgatatcttctctccgatttgtttgcaagctgaatgaacacttcgtacttgagagactttacaggacttcatgtccttagtagctttaagaaaaacattagatttttgtcaactttttttttttttttgagacagaattccactcttgttgcccaggctggagtgcagtggcatgatcttggctcactgcaacctctgcctcctgggttcaagcaattctcctgcctcagcctcccaaggagctgggactacaggcacctgtcatgacacctggctgatttttggatttttttttttttttttttttgagatggagtctcgctctgttgcccaggctggagtgcagtggcgtgatcttggctcactgcaagctccgcctcctgggttcacaccattctcctgcctcagcctcctgagtagctgggactacaggcgcccaccaccacgcccggctaattttttttgcatttttagtagagacggggtttcaccgtgttagccaggatggtctcgatctcctgacctcgtgatctgcccgcctcggcctcccaaagtactgggattacaggcgtgagccaccgcacccggctgatttttggattttttttgtagagacatggttttaccatgttggccaggctggtctcgaactcccgacctcaggtgatccgcccacctcggcctcccaaagtactggaattacaggcatgagccaccatgcccagccttgtcaacttctttaccctaggccttgccctcagcatttttttctcttccccttataggcctggttggtttacacaacattggacagacctgctgccttaactccttgattcaggtgttcgtaatgaatgtggacttcaccaggatattgaagaggtaagactgttcttcaggctgatgagcatttgtattatttctttttcctttttttgagatggagtcttgctctgttgcccaggctggagtgcagtggcatgatcttggctcactgcaagttctgcctcccgggttcaagcgattctcctgcttcagtctcccgagtagctgggactagcccgccaccatgcctggctaattttttttgtatttttagtagagacggggtttcaccgtgttagccaggaaggtctcgatctcctgacctcgtgatccacccacctcagcttcccaaagtgctggaattataggcgtaagccactgcacctggcctgtattatttcatttttaatatattcagttattcacagtgacttggactttttgagatcttctctcaaaagctggcagaggaaagattggcttctgcatattctggcctacacattatttctaaaacttcttaggttggtctggggtgcgacccaagtattggtactttttttttttttttttttttgagatgaagcctcactctgtccccaggctggagtgcgacggtgcaatctcggctcactggaacctccgcctcccgggttcaagggattctcctgcctcagcctctcaagtagctgggattacaggcgcccgccaccacacctggctaatttttgtatgtttagtagatatgagttttcaccatgttggccaggctggtctcaatttcctgacctcaggtgatttgcccacctcagcttcccaaagttctgggattacaggcatgagccactgcgcccggccaggtattggtacttttttaaagccctctttgggtgattttaaatgcggccaggattgacagccactgacttggttaaaagacagagttgggactagaccaaagtcggagaaggagtaagtcagtggggagtacacacccctccttccaccaacactcacacaatgcactctctccctctgtctctctctatcactccttttctgccctgtgctctctcctttttcccatccgaaaaatgcctgtgattaaatgaatcattgccaaaccacacggacagcctttcatgttgcctttcttcccaggacctaacccagcatgtgcctctgcagtctggagagctttaggctggacattttgctgcttgcccgagatgtggagccaggacctcgtgcatctgccgtctgctctagcacgattgctgggcagggtgcagaggggccaaggcagcagtcatgctgatccccctctctagagggtcccctgtagagcagattcactcacatggtgcttctcaaccttgaccacacattgaaataatctgaggaactgaaaaattctgataactgcccgcgccccgccccccggacccagaattctggtttaatttgtatgggagtggcctggatatgaagatttaaaatttctcccaggtgattccagtgtgcacctagctttgagaactacatgtaaggaggtttctggctgttcttgtgtggcaggatcacggtgcccaggggagctgacgagcagaggagaagcgtccctttccagatgcttctgctgctggagaagatgcaggacagccggcagaaagcagtgcggcccctggagctggcctactgcctgcagaagtgcaacgtgccctgtaagataccctcccactgggctcctggctgctgatccaaaggggatgggaagcttagagagtgaagagaggaactaacgggcagtgaagcaacaagaagcaagttaggtagcctggacccctcagattatagagacatttgtgtaagaggcacacatctttggaggtgcagaattgatattatttatggacattttacttccatacctaacctttctctgcctctcagtagagtaagtgaaggcatctcctccaagcttattccaccacagtcagggaactgcaggaaaacagaataaaggaataaaaaagagaaaacatgttctacaaaataattcacaaataggttaggtttttttttttttttttagatagctatattgggttgtgcatcacatactgtaaaattcatccatttaaaaacatacaattcaaaggtttgtagtgtattcacagagttgtgcctccatcatcacaatctaatttcataacattttcatcacccccagaagaaatcctacacttacgggttttcccttgtgtataatacattgcttttctcttgctgctttcagaattctttgtctttaacttttgaaattgattatgatgtgtcttgatgtgggttgctttagatcagtcttattggtgtcctttgggcttcctggatgtggatttgtatttccttccctgggttgggaagttttcagtcattataggtatgcgttgcttaccaacagggatacgttctgaaaatgcatcagaaggtgaatttgtcattgtgtggacatcatggagtgcacttacacaaatttagatgggacagcctactacacagctaggctgcatgctatggccactgtgctcatgtggtctgccattgactgaaatgttgatctgcaactcgtgactgttatttctttggataagctttccatctcttctcactctcctccttctgggactctgataatgcctattttggtcggcttgatgtcccctaactctcttaagatatcttcactctttttcattctttttcatttttgctcctctgaatgatttccagtgacctatcttctagtttgctaatcctttcttctgcttgatttagtctgttgagcttctcttttgagctcttattgcagttattgtattcttcagctctgttatttcttttgaacttttttctgtctctttgctgaaattcttactttgttcatgcattgctgtcctagacatggtaagcatcttcatgatcattattctgaattgtctgtaaggtaagtcacttatcttcatttcaccaggggcattttctggagatttatcttgttcttttgcttggaacatatttctctgtttcttcattgttcttgattctctgttattttctgtactttagttaagaaaaatacctctcccaggctgggcgcggtggctcacgcctgtaatcccagcactttgggaggccgaggtgggcagatcatgaggtcaggcgatggagaccatcctggctaacacggtgaaaccctgtctctactaaaaatacaaaaaattagctgggcgtggtggcgggcgcctgtagtcccagctactcgggaggctgaggaaggagaatggcgtgaacccgggaggcggagcttgcagtgagccgagattgcgccactgcactccagcctgggccacagagcaagactctgtctcagaaaaaaagaaaaaaaaaaagaaaaaagaaaaaaagaaaaatacctctcccagtcttgtcccacgggccttgtataagagacgaacttaccaattagccctgccggacactcggagcacctgttgaccctttgtgttgtccagactgtcatctatgttgttagcggccctcaggagattagaatgtgtcaagtcctgtcagtgccctagacaggggagatagaaaccagccccttgaggtgcaggtggagacgttggggcattaaatgtgtgttccagtttattctatcctcagggaaaagctgggagcatgagttaatccgccacttgctctgcaaaacgctggacagaggatctgtggcaagtgcctgcactcatattgaaactgcacactccttcacgcattgttttactctttgtcacccccaggggcctagcgaatgctggctgctctctgcttagagacggacaggttagttggaagcttgacgctatctgttgagcaaaccagtgggagcagctgtggaggtgctcacctgcctgttcagggtctcagaggagcactggtttcctgctctgtcagctcccagatgcatagaaaccccagggcagcagctgcactgtgcagacaaactccttctagggagaaagtaggagccgggcctttttgcctgttcacgctgcactgggcctggggggatgttctttggtctctgtgcccctgtgggacttacaaatacagagccttgtcagctcccaaagctcggtggtcgaggagctagaccttcatttgagaggggtaaatgtgtactcaatgtgtgaagttagagacctgattttaccatacagcagggggtgggagaaggcatgggacttgcccacaggcctgtccagactcctggaaatctattgtttacctgcctcattggctccaggtgcaggccagttattaatagaagcccatccctcgggcaacagctaggagagcccgcagacatatccttccagggagaaactggaagcctggcatttctgcctgtttgctctgtgctgagcacagctgctggaagtgctcacgtgcccgtttaaaactgcctctttgccctctgtggtcgcagaggattcataactgctgacccatgtctgctcccagagctaggtgacccagcagccaagcccttgagtgggaactgcaaaagctggggctgcctatgtgtggtccaaaccctcccctctccaggagaaagctgggagtagggattccttcctcacagtaaggtactgtgtctggggtggggcttgtggtgcgagtgtgtctcagcttttccaaccggttgcgatgtgggtgttctccccattgccccctgtgcaggcctctctcagctggtttctgggtttctttcagagggagttgatctgtgtgtagatgagagttttaccgtgtgtccatgggagaaggggagcaccaggagcctccttctctaccatctcgcttgtgtcaccctctgtgattctttttatacatagttgaatttgattcactaatattttgttgaggaattttgcatttatgttcacgggagatactggtttttaggtttttttcttacaatgtctgtctggttttggtgttaggataatgctggcctcagagaatgagttaggaagtgttctctctgcttttgtcctctggaagaggttgtagggaattggtataatttttcccataaatgtttggtagaacccatcgttcactagtgaacccatctgggtgtaactgagtactcccattttctaagagatagttatattagttttcttattactttcttttcacttctcctcttcccatccctcacccctcaccgcggccgtgtttcctgtttcctgttagccctttagaaatgcaaatatcacctttcgcctacccctctccagacattccctgctgggcaaaaggaagaatctgtaaatggaggtaggctgatggaggtttgattgagaacgggcaagttcttccagctgatctttcctgagacttggcagtagatttgcagcccaaagcatacccaccagggaactctccctgccagggggtggcttcgaaacttccaccctctaggggtttgtctttcacccactaggaaggcatggagaaagcatgcccactcggccacttttctgcccggaaaggcgccaactcagctgctgggaacttgataactgcccggtagaaaaccgccattgctcactccccccacccccacaacacaccttatgaaaatgcccctctctcctccaaaggagaaatggcacattaaaaggcaggatgtgtcttgctccttgccccaggctggcttcagaataaattcacatttgtgtataaaaccttttgtatcacatttttttttgtatcagagttagttgagctctacacgcagtgagcagctcctcagcttttcgctgcataggtactgtgttcagctttccttccgtcctcagtctggagaacctcaatcaacctagctccaggtttatggattctttcttttgccagctctaatctgctattgacctcctctagtacatttttcatttcagttatggttctcctcaactcaagatttctgcttggttcttcttttatagttttttctttattgatactttttatttggtgaggcagcattttcacactttcttttacatcttttgacatggttttctttagttctttgaacatattataacggctaaagtctttgtttagtaacgccaacatctagggcttctcagtgaaaggttctacgattgctgttttcctgggtggccatgcttttctgtttcattgtaggtcttgtctcttttgttggaaaatgaacattttagataatgtaaggtggcaacactggacatcagagatccccacagcagggtttgttgttgttgctgttttatcgtttctgggcagttcatgattctgtattcgccttcattgctttcttgcatgtggccttgttgtcagccagaggggagggatctgagccctctcaggtcttacttgggcatgcgcctggccttctagatcctcaggaatgtatcagtgcttttcaaagtccctgtggacatctcattccccaggctgagtgcagtggtgacatcacagctcactgtagcctcaacatcctgggctccagtgatcctcctgcttcagcctcccaagtagctctgactacaggcgtgcaccgctactctcaagtacttttttaaattttttatcgagacggagtcttgctatgttgcccaggctggtctcaaactcctgagttcaagcgatcctcccaccttggcctcccgaagtgttaagattataggcatgagccactacatctggcactggagcttaagttttaagaggcgttctcaaaaatcaataccaaacttactgttcatttattgatcacttcttctgtcgtgccaacttagccttgcagtggggtggagggctaggaagagacaaagtgatgagtgttcatgtgtgtctaagtaccagggcatgagaagcgactctgaagacctcactaattggctgttccttttctctgtggccagtgtttgtccaacatgatgctgcccaactgtacctcaaactctggaacctgattaaggaccagatcactgatgtgcacttggtaagaacctagaaccagagcactcggaagcttaagatgctgctcatttcactcattcagctgttgttcccgtagtgtgtagaggaataaaagagttaatcccctgtaatcccagcactttgggaggctgaggcaggcggatcacgaggtcaggagatcgagaccatcctggctaacacagtgaaaccctgtctctactaaaaataccaaaaaattagctgggcgtggtggcgggagcctgtagtcccagctactcgggaggctgaggcgggagaatggcgtgaacccgggaagcggagcttgcagtgagccgagatcgcgccactgcactccagcctgggtgacagagcgagactctgtctcaaaaaaaaaaaaaaaaaaaagaaaaaagagttaatccacataaaacacttatcacagtttcataatattgttactggtattattttgcacctttgtgaggagcttctgtctcttggctccaccttctggcagttggcctgacctggcttatggtggtgttcccatctcacctctccgctctccctcttgcaggtggagagactgcaggccctgtatacgatccgggtgaaggactccttgatttgcgttgactgtgccatggagagtagcagaaacagcagcatgctcaccctcccactttctctttttgatgtggactcaaagcccctgaagacactggtaaggggattctcttggtatttgctgcccctgtatgtgttagtccattttctgttgttataactcaatatctgagactaggtaatttatttcttacagttctggaggctgggaagtcaaggttgaggggctgcacctggtgagggcctgcttgctggtgggaactctcagagtcctgaggcgaggcagtgcagggcatcacatggcgagggggctgagcatgctaatgtgccagctcaaatctctcttcctcttcgtatgaagccaccagtcccactcccaggataaccgattaacccattaatccatgagtggattaattcatttatgagggctgtgccctcatgatgcaataacctccccccccccttttttttggagacagagtcttcctctgttgcccagactgaagtgcagtggcacaatctcagctcactgcaacctccgcctctggtgttaagtgattctcctgcctcagcctcccaagtagctgggattacaggtgcccaccaccatgcccagctaatttctgtatttttagtagagatggggtttcaccatgttggccaggctggtctgaaactcctgacttcatgatccacctgcctcagcctccctgggattacaggcatgagccaccttgccctccccaattatctctcaaagtccccacctttccatacagccacactggggattcagtttcaacctgggttttggggaggacaaaccctcaaaccattacaccacacagcacagtgtggccaattcccccttgcctctttgatctatctctggcttctggaaagtcacttatttcattttcatggcactggccaatttctcctttgtttggcaaaaatgtttttccctcctacctccacttccctcatactgctcccttaataggagccccctcctgttttgttcctccagtcagtaggtgccctttgagatcctgccaagtggaccacaccaggccaggcattaagggggatatgaggagaaccagaagaaaagctgaaaccctcagctgcaaagtgtggggaggctgtaactgatacagtttgggactgtgtccctgcccaaaaatctcctgttcaattgtaatccccagtgttggaggtaaagcctggtggaaggacattggatcatgggggagggtttctcgtgaatggtttggcaccatcccccgtggtgctgtctttgtgacagtgagctctcatgagatctggttgtttaaaagtgtggagccaggctgggtgtggtaactcacgcccataatcccagcactttgggaggctgaggtgggtggatcacctgaggtcaggagtttgagaccagcctggccaacatggtaaaaccctgtctctactaaaaacataaaaaaattagctgggcgtggtggcgcagcctgtagtcccagctacttaggaggctgaggcaggagaatcgcttgaacccgggaggcggagattgcggtgaactgagatcgcgcccctgcactccagctccccacttggtctcttgcacctgctcctcccaggtaagacacctgctcctcccaggtaagacacctgctcctgcttggccttccgccatgattgggagcttcctgcggcctccctagaagcagatgctgccatgcttccggttggcctgcagaaccatgggccaatcaaacttcttttcttataaattacccagtctcagctattgtctcacagcagtgtgagaacagatgaatatagtattctaggtgggaaataccaacgctgctttttccctgttctcttgggtgggacaggaggacgccctgcactgcttcttccagcccagggagttatcaagcaaaagcaagtgcttctgtgagaactgtgggaagaagacccgtgggaaacaggtactcattccctaaatcagactcagctgtccctcggtgcatatgggggatttgttccaggacccctgcttttaccaaaatccacacacactcaagtcacacccagtcggccctgtggaacccacgtataggaaaagtcagtccctcatctatgcggttgtgcatctgggatactttatttttgatgagcatttggttgcagatgtggaactcgtgcctatgggggagggcagactgtatttatttacaacaatttgtgtataagcggacccatacagtccaaacccgtgctgttcaggggtcatctgtccttcactagtctggggttgccccccgtggatttcctgatagaatcatcagaggccccgaggacaccccatggtgggtgagaaagggaatctgggtctggctagtatctgggacgctgtggttctgatatctggagccgtggatgtggcttctcatgtcgcatcactgagagggactgcaggagggcgcctgagagcagccggcagggcgtttccctccaggcgagaccagctccctggagcagacgcggtggctccctgggtcctggtacctgtgcagagccctgtgcccttgtgcctcttgtggggggccacatggtggtagaatagccaagttttgcattattctcagaggagctcagcagattcggcgaacaggagccttgaactccgtgatgtcgccccgctcccctctttttgggaagaacgcgttgctagccctgacatttctctgactctctcattccaagtagacttcatctccagagtgattttgatttttcaggtcttgaagctgacccatttgccccagaccctgacaatccacctcatgcgattctccatcaggaattcacagacgagaaagatctgccactccctgtacttcccccagagcttggatttcagccagatccttccaatgaagcgagagtcttgtgatgctgaggagcaggtgggatgatcccgacctccttgccatcctgcctctccccagatgccatgtcctttctgttttcccttccttcacccccagtctgctaggagccacctgttcctcagagactgtccccagcctcaaaagcctttcttctttctaaatattggatttgtgttcatatgcctcacagcactgagggacagaatccagaattcagtaggcttctttggaaataatgtggaatacatagaaatgcataggcaaacatgtcattgtgggttcatagtaccaaccaaactttcttcctcagatggcctgtgcccactttgaggataatcataaagtagccagttgactggaccacatttaatcagagtaaagtttaattcacttgtcctgagataataacttatcaagagattctgagaaaaaaagagacacaaggccaggtgatgtggctcatgcctgtgatcccacacctcaaaaggctgaggcaggaggattgcttgagcccaggagttcgagaccagcttcagcaacataatgagacccccgtctctcaaaaaaaaaaaaaaaaattagctgggtgtggtagcacaaacctttagtcccagctacttgggaggctgagttggaggatcacttgagcccaggagtttgaggctgcagtgagctatgatctatcattgtactccagcctgggcaacagcgcaagaccccgtctctaaaaacaaaacaagaaaaactaaaaaaaaaagacacaaatatctttttttccatagatttgaaatgctacataacaaattttgtattcctgtatgtacgggtctatttttggagtgtctcttctgttttattggtctgtttggctatttatgctctagaaccatgacatttagaaaattaagacctgataatatgttacaatagctcctattataacatgatttctttacctacttaggccgtatacatttcataggattctctttttctttccttctagttctttttatttctacctgcagattctgcccaatgaagtgtatttaaaattgtttttcacttaaaaaagacttttttgactggatgcagtgggtcacgcctgtaatctcagctctttgggaggccaagaggattgctggagtccaggagtcgagcccagctggacaacaaagcaagactccatctttgcaacaacaacaaaaaagactttgttatggaacattacaaatagataccaaagtgtgtagtgaaggaagagttagacagtgaatccttggctgtaacagttaccaaaactcatggcaggtcttgcttttcctataacccaccctcttgtttcacccaaccctgtactggatttttttgaagcaaatcccagacatcatactatttcatttataaacacttcattatgtatccctaaagaataagcactcaaaagataatcatctccatcttgcaattccttaatagcatcaaatatctggtcaacgttcagacttcctgactgttgtgtaatctatgtggtttgtttgactctagatccaaacaacgcctacacttgcatttggttaagtttctttcttttcttgagttccttttagatttccgctccttttcttttccttgcagttgatttggttgaatatttttttcatatgccagcactggctggttgatatcttttaacatgttcctgtaacccttttatttcttgtaaactaatatttagatacagatattgccctgcattttgtaaagttctgcacaaagtctgcaaatggaaatagggataatttcagcctccactgtgggtgactcagctttgcgtctgccgcccttgccctctgtctcccctccccctacaaaagacttttttggctgggtacggtggctcaggttagggtcattcctgggcttgtggagaaacagaactgtgttctgatgatccccacccctcccaggggaaagttctaatcttgccttggctttgggggcctctctcatgacctgccttccatctcttgcgtgctctgccctgccaagctgctgagccttcgcagttcaggatccacactcgggaaagcccctcctggagggtgcccactggctgtgggtcgggactgttttctaatattctaaagtcccagagtcgggcctagtgtgggcaggtataaatgtgtgaggcagtcgtgtttgtggtggtgggtgaactgtctcgtgcctgtctctttccagtctggagggcagtatgagctttttgctgtgattgcgcacgtgggaatggcagactccggtcattactgtgtctacatccggaatgctgtggatggaaaatggttctgcttcaatgactccaatatttgcttggtaagaaacatcatccacaattgcctcctgccctggattggccacctctagcaaatgctgggctcagggctgcgtgggtctctgagatcaagacacactgtgatcctgctgtctgggtgtggggcctttgatgagggttcaagcctttttcggtctgaagtccccatgtggtttgcacctctgtaagggttcaattcacttcacttctaagtttttggtgctctaggctcatgctctgcagcttcctgctttgtgggaaatgtctagagagcaacgagtgttagaaatatgtaagttaggcctctgggataagcatgaccaagtttaaacacagggacaagggcactaaacatacttcattgcacaagacatcctgctgctgttgctccaggctcttgggagttgctaggggtgggcttgtctggaggatgaggggcacattatagcatcctgtcctctgtgggtgcttgtgtcagctggctgcttgaccccatttgtttctggcttccaggtgtcctgggaagacatccagtgtacctacggaaatcctaactaccactggtaagaaacagatttgggtaattggagtctgatgagctcacatagggtccttggagctgcatgaaacgcccatggattcccctgttactaacatgctgatggctcactgtccgcctcatctccagcactcaccccaccaccccatgtttgcctcacacgtcacactccaggaatattaaagtacaggtagctgccaatcagccgtgccctccatctcccgtctgctgtgcacatgcacttcctggccgtattgtcctctcctcgtttaccatctaggccaactccccactcatgttttcatactcatggccttttcctatcctgtgaagcctttgctgattcacccagattcgtaggggcttcttgtatggttttcttttcttttcttttctttttttttttttgacggagtctcgctctgttgccgggctggagtgtagtggcacaatcttggctactacacttggctcctcctcccaggttcaagcgattctcctgcctcagcctcctgagtagctgggactacaggtgtgtgccaccacgcccagctgattgttttttgtatttttagtagagacggtgtttcaccatgttggccaggatggtctcagtctcttgacctcatgatccacctgcctcagcctcccaaagtgctgggattacaggcatgagccaccacacctggccttcttatatgcttttattgcatttgagcatacctcttttacagcgaagatcttttttttaatttaattttatttttagagatggagtcttgctttgttgcccaggctggagcactgtggtgtgatcatagctcactgcagccttgaactcctgggcacaggtgatcctcccacctcagcctcctgaatagctgggactacaggcatacagtctgtacaccatgcttggcatattttaaaaaaatgtttgtagagatgaggtctcgctatgttgccaggcttgtctcaaactgctgggctcaagccatccatccatttcagcctgccaaagtgcttggattataggcatgaacactgcgcctggccatcacactgtttttttgtttgtttgtttgtttgttttgagatggagtcttgctctgtcacccaggctggagtgcagtagcaggatctcagctcattgcaagctctgcctcgtgggttcatgccattctcctgcctcagcctcctgagtagctgggattacaggcgcccgccaccacgcctggctaattttttgtatttttagtagagatggggtttcaccgtgttagccaggatggtctcgatctcctgacctcgtgatccgcccacctcggcctctcaaagtgctgggattacaggcatgagccaataaatatttttataatcattaactaccgaggagaagctggagagaaaaaaggtggatgaagttaaggcagagagactttgtaagtttcttagctgagcttttggagactgtatatcagagatcctatttgaggtgattttcagctacagagataggcctggtcatttgaaaaataatggattaggtgaagcttgcgtttgaaatcctccttctacttttcatctttctctcttgtttattctgaacatccatcttagacacccaatctttgtcactttgtggttgtcattgatttccctgttattgagatcagaggttggcagactttctctgtaaagggctggagagaaagtacttcagactttgtggtctgtgcggtgtctgttgcaaccacttaactctgccctgtagagcaaaagcagccgtagacagtacatgggcagatgagcatggctggggtccagttacatttacttgcaaaaagagggttggagactgggtgcgatctcccacctttaatcccggcaatttgggaggccgaggcaggaggatcacttcaagccaggagttcaagaccagcctgggcaacaaagcaagactccatctctacaaaaaaataaaaattattatagctaggcatggtggtacacatccatagtcctagctactcaggaagctaaaactgaggcaggagggtcagttgagcccaggagcacgaggctgtggtgagctattattgtgccagtgcactccagcctggtgacagagcaagaacggtctcgtcaaaaaataaacaaaaggctgggcacggtggctcacgcctgtaatccctgcactttgggagactgaggtgggcagatcatgaggtcaggagattgagaccatcctggctaacacggtgaaaccctgtctctactaaaaatacaaaaagttagccgggcgtggtggcgggcgcctgtagtcccagccactcgggaggctgaggagggagaatcgtttgaacctgggaggcggaggttgcagtgagccaagattgtgccactgcactctagcctgggctacagggcaagactccattaaaaaaaaaaaaaaaaaaaccagcaaaaaccaaacaaaacataatgcatgttctctcttataaatgggagctaaacatggggactcattgacttaaagatggcaacaactgggaactgctggatggggagggaggggaggggtgaaaggccaactgttggggagtatgctcatatccacgtgacaaacctgcacatgtgcccgctgaatctaaaataaaagttgaaagtagatttaaaaaaccccaagagggctgggtttggcttgtgtgtccatagcttgttaacctccgctttagatattaactaatagaaacatagtgcttatcttcccaggccacctattttgttcctctccaaggtgatggatagatgaaggcctaatccagccgcctggaagtttgctgacgcttgtcctgtcacggattaatgaagcattgttttctgatgaaggtttcatgccgctgtgctgatgtgtcttctcttctctctaggcaggaaactgcatatcttctggtttacatgaagatggagtgctaatggaaatgcccaaaaccttcagagattgacacgctgtcattttccatttccgttcctggatctacggagtcttctaagagattttgcaatgaggagaagcattgttttcaaactatataactgagccttatttataattagggatattatcaaaatatgtaaccatgaggcccctcaggtcctgatcagtcagaatggatgctttcaccagcagacccggccatgtggctgctcggtcctgggtgctcgctgctgtgcaagacattagccctttagttatgagcctgtgggaacttcaggggttcccagtggggagagcagtggcagtgggaggcatctgggggccaaaggtcagtggcagggggtatttcagtattatacaactgctgtgaccagacttgtatactggctgaatatcagtgctgtttgtaatttttcactttgagaaccaacattaattccatatgaatcaagtgttttgtaactgctattcatttattcagcaaatatttattgatcatctcttctccataagatagtgtgataaacacagtcatgaataaagttattttccacaa

SEQ ID NO: 301 - DNA, 25488 bp, Homo sapiens
  source 1..25488: mol_type = other DNA
tgcctggcctcctgccagcaacaagcaggagctgaaaaccagaagttgaggcgtgagtttggccactccgtagtgtgcacttggtgagggcagcagctcgccacagctgccagccatctgtccattcacccatctgtccatctggcagcccgctgttcagacctgtctgtctgtccgcccatctgtaagcccatctctgtcccattgtctatctgaccatctttctcttactgtcctctttgtctagctatctggcctatctgtcgatccatcttcgtgtctgtcttcagcccccacctgtttgtccatctgtccaattacctgtgactctgtgcatcttcttgtccattcatctgcccacccatccgtccctccgtctgcccaccagccgcccctctcctcctgggctgcagagccatggcccggggctacggggccacggtcagcctagtcctgctgggtctggggctggcgctggctgtcattgtgctggctgtggtcctctctcgacaccaggccccatgtggcccccaggcctttgcccacgctgctgttgccgccgactccaaggtctgctcggatattggacggtgagtgagacgtgggaggaagctgggtggcccttggcagccagcccctcctggagaaggcgtgtgtgtgtgtgtgtgtgtgagtgaatgtatgtgtgggtgtgtgtgtgagtgtctgggtatgtgtgattgcatgcatgtgtgggtgtgtgtgagtgtatgtgagtgtgagtgtggggagtgtgggtgtgtgtgaatgtgtgtgattgtgtgtgggtatgtgtatgtgtgggtgggtgtgtgtgtgtgtgtgtgtgcacgtgcactggcccaggaagcaggagccgtgtgtgtgtgggcttcagcacctgcaggtcttgggcgcaaggaggcagcctcagggcccttgcacagaacaggtggcagggtgtgctcgtggggcagatggggacttggggacaatggtggtgtgtgagtccacgcctggctccaggattcaggaggcccatttgcatatcccaggtgggaacctgtctggccccgcctgaccctgctggccggtgcaggccccttcagtgaggccaattctccaaggctgcggtcttctcccagggtcatgggtgaaggggtttggaggctccctgcgtgggtactggcctgctggggtacacacaatgctgccatagccagtctgccccaacacccagcctggggccacatctcgggtctctcagtcctgaggagcccggtgccccacccctcacatcctctctccctgagtcagggcctgggtctcgtgagctgagtgactgatacttggtgtcctggatgagggcgtggtggagaggggccacagcgggtgtttcctgaccctcttccaggaagcccagcccaagggaggcctccgctgctgctgctgcagaggacacatacaggatgccccttcctgctccctgcctcccactgggcccacaaaagccagggcaagcctcccctccctgccagccacctggtctgcttcccagaagttctgtcttgcaggctgttgggaggatcccagtgctttgtaaattaaagcaagggaggagtggctgctctctctctctgttcattcattcaccttttcattcattccttcttccctccattcccccatctgtccatccttccctgccctgatttctcatgccaccccccgcccctcctgacctggtcctttggtttctcttcaggtctttctgtctcctcccacagggctgagaatggcagctcagggacaagtcggggctggggactgcttagtctccccagtggctctcaggggatttgagggattgacgccagccgccaccccaggctgtgcccctcctctgctcaggaggacattcaggatgcgacacccacttaaactcgaagttgcaaagatgcaaatgagactggagtctcaggcaccagagaccacccgtgggcatgtggcctttgggagtggggacctgctgccacaaatttctaggtggagtctggacctgctgggtctccctgagtgactgtctgggggtctccatagcgtgccctgctgtgtgcgtgacggtcactggttgggtaggggtctctactctaaagctccctctgctggcatcccctcaaactgtcccttgaagagagaggatgtggtttgccccagtgttttgtcaaacaactctctccacttcctgtcttaagaagctgggagtggaagagagcctggggctggccccagctgctgctgcggaacaggggtcattggacactgggaccctggccggactggctggggggcctcaggaagaggcctgctgcagcgtcatcctggccaagatccctccttgcagaggcccctggccacactgccacagggtctgctggggccaccagaagcccatgctcctgactccatcatctctcccctctgtgctcacctctcaccaggaggccctcccagagtccagtctcctgctcttttttctgttttgtttttgagatgctgtttcgctctgtcaccaggctggagtgcagtggcatgatctcggctcgctgcaacctctgcctccttggttcaaatgattctcctgcctcagcctcctgagtagctgggactacaggtgctagccaccacgcccagctaatttttgtatttttagtagagatggggtttcaccatgttagccaggatggtctccaactctagacctcgtgctttgcccacctccgcctcccaaagtgctgggattacaggagtgagtcacggcacccagccccatctcctactctttcagcactaggttttattcttgggattctgctacagccggagcccctgggtgcaagctcctaagctttctgtgagtgtggacccagcaccgtgcctagtagacatacaaaaggagcatggtgacagtgaggtctgttatctccagcataatgactgttttgatccttgtaaaaaaggtgatttttggctgggtgtggtggctcacacctgtgatcccagcactttgggaggctgaggcgggtggatcatttaaggtcaggagttggagaccagcctgggcaacatggtgaaaccacgtctctactaaaaatacaaaaattagctgggcatggtagcgggtgcctgtaatcccagctacttgggaggctgagacaggagaatcacttgaacccaggaggcaaaggttgcagtaagccaagattgcaccactgcactccagcctgggtgacagagcaagacttggtctcaggaaaaaaaaaaaaagaaagaaagaaaagtttatatttttgttctaatggttatcttaatatcttcattctataattatatgttttatataattataatagctatataagatataatacccctagtatgttgttttttggatattctactcgttcctgatggttaatttatgtgtcaacttggctaagctctggtgccccgttgtttggtcaaatacttgtcaatatcttgctgggaggttatttcatagatgtgattaacactgacagtcagttgactttaggtaaaacagattacccaccataatatgggtgggccacctccaatcagttgaaggccgtaagaacaaaaactgaggtttcccagagaagcaggaattctgcttcaacactataacacacaaaccctgcctgagtttctggcctgctgactgctctacagatgttaggttccagacttcgagatcaactcttacctgaatttatagcctgctggcttgccctacagattttaaacttgccagtccccaaaatcatgtgagccaattcctaaataaatctctatgtataacctattggtttagtttctctaaaaaaacttctatatccagtttcctggatgttaagtaatactgaaactagctagtaacctcgtgtttttttttttttttttttttgagatggagttttgttcttgttgcacaggctggagtacaatagcacgatcttggctcaccgcaacctccacctcctgggttcaagcgattctcctgcctcagcctcctgagtagctgggattacaggcatgcgccaccacacctggctaattttgtatttttggtagagacagggtttctccatgtgggtcaggctggtctcaaactcccgacctcaggtgatctgcccgctttggcctcccaaagtgctgggattacaggcatgaactactgcacccgtctcctagtaatttcttcttttccatgatgtgtctcttatctctaataatacttttcttcttaaagtctacttcattaaaaatagttatgctgggcatggtggctcatgcctgtaattggcactttgggaggtcaaggtgagtgggtcgctgaagcccaggagttcaagaccagcctgggcaacatggtgagacaaaaagtacaaaaattagctgggtgtggctaatataattctaagttggcacacttgtagtcccagctacttgggaggctgagcggggagaatcgcatgatgctagaagggagagattgctgtgagccaagatcacgtcgctgcactccggcctgggagacagagtgaggctctatctcaaaaaaaaaaaaaaagttatacagctttcttggttagtgcatgcatgatatatttttcattattttccacctttctgtatccttacataaaaggcattgggttttactttatttccaattactttaatttttattgattgtccttttaaaagtaggtgatgatttatttgggttgaaacccaccaccaacttgttttccatgcctattctgtttcttcttatctcctttcacatcttgttttgcatttattatttttattattcaatttcctttttctctattagtttcctaactgtgcagtcttggggttattttaaaagatgacagtagattattttagagcttacaacatgcatccttcacttatcaaagtctaacatgagctagtacttttttttgtttatttgttttttcttgagatagagggagtcttgctctgctgcccaggctggagtgcagtggagcaatcttggttcactgcaacctccacctcttgggttcaagcaattctcctgtctcagtctcctgagtagctgggaccactggtgtgcaccactatgcccggctaatttttgtattcttttttagtagagacagggtttcaccatgttggccaggctggtcttgaactcctcaccttaagagatctgcttacctcggcgtcctaaagtgttgggattacaggcgtgagccaccacgcccagcctatgagttagtacttctatcctcttcctagtcagtagaagaaccttggaacaggaactaaatttacccccagtgacttatatgctaatatttttgtgtattttaaatatatgtgtgtgcatagatgtatctgtgtgttttttgtgtttttattcttatttatgttgagagtgtagagctatgtaagagtaaagagaattgtgtaatgaagccccgagtatccattcaatttcaacaacaatcttatggccaagctcatttcatgtatactctttcctgcttccctctaccctacattatttcagtgcaaatcccagatatataactttacccatacatatttcagtatgttttattttaagccccacaagatatcattttctatactactataattttataccaataacgttcatttagatttacccacacgtttacctcttctgttacccttttttttttgagacagagtctcgctctgtcgcccaggctggagtgcagtggcacaatctcggctcactgcaagctctgcctcctgggttcacgccattctcctgcttcagcctcccgagtagctgggactacagtcacccgccaccacgcctggctaattttttgtattttttagtagagacgggtttcactgtgttagccaggatggtctcgatctcctaacctcatgatacacccgcctcggcctcccaaagtgctgggattacaggcgtgagccaccacgcctggccaccctttatttttatttataaaaatatctttgggaaaaaatatctttgggcacatggtcaaggatctcctgaggactgtgtcatgggctatatatatattatatatatatatatatattatataatatatattatatatataatatatataatatatatatatataaaatatataatatatattatatatattatatatataatatatataatatatatatataaatatatatatatatatataatatattatatatatataaatatataatatatattatatatatatatatatattccatatatatacacacacatatatatatattccactttcactttttttttttttttgagacggtgtcttgctctgtcgcccaggctggagtatagtggcgtgatctcagctcactgcaacttctgcctcccgggttcaagtgattctcctgtctcagccacctgagtagctgggattccaggcatgagccaccacgcctggctaatttttgtattttttttttttgagatggggtctcactgtgtcgcccaggctgaagtgcaatggcacgatatctgctcactgcaacctccacctccctggttcaagcagttcccctgcctcagtctcccaagtagctgggattacaacaggcgcatgacaccatgccctgctaatttttttgtatttgtagtagagacagagtttcaccatattcgccagactggtctcaaactcctgacctcaagcaatttgcctgccttggcctcccaaagtgctgagattacaggcgtgagtcaccgcgcctggcctttttttttttttttttttgagacggagcctcactctgtcccccaggctggggtgtggtgggaagatctcggcttcctgcaacctccacctgctgggttcaaatgtttcttgtgcctcagcctcccaagtagatgggattacaggtgcccacaaccacacctggctaatttttgtatttttggtagagatggggttttaaccacgttggccaggctggtctcgaactcctgacctcaggtgacctacccaccttggccttccaaagtgatgggattacaggcgtgagccaccactcccagcctccatttttaatagatgacagttctttgataaaattcttatttctttatatccttgaatatagatacaaagtacttattttaaagtacatggtctgccaatttcataatctggagatcctatggacctttttaaaagttgtctgtgctttctcatgagctttgttcctgctgtcttatttccttgtttgcttggttgtttttaatttggcactggagagtatgtataaaaattgttagaggccgggtgcggtggctcacgcttgtaatcccagcactttgggaggccaaggcaggcagatcacgaggtcaggagtacaagaccagcctggccaacacagtgaaaccctgtctctactgaaaatacaaaaattagctctgcgtgatggctggtggctgtaatcccagctacttgggaggctgagacaggagaattgcttgaacccaggaggtgaaggttgcagtgagccgagatcgaggcactgcactccagcctggacaacagagtgagatgctgtctcaaataaataaataaataaatataaaataatttgaggcctagggatctgaaattctgggatctcctttatgcatttgagtgactgagatgatttgaagctggatccagtgctcctgagggctgctctatttctagttgactcctagagtaagaaacctgcaccccacgtgtggggcattatggcatcccctccctcagcacatgagtaggtcaacagcactgctctagaccaggtgtggtggctcacgcctatagtcccagctactcaggagactgaggcaggaggattgcttcaggccaagaatttgagaccagccagagcaatatattaggttggtacaaaagtaattgcggtttttgccattaaaagtaatggtgaccctgtctcagaaaaataaaaagcaaaaaaaaaaaaaaaaagagagaaaagaaaaaaagaatccctgatctatttctcagcctcctcttcaggattggccgtcaccttgaggggaatgctggccttgcctgtctccagccctgtacttctctgcctcctatgcctttaagcacatgttttctatttgctgggcttttctagttctctgagggaagtgtggtctgaattacagtctcccattaccaggaagtctgatttacgtttaacagattttttttttttttttgagatggagtctctctccgttgcccaggctggagtgcagtggtacaaccttggctcactgcaagctccgacttccaggttcacaccattctcctgcctcagcctcctgagtagctgggactacaggcacccgccaccatgcccagctaattttttgtatttttaatagagatggggtttcaccgtgttagccaggatggtctcaatctcctgacctcatgatctgcctgcctgggcctcccaaagtgctgggattacaggcatgagccaccgcgcccggccttaacagattatttttttaaaatgtaagggagcaaggccaacgctggggcctgggtaggaggccattgcaataacccagctgagagaggttggtggcttggaccagtgtggtggagatggaggtagaacctgcatccagagtcactggtgggttggatgtggggaaggaagaaagtgaccaatccaggatggctccagggtgtaggcgctgagcaaaagggggagtggttgtgtcaatttctaagacaacgaggactaggagaggagccatttcgcagggacggttggaaggaaaatcaaaagtacagtttaggtcatggtatgtttgaaatgtttcttagacacccagagtgggtaccttgtgcatagctgggtataagtgtctcgagtgtagggagaggactggcggagttaaagtcggggagttaccatcacacaggttgcatctcatgccatgagcctggatggactcacccagggagaagatatagatgcacaaggaccatggaccaagcctggggcccccaacatcaggagaccagggaggtgggacgaaaaccaaagcctggcagggtgggcgaggtgggtgcagggacctggcccattccctcttggggctttggtttccccatctgtaaccatttaccccattttgccctggaagccaagacaactgactaggctggaagcagacaggttggggaagcaagggtgcactccatttagttaggaagtgaggcctttgtctgggatgggagtttaaagtgttttttcccccagtttgtcatttggctttgtttatggtgttttattcttataaaaattagtgtttatgcctgacttgtttatttcattttctggctttgtgctctctttcctgttccaagattacatgtgtccctgtggtgcccatgtgtgccacgtgtgggcccagagagggacatgtggctcaggagctggggtgggtttgtgtccagatggacatgctaggtcaggacagacacctgagccaaaggagggtgctagggccagaggtcccacggggtgggtgcagggacccaggtccattccctctttgggccttggtttccccatctgcaactggggcttaaatgctggcttctggccgggcacagtggctcacgcctgtaatcccagcactttgggaggccgaggtgagcagatcatctgatgtcgggagtttgagaccagcctgaccaacatggagaaacctcgtctctactaaaaatacaaaattagtcaggcgtggtggtgcatgcctgtaatcccagctactcggcaggctgaagcaggagaatcgcttgaatccgggaggcgaggttgcaatgagccaagatagtgtcattgcactccagcctgggcaagaagattgaaactctgtctcaaaaaaaaaaaaaaaaaaaaaaaaaagctggcttcttgaggtgctggggaggaaggattcctgggtgttagggaagaggttgacctcagtgagctgtgcaggcctgtgccccagggacagggatcatcataatgtaggccaggctgaccagccctcagtgctaaagggcccacctcttgctgcccatggacagatggggaggggtaggccagagcatttattttctttctttcttttcttttctttttttttcttttttgaggcagtcttgctttgttgcccaggctggagtgcagtggcatgatttcagctcactgcaacctctgcctgctgggttcaagcaattctcctgcctcagcctcctgcgtagctgggattacaggtgcccgccatcacattcagctaatttttgtatttttagtagagacggggtttcaccatgttggccaagctggtcttgaactcctgacctcaagtgatctatccgcctcggcctcccaaagtgcagggattataggcatgagccaccacacccagcctaggccagagaatttccataggctcagagtcccaagagaagttttggggtccatcagctcaagccctatgccctgctggcagggaaggatcctgggatcacctgccaaaggccagccttgaagtagttgtggccagagtgtccccagtgagatggggagtggagtcccagggtgggctcctgaggccactgtgagggactgagaggtggccgaggcctcgttctgcctgtagcatatgagctggtgctgctgggaacaatggcaacagaagtactttgcaaactgagaagcaccttgtatatggcaaaggtcagtgtaaatggcatcacactttgcaaccgtagtgtgttgtggacctgtgagcagctggatttgatggggaagcctggttgtgttctgcaacctaatctgcggtttggtggcagccgacgtgccgcctccgtcaccattctccaatgagtgccagctgagcaagcctggtggggaggcagggggaggggagccccacagcgactctgtgccatgtcccctagagccatcctccagcagcagggctcacccgtggatgccaccatcgcggctctggtctgcaccagcgtcgtcaaccctcagagcatgggcctgggcggaggggtcatcttcaccatctacaatgtgacaacaggtgggcccacatgtgaactgccatggggaagatgggcttgtccacaccactgcgtaaccccttctccagccagtcccatcaactcaagcccgtttctgggtgttcttgggccccctgccctgccccatttgcctcagctgtgcaaagcccttgtgtcaactcctgtccctgtgttagcccagagtccatctcataatgcagagatggaaactgaggcctagagcaggccaggggctgtctgcagggtccatgaccactcacctgccctgccctactccagggaaggtggaggtcatcaatgcccgggagacggtgccggccagccacgccccgagcctgctggaccagtgtgcacaggctctgccactgggcacaggtgacgccccatggaggtcccccactcccaccccccaggccactaggactaatcagaacacccccgcaaaggagcagcgcctcacggacaggctgtgactccctggcacggggggacacggagcctgtggggaacccccagccccaacctgcagggattgagaaggtcccccttgggaacgggctctctgaggtgatccagggagagggaccaggctggacaaaggcctggagggttcagtggagatgggttggcggggcagggtggggctcctggggccagtttgtgtagggccccttgggcttggccatggactttgtggggagccacaggtgatttgagcagggagggacgtggtcgggtgtgggctccagaaagctcactctggctgctgtaactggggggccacatgtaggggtgatggcaaacctgggaaggcctggaagccacagggttgagagctgggatgtgccatgcaggggcccagtggatcggggtgcccggggagctccgtggctatgccgaggcccaccgccgccatggccgcctgccctgggcgcagctgttccagcccaccatcgcgctgctccgaggggggcatgtggtggcccctgtcctcagccgtttcctgcacaacagcatcctgcggccttccttgcaggcgtcaaccctgcggtgagccccacatggtggccctgggttcctgggttcaaggccatatcctgtctgggcccagtccacaccccagctctgcctcagtccctcttacactggaggattgaccctcggggtgctggccaggacaaagagtacttttcatggcccttccagctccccgtggcagagcctaacttggggttaggctgcggggagtttattgcccaagtgataggactccaaggtgtggatttgggctctgccacccgccctggggccccggcctccttcttcctctctctggcatggcaggagggcttcaactgccactctcacctgccccacccagcccactgacaggccctcccaggagtgagatgacaggccctaggtggacccaggccccactgggaaatttgccttccctggaccagggccatgagctgggtgagtggtgtcagtcccaccacctcctagagaatcagttccccggtgtccaccccagtgcctcgggaccctgggccagggcgccccccactgtagggtcctgaggactccacccatgagagccccggaagagtgtggctgcctctgggacctggccccaccctgaggctccccccaccccccagccagctcttcttcaacgggacagaacccctgaggcctcaggacccactcccatggcctgcactggccaccaccctggagaccgtggccacagagggcgtggaggtcttctacacggggaggctgggccagatgctggtggaggacattgccaaggaaggtcagcctccctgaggttccataccccatccctgctggaggaagagccaagttctgggcactgggggttgagggcaggctccttcccaggccctgagggagtgcaggcagtgcccgggaccccgagaggccatgcacctagctctgccggcccaaggacccctgtggtccaggacctcagagagcagagcctgcgggttagggccagcagaggggcgttaccgatggtcacggcaggtctgggtagccgagctgaccattctcacaggctctcataagccagctccctctcccatcttccctttcttttccccagcctccctgcctctggtctctgtccacccctccacgcctggccccaaggggccagtcctgaggccactgcctacagacctaccatcatcctgtgtccacaaggcaaaagcatgagtggaatcccattgtgtgacctgacagcagtggctattcctccccgcctcagtttcccatctgttcatggagccctctccttctcatcccagggagccagctgacgctgcaggacctggccaagttccagcccgaggtggtggatgccctggaggtgcccctgggggactataccctgtactcaccaccgccgcctgcagggggtgccattctcagctttatcctcaacgtgctaagaggtaaagcccctgcccagagccctggcgcccaccccctcccccgcacccccggcccccgggaactcagactccaagcccaagcccagccaaggcccagctcagcctcctcctccataaaccgggttcacagatgcacaatatgaagacagagctgtggaaaccaatcaggatggtgggttttagagctggcctccagctcgacccatacgtgaggctttgctgaagggcgtgatatcattcgtccagagtcctcctcccactgggtgaccagtcccagacacagaagcaggtgggctgtgtgggtggtgagctgcctgtcaggggcgtgcacctgggggagcgaagccagcctagcccaaggcagcctgcaggggggttctggcagtgctgaggcctggggctgcctgcgctggcttaatattagtgtcctgtgtctgccattacaaatcaccacaagcttggtggcttaaaataacagaaatgtgtcctctcacagttctggaagccagaagcccgatatctaggtgtccacagggctgcattccattgggggctccaggggagaatctgttctttgccttgttgacctaaataaaaaacagaacaaggctctcaaagaaaatgatgtttgttccagagtaggcatcgcggtaggaatacccatgctagggtaaactatgtgtgtattcagggaggtgaaggaagacaaaagttttcaaagagaaaatgaggaagattatataacttttttgtttacaatcaatgataatttattgtacattttatttttttcattgcattattattattattattattaattattgagacggtgtcttgctctgtcgcctagggtagagcacagtggcacaatctcggttcattgcaaactctgcttcctgggttcaagtgattctcctgactcagcctcccaagtagctgggattacaggcatgggccaccacacgccgctgatttttatcttttctttttttccttttttttttttttctttttagacagagtctcaatctgtcacccaggctagagtgcaatggcacgatctcagctcactgcaacctctgcctcccaggtacaagcaattctcctgcctcagtctcccaagtagctgggattacaggcgcttgccacgacaccgagttaatttttgtatttttggtagagatggggttttgccacgttggtcaggctggtcttgaacttctgatgtcaggtgatccgcccacctcggcatcccaaagtgctgggattacaggcatgagccaccgcgcccagatgatttttatctttttagtagagacggggttttaccatgttggccgggctggtcttgaactcttgaccttaactgacccacttgcctcagcctcccaaagtgctgggattccaggcgtgagccacctctgcctggctattttatttttatttcattagtttttggggaacaagtggtgttcggttgcatggaaaagttatttagtggtgatttcttttttttttctttttttttttgagatggaatctcactctgtggcccaggctggagagcagtggcatgatcttagctcactgcaacctctgcctctgaggttcaagcaattctccagtctcagcctcctgagtagctgggattacaggtgcacgctaccaagcctggttaattaattaatttatttatttattttatttttttagtagagatggggtttcaccatgttggccaggctggtcttaaactcctgacttcaagtgatctgcctgcctcagcctcccaaagtgctggaattacaggcatgagccaccgcatctggtctttagtggtgatttctgagatcttgatgcacccatcacacaagcagtgtacactgttcctagtgtgtagtcttttatccctcattcccctcccacccttccccttgagttcccagagtccattagagcatttttcttttcctctgagacagagtctcgctctgtcgccaaggctggagtgcaatggtgcgtctcggttcactacaaactctgcctcctgggttcaagcgattttcctgcctcagcctcccacgtagctgggattacaggcgcctgccaccacaactaattttttttttttgtattattagtaaagatggggtttcaccgtgttgaccaggctgctcttgaactcctgacctcaggtgatctgcctgccttggcctcccaaattgctgggattacaggtgtgagccaccatgctgggccccattatatcattccttcttttttctggagatggagttttgctcttgtcacccaggctggagtggagtgcaattgcgcgatctcagctcactgcaacctctgcctcccggttcaagcgattctcctgcctcagcctcccgagtagctaggactacccatgtgtgctaccatgcccggctaatttttgtattattagagacagggtttcatcatgttggccagactgctcttgaactcctgacctcaggtgatccacctgcctcggcctcccaaagtgttgggattataggcataagccaccatgcctggcccattatatcatttttattcctttgcgtcctcatagcttagctttggtatataactgtttcgggcctggcatggtggctcacgcctgtaatcccagcactttgggaggccaaggcaggcggatcatgagttcaggagatcgagaccatcctgcctaacacagtgaaaccctgtctctactaaaaatacaaaaaattagccaggcgtggtggcgggcacctgtagtcccagttgcttgggaggctgaggcaggagaatggtgtgaacccaggagacagagcttgcagtgagctgagatcacaccactgcactccagcctgggcaacagagtgagactctgtctcaaaaaaaaaaaaaaactgttttgaaatgatcatccttggctagtaggatgcatggaaaagtgataagggtggcactggacaggccactcatgggcagatgtctttgcagaagtattttttgtgtaagattgtgatggccttcttgtaaggttgtgagctgttgtgtttttgaggcagggtcttgctctgtcacctgggctggagtgcagtggcactgtcaaggctcactgcagcctcaacctcctggactcaagcaatcctctcacctcagcctcccaaagttttgggattacaggcatgagccactgcacccagccgagaacggggcacttgtgcacgagagtcctgtcttcatggcctttccctggctctatttttcagagtttttttttttttgttttgttttttttttttttttttgagacagagtcttgctctgtttactaggctggagtgcagtggtgcaatcctgcctcactgcaacctcctcctcccgggttcaagcaattctccctcctcagcctccctagtagctggggttacaggcacccaccatcatgcctggataatttttgtatttttgtagagatggggtttcaccatgttagtcaggctggtcttgaactcctgacctcagcctcggcctcccaaagtgctgggactacaggtgtgagccactgtggctggctgccgctctattttgaaaattttcacagcctcttcccacttccggtggctgccagcattccttggcttgtggctgcctcactccagtctctgtctccatgatcatactggtttctcctctgctgtgtgtcctctcctctatgtgtctgtcttacaaggacactgtggtcacattcagggcacatctagataatccaggatcatctcctcctctcaaaatctttaacgtactttaggccgggtgtggtggctcatgcctgtaatcccagcactttgggaggctaaggagggtggatcacttgaggtcaggagttggagaccagcctggccaacacagtaaaacaccatctctactaaaaatacaaaaattagccgggcatgatggcctgtgcctgaagtcctagctacttgggaggctgaggcgggagaatcacttcaacccaggaggtggagattgcagtaagctgagatcgtgccacacactccagcctgggtgacagaacaagacttcctctccaaaaaacacaaaaaaggcggggcatgatggcttacgcctgtaatcctagcactttgggaggccaaggcaggcagatcacttgaggccaggagttcaataccagcctgaacaacatggcgaaatcctgtctactaaaaatacaaaaataattagctgtacgtggtggcgaacacatgtagtctcagctactcaggagactaaggaccaagaatcacttgaacccaggaggcagagattgcagtgagctgagactgcgccattgcactccagcctgggcaatagagtgagactctgtctaaaaaaaaaaaaaaaaaaaaaaaaatccttaacttacttttccacttaaggtattagtcactcttgtgctgtataaggtaatatccacaggttttgggaattaggatgtgggtggatctttctgtggtggggggtgggggcaacattcaacccattacatagggtgaccccaaccaacctgtgccccaacctctctccagggttcaacttctcaacagagtctatggccaggcctgaagggagggtgaacgtgtaccaccaccttgtagagacgctcaagtttgccaaggggcagaggtggaggctgggggaccctcgaagccacccgaagctccaggtgaggttgctgaggttgctgggctggtgggccgtcctcctccctggctcaggacttggcatgaaatgagggtcaggcctggtagggggaagttggagggatatgtatgtggttctaggccagggcaggactgaaagggatcccggggtggcaggtacaggggtcaggtgcaggagtggcaccatatctcaaaggacctggagggtgagcagagtctagacctagctgggcttgagggagacctggccacaaggtagaggacagactggaggtggcccccatgggggctgatctcatcctgcccttggttctgcggattctgcctggcccctcactgaccctgccacctgcccacccaccccagaatgcctcccgggacctgctgggggagaccctggcccagctcatccgccaacagatcgatggccggggggaccaccagctcagccactacagcttggccgaggcctggggccacgggacaggcacgtcccatgtgtctgtgctgggggaggatggcagcgccgtggctgccaccagcaccatcaacacaccgtgcgtagggcctgggggaaggcggatggcttcactcctcctctcctagacctgcacacccccagccccatgtcccctcacttgtccccacggggcagcaccttgcttttgccctttttctcctcctctatttcaaaagaggcccccacccctgacatctctggctggaaaggctgctgctggggtggccccgacccaagatttacctgggaatgggtagcctcactcagaagggtgccctgatgtgggggcacaggtgggtctttggggacccctcctgggtggtgccagggagagaatagcggcttcagcatgcttcggggcagctgtaaaacgagggggtcctgcaaagcgtgcagggtaagtggtgtctggtgggagccccgggtcctagcccaggctcttctgcctccacggctgcagctttggagcgatggtgtattcaccacggacaggcatcatcctcaacaacgagctcctggacttatgcgagcgatgcccccggggttccggcaccaccccctcacctggtgagaacaaagcttcccacccggggtccacaagggccccccaccaggggagaggagggagggggctgggctggggttgcatgctaacccctggatgggtcactgcacttgccaagacgctgtttgctcagcagtgagtggagacagggtgggtggagctcccggaaggtgctggcccccagttccaggcgagcgttccccatcctccatggtgccctccatcttgatcaacaaagcccaggggtcgaagctagtgattggcggggctggcggggagctcatcatctctgctgtggcccaggtgagtctggggctcctggctcgagtgtctcctctctgggcagcatactgtctgactgtctctggagtggggatgtgagggctgatgtagggtagcagggtgccccctttctccctgaaaccctcatctctcccccaggccatcatgagcaagctgtggcttggctttgacctgagagcggccattgcagcccccatcctgcatgtcaacagcaagggctgtgtggagtacgagcccaacttcagccaggtgaggctgaggtccgagctggatgcctagggcagagcccactccccaaatccgtgctgctcaaagccacctgggaggaactcagtcactgagattcttaggccaggtacacttcaactttgggggccataggagttggggaccttgatgggtgaggctgtcagtggcctccaggccagttctgtggcctccaagacagagagcagggtattgtctatgctgctcccaggctgaggatctcagcaccttggtctctggtctgtggttgatgccatttttcagaagtgagttttcctggctggggcctctcagactctccctcatggtgactttttccttgtgtgatttgtaactaatatttgcaactttatttgtgaaagaggttgtttttcctgtgacagtctgtaaagtgattttcttctggggcactagggcattggtggtaatttttactatatatataattttttttttttttgagacagcatctcactctgttgcccaggctggagtgcagtgttgcgatcacagctcactacagccttgacatcctgggctcaagtgatccttcctcctcaggctcccaaggaactaggactacaggtgtgtgccaccacacctggatagtttttatttttttgtttttcgtagaaacagggtctctcaccatgttgcctaggctggtcttgaactcctgagctcaagcaatcttcccgccttggcctcccaaaatgctgggattataggcgtgagccaccatgcccagcctacaaacattttttttgattccccacagaagcccatggtgcagctccaggggctgaattcttctggctgactccccctctatccttagacagagactcagcttccttggagcatctttgggttgatggatgccctttgttaggacctatttaaaagattgatagtggccgggcatggtggctcatgcctgtaatcccagcactttgggaggccgaggcgggtggatcacctgaggtcaggacttccaggccagcctggccaacatggtaaaaccctgcctcaactaaaaatacaaaaattagccaggcgtggtggcacacacctgtaatcccagctactcgggaggctgaagcaggagaaacacttgaacccaggaggtagaggttgcagtgagccaagatcgtgacattgcactccagcctgggtgacaagaacaaaactccatctcaaaaaaaaaaaaaaaaaaaaaaaaagattgatagcagctgaggttccagatcgtcaaagctgcctctcctgttatgagacttcttcggtctcaagtccaccttccaaagcccttagaacctgagaaccatggccttagtccaggaacagagtgtagtcccaagagccttagttttcagaccttgagactaaggacctcagcctgttaggctcaaactcttggagtttgcaggcctccctccgcatgtagggtccttcgcatgacaggaagaccctctcagggctctcgggttccagggatcttagatatggaggatttcaagatccagggcacatcctttggagccctcctcccttgactctttttttatttttatttttttagacagtctcactctgtcactcaggctggagtgcagtggcatgatcttgcctcaccacaacctccgcttcccaggttcaagcaattctcctgcctcagcctctgagtagctgggactacacatgtgcgccaccacacctggctaatttttgtatttttagtaaagatggggtttccccatgttggccaggctggtcttgagctcccaatctcaagtgatctgtccaccttggcctcccaaagtgctgggcttataggcatgagccactgtgcctggccctcccttgactctttttttttcttttttttgagacggagtctcgctctgttgcccaggctggcgtgcagtggcacgatcttggctcactgcaagctctgcctcccgagttcacgccattcccctgcctcatcctcccgcctcatcctcccaagtagctgggactacaggcacccaccaccacgctcggctaattttttgtatttttagtagagacagggtttcaccgtgttagccaggatggtctcgatctcctgaccttgtgatccgcccgccttggcctcccaaagtgctgggattataggcgtgagccaccgcgcccggcccctcccttgactcttgactgaaggacctttgtctttgtgaacatcaattctcaggacctttcaccctggggacgtgaaatgctgagaatttgggagatgacagtctggggactgggattaatggaatccagtgacccacaaacctaaggttctcagctcccttggggagttggaatgtcagctattcaggtctagggctttccatggagtaaatcctaaactctgggttggagactttaagcctccaaggaccttcacagctaaggcccagggactagggcgaggagagtctttgatcctcagagtcttggagtttggccagtggactctgaggaatggagtctctgagcactgaaggtccaactttggcttcagcagtaaaggatcttggccttcaagtctaaggacagtgggcaattagtaggtcaggcatggggaactcatagccaaacgtgcagggctccaaagacctcatttgccctgtcagcagctcaggccatgtggcatcacccgatgcatctagatgtctccggaatctcaggccctgcagggtgaggttctcgggccattagttttttttgttttgttttgttttgtttttttggcttgttgttgttgagacaaagtttcactctgtcacccaggctggagtgcagtggcgcgatctcagcttattgcaacctccacctcctgggttcaagcaattctcatgtctcagcctcccaagtagctgggattacaagtgtgtgccaccaagcctggctaatttttgtatttttagcagaaacagcgtttctccatgttggccaggctggtctcaaactcctgacctcaggtgatctgcccaccttggcctcccaaagtgctgggattacaggcatgaccaccgcgcctggctagggagcagtgtttttaaggacaacttggcgggttgggggaagccaatgagccaggagtgctgataggtcagggatgaaatcatagggagttggctgcgcgcggtggctcccgcctacaatcccagcactttgggaggctgaggtgggtggttcacctgaggtcaggagaccagcctggccaacatggcgaaaacctgtctctactaaaattacaaaaattagctgggcaaagtggcaggcatctgtaatcccagctactggggaggctgaggcaagagaatcacttgaacctgggaggggaagttgcagtgagccaaggtcgtgccattgcacgccagcatgggtgacagagcgggactccatctcagaaacagacacacacaaaaaacccctggaaatcatagaatcatagggagttgaagctttcttcttgagctgagtccgttcctgggtgggggccacaaggtcagatgagccagttaatcgatctggatggtgccagctgatccatcaagtgcagggtctgcaaaatttctcaagcactgatcttaagagcagtttagggagggtcagaatctttagccttcagctgcgtgactcctaaaccataatttctaatcttgtggctaatgtgagtcctacgaaggcagtctggtgcccaggcaagaaggaagtctgctttgggaaagggctgttaccgtctttgttttaaactataaactaagtttctctcaaagttagttcagcctacacccaggaatgagcaaggacaactgggaggttagaagcaagatggagtcgattaagttagatctctttccctgtctcagtcataattttgcaaaggcggtttcagtcttgctgttttgcccaggctggagtgcagtgtcatgatcaaagctcactgcagcctcaaactcctagcctcaagggatcctcctgcttcagcctcctgagtagctgggactataagcacagggccaccacatccgactaattttttcttttttcttttcttttattttttaataaagacgtgatcttgctacattgcccaggctggtcttgaactcctgagctcaaaagatcctcctgcgccggcctcccaaagtgctgggattacaggtgtgagccaccacgcccagcccaatttttgattttcttttagagacggtgtcttgctttgttgccctggctgttctcaaactcctggcctcaagtgatcctgccaccttggctcccaagtggctaagactgtaggtatgtgccaccacgcctggcttttttttatttcttattttttattttttagaaacaggatcttgctgcattgcccaggctggtctcaaactcctggcctcaagtgatcctccttcctcagcctcccaaattgctggcattacaggtgtgaaccactgtgtctggcctcagtgtctaaatcttgagaagccacatcctccatcgaaggccccctgaactcagatttgcacctcaaggccctggtgtccttggatccagaacagacatgaacttgcatttggaggtcttcgggcctgggtggtgtccttcgtacatagtccctggaggctgagcttgtcctctatgggcctttggatctcttccatgctcccatctggtcctcccctcttcctgtgtcttcaggccctcttcctctccgtcttgccttttgatcatttttctcatttcttgcagaggcctctccctcctggagatgggctgagctgccctcccctgtgaacctgctttctctcctctccaggaggtgcagaggggactccaagaccgtggccagaaccagacccagaggcccttcttcctgaacgtggtccaggctgtgtcccaggagggggcctgtgtgtacgccgtctcggacctgaggaagagtggggaggccgcaggctactaagacactgctctgcccagagctgaagtctggccccaccatgagtcctgtgtccaggccggacatggctgggggaccaactactctggcaggatctggacccctggcaggggagtccagctgagagtggaagaggtggcggggaccagctgggcagatgagaggctgagcctcatccctaaccccctttcccagagcccctggtggtcctgaaccggcccctctatccctccgcaggcctcttgcctggggccactctcccaccctctcgatctgtatatcctccagtccaagattaaagaggcggactgtggcctg

SEQ ID NO: 302 - DNA, 32744 bp, Homo sapiens
  source 1..32744: mol_type = other DNA
gtgatttcctctgggttacggcgcaggcgcaagataagctaggagccgcgcgagtcgtagtgtcgctgtttgcgggtctccgcgcgggaccggggcgcagcggggtcgctgaggcgagggtgtcatgtcagacaacgaggacaagtgagtgcgggagcggagtggcctttgcggcaaccttggaaggggcggatgaggcaaggcttgggtcggctgaggagcctggcgtctaggggcaatgtctgaggggactggggtcctgagggggccggcggagccgaggaagggaagggcgggcgacccaggagcacagccccggctggaggcacaggagggcccaggctcgagggtccagaggggatccgtagaaaaggtgtccttcagcaaatgttccagcgagccgggctctgtatcatgcagtgggaatattgaggtgaatgaacaatcgtccctgcctctccacgtgctcactttctagaaaaggggtcacaggcccataagtaagcaagcaagcaggtaacggtggtcgcgtgagcttccccagttctagacgtatgtagtataggagtactccagaggagggtctggggcagctccaccgggtggcattaaataaaagtctgggacggtcctttgcagtaatttttttttttttttgaaacagagtcttgctctgtcgcccaggctggagtgcagtggcgcgatctcggctcactgcagcctccacctccggggttcaagggattctcctgcctcagcctcccgactagctgggattatgggcgtgcaccaccacgccttgctaattgcttgtagttttagtagagacgggtttcaccatgttggccagactggcctcgaactcctgagcttgtgatccacccgcctcggcctcccaaagtgctgggatcacaggcgtgagccaccgtgcccggcctgcttgtagtaatctagatgagagaagtcagtagcttatagtagggtggtaggagtagaggtggtgagaactggttttgaattctggatatattactattttaaagatagagcccaaaaattacctgtgggatatgtgggtgcaaagagagctagtctgaagataaaaataagaaacgtgtgggattgctaccccattcccagtgagtgtcagtagagaagaggagatgacccgtggctgagcattagggcatttggacattgagtgcttgggggaaaagagaagccggggaggtgggggaacaccaagagggtgaggtgtccttggagtcaagtgaggagagcaagtggcctaatgtgccagctgatagatcaggctaaatgagaaggagagttggccattggatttagcaacgtggagatcattaatgagcttggaaagtggttttgatggagctgttggggtgaaaggctttttggagtgagattatgacaaaatgggaagagaggaagatagtgagggtggacagctctttcacacatttttgcttcaaaggacaccatggaattagggctatagggggagagagaagagaaataagggtttttttttttttttttttagatgaggaaaagcacatgttgaaatgctgatggggccgggtgctgtggcttacacctctaatcccagcactttgggaggccgaggagggtggatcacctgaggccaggagttcgagaccagcctggtcaacatggtgaaaccccatctttactaaaaatacaaaaattagctgggcatggtggcgtgtgcctataatcccagctactcgggaggctgagacaggagaattgcttgaacccaggaggcagaggttgcagtgagccaagatcacgccattgcactccatcctggacaacagagcgagactttgtctcaaaaaaaaaaaaaatgctgatgggaatgatccagtagagagggaaacagtgatgatgaatgagtactagcaatatttgggggcagatggggaaaaattgaaggggtaaaatggaacaaaagtcggatttacttcttcttcttattattattttttattttttgagaaggagtctcgctgtgtcacccaggctggagtgcagtggggtgaccgtggctcagtgcaccctccgcctctcgggttcaagcaattcttgtgcctcagcctcctgagtagctgggattacaggcgcccaccaccacacccggctaatttttttgtatttttagcagagacgagatttctccatgttggccaggctggtcttggactcctgacctcaagtgatgcacccacctcggcctctcaaagtgctgggattacagacgtgagccactgcactcagctgatttacttattaagtaaatatttattgagtgcttcctacatactgggcgagacacagatctctgccctctttgattttttttttgtttgttttttgttttgcggtggcgggggggggttttgagacggagtttcactcttgttgcccaggctggagtgcaatggcgtgatctcagctcaccacaacctccgcctcctgggttcaagtgattctcctgcctcagcctcccaagtagttgggattacaggcatgtgccaccaccactcccggctaattttgtatttttagtagagacggggtttcatcatgttggtcaggctggccttgaactccacccgccttggcctcccaaagtgctgggattacaggcttaatcccagagccacaatacaaagccaccatgcccggcctctgaattttttttttttttaatttttcttatttattttgagacaggttcttgttctgtcacccatgctggagtacagtggtgcaatcttggctcactgcaacctccacctcctgggttcaagcaattcttgtgactcagccccccaagtagctggtattacagacatgtgccaccatgcccggctaatttttgtatttttagtagagatggggttttgccttgttggccaggctggtcttgaattcctggcctcaagtgatccgcccacttcaatctccgaaagtaccaggattacaagtgtgatccaccgtgcctggcccctctttgattcttttaagtgatgctctaagtaactgatctcttcttcctgtacagttttgatggcgacgactttgatgatgtggaggaggatgaagggctagatgacttggagaatgccgaagaggtcagtattcagcctcaggctcccacctctgcagcccaagctgccaaatcgtctgacaggtgatgattagctgaatgtgtctgccttctatttgtggtcaaggcccctgccataagcattcccagttagagtgagctgtgttccagtcttgcatagcagaacagccctgcagggtgggcctgaaagcttttgtccatgtggtccacagcctgtggcttctggggcagttagttcactgacaagttaaacggtgccttccttcatttggcaaacatgtgttgaatgtttattatatgccaggtgctttctgctgggtgggactgcttaaggagcaaagggaagaggtaagcagggctcagatgaggcagtattttgtagcctaaaggcaatgggaagctactgacaaactttgagccagggcacagtccaggttacattttagaaagtacattcctgcctcgagtaaggagtgaactggggaagggcaagagtgaaaggtgagaggcctgtggcttggacataggtgctggtagtgcaggtgatgagaaggcagataaaagagttatttcggtgggttggttatggggctgagaaagtgagtggtgacgaggacgactctcaggtttctggcttgagcaactaggtggataggttgccagcctcaagaggaaagtagggctttctgtcttgtgtgactgatgagggaaaaaatgcagttatgttctggagagacatggagccttctctctctctgcatggcactttcagataccttttcacttgagtcagatgcgtccttctccatccttctggtccccttcccatccctgtcatgtagattgtgcctcctagatgtacttcagccctgtctgcatttttctactcctggtgccttaacctggcttagatcttattgcttttcagccacattcctgcaggaattgtgtggctggttttcctgcttcagtctcactccagactctgctctgtgtgctcttctcctttcagcaccctttcttacttgcccacatgctcagttactactggctttcctaaatggcctctctgcttctgccactgccccctgcagaatattcgcaacagagtatccagagtgatcctttctttctgttttttgttgttgttgttgttgtttgtttgcttgttttaaattaagaagtggtgtcttgctacgttgtctaggctagagtacaatggctattttcaggtgtggtcatagcgcactacagccttgaactcctgggctcaagtgatccttccagttcagcctcctgagtagctgggactgcaggttctgcaccaccatgcccagctcagagtcaactttttttttttttttttttgagacggggtcttgctctgtcgcccaggctggagcgcagtggggcgatgttgactcactgcaagctctgcttcccgggttcatgccattctcctgcctcagccttctgagtagctgtgactacaggcgcccaccaccacgcccggctaattttttttttttttgtagttttagtagtgacggggttcaccgtgttagccaggatggtctcgatctcctgccttgtgatccgcccgcctcggcctcccaaagtgctgggattacaggtgtgagccactgcgcctggcctgtttacttaattctttatataccacagaatttattctcttgcctacaatcctctacgcaccttttgttctaattattgtccacaactagttgtccaaacctctttctcctctatgcctttgcatgttgcctccttcctcattggtttgacagctcctgctcatccttctaggtgagctcaagcctcatccctggagttttcctaacccccagtgtgagtgaggtgtccccacctcctcgggaactctgttgcacccttcatagcacctgctctgtttactcttgtctcccctttagaccattaattgagagcagaaattcctagctttctttctcagcatctgttaacaatatctggctcaggacaaatgcttagtaagtaattgttaaatattcctgccttcaccttgacttttctagccacttggcccattggctcagctcccctatctgaaagatgggaagactattcctagcttcctgcttagggtaatttttttgtgccaggacctcttttacaggaccaacattctgataccaccccatctccaggccctctgctctcttctggatgaggcagttagctctggaatctcagacctccattaccaggtctgaggcttggtcaggttagctgactttccaagcctctgaaatgagaactgtaatccctgcctcataaggttattgtaaggattacatgagttgttaggaagcagttatgtggtcccctggcatgcagtaagcattaacggtggctgtagcgagaattgtgattgttgtcattatcactctccctgtaacccaaaagtgccacctgagtctttccctcttttttgtcttggtgtccaggaaggccaggagaatgtcgagatcctcccctctggggagcgaccgcaggccaaccagaagcgaatcaccacaccatacatgaccaagtacgagcgagcccgcgtgctgggcacccgagcgctccagattgcgtgagtgattgccccttcactgtcttctccatctgtcaggccacagtaagctcttgtaccgctgatctttcccagcctggcacctgaaaacagactctctgctctcacattccaaaagtggtgccgtccctgcgtaccaggcattgagctagtcccctgccctcagggagcttgtgatctaataggagaactaggacatgaacatctgagaagtcaagtaacaatatgggagaaaaacgataaaaaaaaaaaaacagaactagatggttgcgtgtcagattagtgcagcaaaaaaggtgaattcagagccaatgtgtaccagtgtagttttttttttttttttttgagatagagtctcgctgagtcacctaggctggagtgcaatggcacaatctcagctcactgcaacctctgcctcccaggttcaagtgattctcgtgcctcagcctcccaggtagctggaattacaggcatgtgccaccatgcctaactaattgttgtgtttttaatagagacggggtctcgccatgttgcctaggctagtctcgaacgcctagcttcaagtgatccacctgcctctgcctcccaaagtgttgggattgcaggtgagagccaccgcgcccggccatggtggttctttgttgttttattttccgagtcaagatctcaatctgttgcccatgctggagcacaggggcctgatcatggcccattgcagcctcaaactcctgggctcaagcaattttcttttctttttttttttttttgacagagtcttgctctgtctcccatgctggagtgcactggcccaatctcagctcagtacaacccctgcctcccgggttcaagcgattgtcctgcctcagcctcccgcgtagctgggactacaggcgtccaccaccacacctggctaatttttgtattttttcttttttctttgagatggagtctcgctctatcacccagcctggagtgcagtggcgcgttctccgctcactgcaagtgctgcctcctggcttcacgcccttctcctgcctcagcctccagagtagctgggactacaggcgcccgccaccgtgcccagctagctttttgtatttttagtggagacggggtttcaccatgttagccagggtggttggtctctttctcctgacctcatgatccgcccgcctcggcctcccaaagtgttgggattacagacgtgagccaccgtgcccggctatttttgtatttttagtagagacggggtttcaccatattggccaggctggtctcaaactcctgaccttgtgatccacccgccttggcctcccaaaatgttgggattacaggcgtgagccaccgtgcccggccggtgcaattttcttttttctttttttttttttttgagatggagtctcgctctgtcgcccaagctggagtgccgtggcgtgatctcggttcactgcaatatccacctcctaggatcacgccattctcctgcctcagcctcccaagcagctgggactacaggtgcccaccacaacgcctggctaatttttttgtatttttagtggagatggggtttcacggtgttagtcaggatggtctccatctcctgaccttgtgatccacctgccttggcctcccaaagtactgggagtacaggcatgagccaccgcgcctggccggctcaagcaattttcttgtctcaacctcccaagtagcttcaagctgggattacaggtatgtgccactatgcctggctttgtattttttgtggagataggggtcttgctatgttgcccaggctggtcttgaactcagcctcaagtgattctcctgcctcagctcccaaagtgctggagctgggattacaagcatgagcaaccattcctggctttaaggtggttcttgatgtgaggtagactatggccagtccagcagagtggggggccctccagcttgaaagcacgctagagagatgaaagcacagagcagtggtggggttttggggatttgaaaatcagcaaacttccctcctctcccacatttgggagaataaagattcaggagatagagtagacaggtggagatgcgagtgtccaatgagtgcagatgtgttagccataggcagtgcaggccttcagatgcctgctaaggtttggggcagactggagaacagactggaagcaccctctgccaacagatggctttgagaaagcagggactttcaaagaggctgggccacagatgcctgctttttttccccccaggctcacctgtcagaatagttcctcctcctttcttttgaggagtaggtgaggggacagagcggggtactctaatggtactgtggggaagcatgagactgagaacaggagcccctaccccaaactccctatagactgatgtgggaaatggtgggtatctggaggagcgggggtagttcaagtagggaataatggaaattagcctagaaagaaaagcagctgggtgccgtggctcacaactgtaatcccagcactttgggaggacgaggcaggtggattgcttgagcccagaagttcaaaatcagcctgggcaacatggtgaaaccccatctctacaaaaaatacaaaaattagctgagtgtggtggcgtgcgcctgtagtcccagctactcgggaggctgacgtgggaggatcacctaaggccaggaggttgaggctgcagtgaactgtgatcgcactactgcacaccagcctgagtgacagagactccatctcaaaacaaacaaacaaacaaacaaaaaaaaaacaaaggaaagctggggccagatttgtggactctgtgtgcttacaggggcagcaaatgctgtctgtacattctcctccttagtgttcaagcagcactgggctgttgcctcctctagtcctgtaggggtaaagatgaccatcatgtctacttcaataaagggttttatgggtggacaacattgttctcccccattcctcagtagcggacctcttctcagcctggttgcactccttgctcttatgcatggcattagagccacacccagtgtgacagccatacccaatatgccaccaacgtcaggatcctctgggcctgcaccatcaactatggtagccatgaactgtatgtgtccatttacattaagtacaattaaataaaattagaaattcagtttctttctcactagccagccacacttctttttcttttatttatttatttaattttttttgagacggagtcttgctctgtcacccaggctggagtgcagtggcacagtcttggctcactgcaagctctgcctcacgggttcacgccattctcctgcctcagccttcccagtagctgggaccacaggcacctgccaccacgcccggctaattttttgtagttttagtagagatggtgtttcaccgtgttagcgaggatggtctcgatctcctgaccttgtgatctgcctgcctcggcctcccaaagtgctgggattacaggcgtgagccactgcgcccagcctatttatttttttttgagaaggagtctcactctgtcacccaggctggagtgcagtggtgtgatcttggctcactgcatcctccgcctcccgggttcaagtgattctccaacctgagcttcccgggtagctgggattacaggcacccgccaccacgcctggctaatttttgtatttttagtagggacggggtttcaccatgttcgttggccaggctggtcttgaactcctgatctcaggtgatcctcctgcctcagactcccaaagtactgggattacaggcatgagccaccacgcccagccttttcttttatttttttagagacagtttggctctatcacccgggctggagtgcagtggtgctatcatagctcactgcagcctcaaaacttctaggcttaagtgatcttcccacttcagcctcccaggtagctaggactacaggctaatgccaccacacgtggctaatgtcttaattttttgtagagacagggtctcacaaaaagactcctggcttccagtgatccccctgcttcagcctccaaagtgctgggattacaactagccacatttcaagtgtgttcagtagccacatgtggctactggttaccataaaggatagcacagggggataggacatttctgtcattgcagagcattctatggggcacactaatataggctaaaagtggcccagtagaaagaagaattcataagttatttttaaaacaaatagactgcttatttgcaagttaaacagtctttcagcactgaagaaagatactgcattagcacttgataggatgctgagatgattaaagatgtagtcccagccgggcgcggtggctcacgcctggaatccgagcactgtgggaggccaaggtgggcggatcacctgaggtcaggagttcgagagcagcctggccaacatggtgaaaccccgtctctactaaaaatacaaaaattagccgggtgtggtggcgcgcgcctataatcccagctactcgggaggctgaggcaagagaatcgcttgaacctgggaggcggaggttgcactgagccaagatcgtgccactaatccagcctgggtgacagagtgagactctgttaccaaaaataattaaaaaaaaaaaaaaagacataatccccagtcctccaggtgttttctggtgggggagatagacctgtgcacaggtacccacaacccaaggcagatgcgagtggtgctttatgaaaggtacaaagagagttattgcagaggtgactgggaaagccttgtgaagggattagaattctagtggggacaggtaaagagagttggttttgtgggtactccaggtgccagaaacagcccaaggaaaggtccaggtggaggcaggcagttgtggatttgtgatgagggatcataagcagcttggggcataaggctggagaagatgacactggtcctgtgagtgacaggttcagaagattagagttcatttggtgggcagtgtgcagcacttaaaggttttgaggccaacatccagcatccaggccactcataaatccaagtgtcctgtttttcttttctttctttctttcttttttttttttttttgagatggagttttgctcttgttgcccaggctggagtgcaatggcatgatcttggctgattgcaacctctgcctcctgggttcaaggaattctccagcctcagcctcctgagtagctgggattacaggcacacgccaccatgcctggctaatattttgtatttttagtagagacggtgtttcaccatgttggtcgggctggtcttgaactcgtgacctcaggtgattcacctgccttggcctcccgaagtgctgggattacaggcgtgagccactgtgcccagccaagtgtcctgtttttcttggggagcaaagcttgatccagctcattccagtctttagtgctctttccacttaagggctatgacaccatctggtggctccttgcctgctgtaagctcttgtacagccataatgggactctgcacttggtaggtgcaggtggagtctcactctgtcacctaggctggagtgcagtggtgccatctcggctcactgcaaccttcacctcctggttcaagcgattctcatgcctcagcctctcgagtatctgggactacaggcatgtgccaccacggccggctaattttttgtatttttagtagagacggggtttcaccatgttggccaggctggtctcaaactcctgacctcaggtgattcacctgtctcagcctcccaaagtgctgtgattagaggcgtgagccactgcacctggccagaacaactgtttgttgggtaggttttggatggggtttcagtctggttcattagcaccacctggtggctgatgatgtttgtcacatctacttcttaactggatggttgatgtgtttctctgtagaagccatggtgcaagaaaaattaaattacttaaggacacattcttgcacattccatgtgcataataggtgcggaatgagtgaatgcccttgaattatttatattttgaaagaaagcaggcacatgcagatcaggtattttgccacattctttaaagctttatattttgggaaagtttaaatacttattaagagaggatatagggaaagttaaatacttcatctctgcccttgggaaattttcaggcttttgggagtaatataaatcgaaatatttagtaataaaattagtaagctggtagctctcagactagctgattatcagaatcatctgggcagttttgcaaatgcaggctctcaggccgcttcactagagattctattccgggggtctggggaaggacccaggaacctgtattttttagcatgctctcctgttaattctggatttgttggtgtgaacctgagctggaatcatcaggggtggcttcctagaggagatgggcctagaattggcatccctttgcttggtggtagagtccccactgtgggccaagtgttatgctgggggctgggcctccgtggtgaatcacatgtggttctgggccactaggagctcatggtctaatgtggaaagtttccaaacaagtagttacagttcaatgagattggtgccaagaaaagtatatgcaaaatgagtccaggtactgaagagtcagcacacgatttccagggtggagacatctgaacctctcgcaggtttttagggagaggaagagcttgtaagagcacacaaaagggaaacaacatggcgcatctagggaaccagaaatagtttggtatggctggaatgtggagtaaatacaggaaagtagcacgggactgtgctaggaaggcaaacagggaccagactgcactctggcctgatagccaaggggagtcatgacagtgttgtaagcaggtgagccccctgactgctggcctcaggtgaagggtggggagggctgggcaggaagggcagggcctctactgaggtgttgtgtctatagagaatggaaatgatgccgggcatggtggctcatgcctttcatcccagcaatctggaaggctgaggcaggcggattgcttgagcccaggagttcgagaccagcctgggcaacatggcgaaatgttaatttcacccatctatacaaaaaataaaaaaattagcatagctggtggtgtatgcctgtagtcccaagcaggagaattgcttgagcctgggaggtggaggttgcagtgagccacgatctccccattgcactccagtctgggcaatgggagtgaaaccttgtctccaaaaagtagagagagaaaatagaaattgaaatgaggtgcactgggcactgaggcaaggctctggggttggagcagttagaatggtgtgcctttgcacatgtctccctttccaccaggacattctgctgtggccgctggactccggagtctgtgataggcctctgccagggaagatctctggcagtgcccctacacaccactccctactgtgcctgcctacctagaagatgacgtttctaggtggggaccaggatgccgttccaccctcactgcctgttgggcccttctccctgggtttgtagtctccctaacacctgtccctatccctacaggatgtgtgcccctgtgatggtggagctggagggggagacagatcctctgctcattgccatgaaggaactcaagtaagtcactcaaatcatggttcacttctccaaatctctgggaggcatctgttgggctctctgttgcaccctttgctcccacttgcctggctggagaagttgatgcttattcctacagatccttaggaacagctcaccaggaagtaggaggaagagagaagaggaggcagggaaagtgggagggcactgatgagacatggacgtcttctggctgttggaatttccctgttcctgctgcaggaggccttaccaatattctgtcattcttccccctcttgtctgatataaaaactttctttttcttgtaattgctttcttacaaagtacactcatcagccccaagaggctgctcctaagacttctctttgcttgtgttttgcacacaatctgttccttctgcggcagagctggggtcaccagccctcatgtacttgtgacttctcccctgccacagggcccgaaagatccccatcatcattcgccgttacctgccagatgggagctatgaagactggggggtggacgagctcatcatcaccgactgagctggagtcatcttcctgcccttgccccatgcccaattttcattctcactttatatgtgtaaataataaaatattcaactttccaacccccttcccctctgcttatctgcaatgtcaccacctgttgcttccccgttaccgccatgctgcgtggagcatgcacctattccagtggccctgtgactgtcagctccttaagaagcaccaggggcccttagcccctttggatcccccacatccttccctccatctccctgttccccagagcaaaggctgctgcaggggagacacctcagctgccttccaagcagacagacaagtctttgtgcccagggagctggttgccacggaaacccccaatttcctttccagtggggactggctgcaggggcttctcccttctcaggagtatcacagagcaggtctcatcaagccacccattgtttcctaaggacctgcttcgagcctcttatcgtgggctcggatcccctttcaggagcagtgccccagcaggaagcgtgggggtgtgctgatctcccaccctccccaggcagagccctgctgggcaagtcagcagctggagcaaggaccgagcacctgcctacccctgcccccatggctctgtccccactcctcctcaggactctgcccacacgctgtcctctgtggcccacctctttggtgtgccacacccatgccttcttcctagcctctataagatatcctttccctcctatttggggctggtgatcccctgaggccttggggacatggtgctggggtggtggtgctcctgggttccaggtgttacattaagtcagagctggagttcccccttcctctgcctgaggttctaatgggtcctcttcctttctccaccctgcttacccaacctgaggtaagaccagtcacactggctcctccctcctagagggggtcagggggagggtgtatattgacatgaacagggatagagggtaaactggctccctgaatatgccagccttaacctccattccactgccagctccccttcaaagaggaggagctgggcttccctaacctctgcaggaggcagggcctccaggcctaggtgcagcctggccctgggatgggatgtggggagtgaatggtgaggatctgcattggtgggaggggtgtccgctgccctggagaagggttaattcagggagcagtggacttcacactcccatccaccctcctccaagcctgtggaatcctttaatcaagttgggtgctgaaatttcagctctgaaatgccgcctttgtgctggcatccaggcagccgccccagagtgcgggggtcactttctcggccccatttctctaaatggtctctttgttccctgctgggctgctcagtatcagatgtgattaaagggagatggggtttgggctggggaggaggggaattgggggttaacccttaggggatagagtgcaagggaaatgggacagaaggggtgtttttcctcctgtcttcctcttcccattctcctcttttggggagtcccctgctattcagctgtctgggcctggcttttgacttctcttgaataaaatgtcccggtcaccactattggttctgttttcttagggtttgggcatagtctcttgagtcatttccagaaacacctgacccttttttaacaagtggagctcctgccttcctgaggcctgtgcacacttggaacctttggtctaagggatgcacacaacccaggtcttctgacttccttggggtcatttcccctccttccacatcctcagtgatttcccactcactctcatgagatgtggggtcttggaggtgatagtgtcatcttccggatgtgccccctgctccccactgtgccagctccatatccctcatcccacggcgagcaggagtagtgaacagaccacaaatggacaaaagtcctgcctttcaatgaaggggaaagggtgggttgtaaagattataaacacataaggttagtactgattgatccatgacaaaattctagaataggtccctccatgtttaaaagtgcttatataataaagaggagatcgggcactagcatagggtgtctaagaaccaatattgccaaataagtttttttttcgatggttactggtccagtaggttgagagaatgccagagatcagtgaatcttgattttgacaaggcatcagtagtctccatgccactgtgacagagaagtgtgtgcttcatggtgatgtaattagacagttttagaactgattagacagcctcaagagtggagataatagctgggcgtggtggctcacacctgtaatcccagcactttgggaggctgaggttggcagatcacgaggtcaggagatcaagaccatcctggctaacacagtgaaaccccgtctgtactaaaaaatacaaaaaattagccaggtgtggtggcgggcgcctgtaatcccagctactcgggaggctgaggcgggagaatggcgtgaacccgggaggcggagcttgcagtgagccgagatcccgctactgcactccagcctgggcgacagagagagactccgtctcaaaaaaaaaaaaagagtggagataataggccaggtgcggtggcttacgcctgtaatcccagcactttaggaggccgaggcaagcggatcatgaggtcaggagattgagaccatcctagacaacatggtgaaaccctgtctctacttaaaaaaaaaaaaaaaaaattagctgggcgtggtggtgcacacctgtagtcccagctactcgggaggctgaggcaggggaagcacttgaacccaggagacagaagttgcagggagccaagattgcaacattgcactccagcctggcaacagagcaagactccatctaaaaaaaaaaaaaaaaaaaaaaaagagtggagataataggactgacagtggagagaggcgtttaatgctgtacacaggtgtccctcttcatttcgacctttattagtgacttgaatgaggctattcaagtttgcagatacataaagctctaaaggagagctaagttctaaaaagtttaatacaggtggggaaatgggtcaaacccaacaaggtgagatctgttaaagatcagtgtaaagtcctgcttttatctaaaacaaaacaaaaacagcatacatacaatttggatatgactttgcaatggatattgtctaaaagatcggggtttcggttaccatccagcttcacgggaaccagcagttttggggaggttgcttgaagagcttccatgatgcaggtcctagatggagggattttggccaccctggggactgggctacttcttggtgccctgcctctcccctggtcctgactaggggctggagaccgcagatggaaggaagggagctgaggatgcccagtctggagcagtggaagatgcattgctccagatacaaagcagaagcaggggctgcaaaccacaggcaggtggaggggatgatggttaaaaatgcaagccttggagtcagagctgggttcagattctggcaccagcacttcttagcatcagcctcgcaaacttcagtttccccatctggaaaattgagataacgatcggacctaccccttcactggcctgaatgacataaaacccttggtggagcacttagtaaatggcagctggatataagctgttatgagctgggtatgaggaagaacttccaaccatcggagttgttcatcagtggagcaagatggcaaagagtctttggagttgtgtgcttgtgaggtggagtggtcctggcctctgggtgcagtttggacttctgctgaggaaagagctcttagggagtaggcgcttaaggagtagactgtctgacatccttggtctggacttggacatgggcacctgctgtgaaggcttggctagatcctggcgtgggctgctgtgtgtgtgctgggggaggtggcaagtggggggatgcagcaacacagggcctatccacacatcctgaaggacaggcctctgactgcaggcagcacggtgtcaccctcagcccacctcctcctcttcagatacctgtctcttgaattctttgcaaactcccgtctgctgagtgctgggtgagcagaggggctgcttgcaaggcagtgagttctagctgagccagttaagagtgagtggcccccctgcagtgtggggcatagccgccgggctggggagaagttcccatctgaggcttcagtccctgagctcagatggaccccactgggatgccagctgtcctaacactctccattgttcccactttcttagcagggagagagacagaaagagagagaggagagtgggaggggggagagagagagaaaggagagggggaggggggagagagagagagaaagagaggagagaagggaggggggagagagagaggaggggggaggggaagggggtggggaaagagggagggaggtgggagagagagacctttgatgatctatcctttgcattctactcctagctacttccagaaagcatttgaggaagcaccagtacagggataagagatgaagagacaggccaggtcaggctcaccaagcaggtaaccggaacctttaattttattatgtggaatgcttaatgcagagttaataggggctagagtggctaggagaggggactactgagataaataacaggagacagtaatgagttacatgtggatttggggggctgcagaacaggaaaataggggcagatatagctacatactttattcaaataccactgggaggcaaggggtaagaggcaagggcagaatgtacaggtcaggattctagtgtcttcagcctgccgacagcaacctgggtgctgggccctgtgtctcctggagccaagggttagggcctgagcagctgtcactctctgggaagcccagggagtggggctgactgagcaggggccatagagcctagtaagggaagagggagctggcaaggagcccagggagggaggctctgtgaattgtctctgattcctttcctggagcccctgcctcgtcacctcctgggatgcgtctcaaggtcatggaggttgtagtggaggaggactgggggctgtttctcagacaaagaatgaggttattggcacagaattggatcagggggcctctgtgccaactccttcctgccttcagaaagggagggggcattgaagggatgagaactccactaagtccctcgaaccccccactccccaatgaggctcctcaaagctactctcagcccctgagtgggagacacggccagctccgggcacagtctctgggtggcctagcccttaggcactgtggcataggtggcatgggcatgtcagaccctcactatctgtgagagagaaaacaggagtcataggagtggtaaggcctccgatgccaccaaccctggtgcttcccctccccgaggagggtgagcaggcccttctcaggtcctgggatagagggtcattcctgggggaaggtgcagcccctcatctttcagtgtgggtgcaacagtcaacctccttctcctctgtccagcctgttctcctggggctttgctgctggagcctggatggggcgggtgggtcatcagggcagtgagccagacagaaagccccccgacctgtcagcctcttcagcctcctcagcctcctccactgccaccaccaggcctgaggtgggcaaggaacagggcacacaggctgggggcaggggctgggcggggggtggtggcgacagggccccctttagggccgggacagtgtcgtatatactggctgctcccagtgtgtggggctgtgggactggggccctgaggggctggggtcagagatggccgtgtagaggggccgctgcgagggccccatataggagaaggccgagtagaggccagaggcctggcccgagtggccataatagggtcctgagggctgatggtcagagtagtcaaactgggggcgggagatggaggggaaggctgagccatagtggggcaggctgagggaggtgtaggcgatctgtgaggtggatggctggtcggtgtagtgtgggggcccctggggccccgcggtctctgtcttcacctgggctttggcatccacaccaggtggtgagaccgtgggcagagccacgcctggtggcttggagatccaggcggagtgtccactggccacggccagggcactgcccagcccatagccggctgctgagtagctgctcacatggcctgggtgcccattgggcggcaggtactggtccaactcagccacatcaaaggtctccatgttggacattacctcgtggctgatctcaccaatgtccacgttgccgaagtcgatgtgaggcttcccgccctcccccatggagcgcccgtcccgcttcgggtctgccttgcccgactgcagctctgtcttcggggtggttggaggggtgggtgggccatggctctggcctgggtagaagggagacagagagagagagcgcaagggggaagcaggttagaggcaggtgggcgcacgtgaacttccatggttcaccttcaggcagcgggtgcctctgggaaaaccttgtaagtttcacattttggcagcatgagtcgggtttttttttgttttttttttttgagatggagtttcgctcttgttgcccagactggagtgcagtggcgccatctcggctcactgcaacctctgcctcctgggttcaaatgattctcctgcctcagcctcctgagtagctggaattacaagcgcccaccacaatgcccagctaatttgtgtatttttagtagagacggggtttcaccatgttggccagggttgtcttgaactcctgacctcaggtgatccacctgcctcggcctcccaaagtgctgggattaccatcatgagccactgcgccccacagcatttgtttaaatactggtgtcttagattgatctctagttgtttatgaaattctcaaatcttagggatgggtcctggggaggcctgcctcattctgaaaaaacctttcctgtggaaagttcttcctctcatcagcttctctgctgtccaggtggtctggcccagcctttgcgctctgccagccccgcttccacacccatgcctactgtcttccttgctgagcctcgctcgcccaggctcctgagtgctctgtttcacctttgctggttgcctgggcctgctccctgtcctggcctcatgttgtgtcctttccaacccttccctcctcctgagcccaccctgcttcccagcccactggcaagcccttagccccgtcatacgctggcctgtgttgccctgttgttctttgagctgccttcctccatgggagggcacttagaaaactggtccttgttcctttgtctgttcactttcctattcacatattaatttagcaaactcttagggagcattacaaaatgccaggtactgtgccaggtgctggggatactaatgtaaataaaatggatccctgttcccaaaagctcatagtctagtcatagatccatagatccacatgcacccagagttggaagtgctgtggtgacaatatgcaaggacttgggagaccagaggaggagtccacccgctgcctcagggatttggggaaggtttgatcagggaaggatgtctgagtggggtggggccttgaagggtgagaaaaagtctgtgtccagtttcattctgaggtggttgctctgtatgtggtccagggtctcctgatgtgtgtgtgtgtgtccctgaatctttgaaggtgaagagtatgtacacgtgtgtgggagggatgactgcctggcatcccaatggagacagaacatgtccatggtcttaagagactaggagctccccaaggacaggcctgtgcctccttcatcagaccagaggcagcgccaagtcctgcattggccaagggctctgtacttcaagagacctgcctaggcttttgaatcctggttctgtgtctggacaaatccccagtcttctcttaactagtttccttatcagtaaaatagagattgtaccaagcagcccaggcattgcctctttctggaagccttccttgacaagagtctggtgggcagtggggtgttcttggagacctgactggatgggatagacggccatgccacctctggatctcacacagacttcttgtgcacttgtttctctctctatatatatactatatatatagtaagagataggaggctgggcgtgctgggtcatgcctgtaatcccagcactttgggaggctgaggtcaggaattcgagaccagcctggccaacacggtgaaaaaccatctctactaaaaatacaataattagctgggtgtggtggcgtgcatctgtaatcccagctacttaggaggctgaggcacaagaatcgcttaaacccaggaggcagacgttgcagtgaaccaagatggcaccgctgcactgcagcctgggcaacagagcaagactccatctcaaacaaaaacaaaaacaaaaaaaagacagagtcttactacattgcccatgctggtctcaaactcatgggctcaggtgatcctcccacctcagcctcctgtgtagctgggactgcgggcgcattccaccatgcctagctttgtttcttcctgtacttaattcactcgttttcatccctgctcctctctctagactatgggcccctgaggccagggactgtaggcttctctggttagtacccctggtgtccactccagtgtttgacacaaagtaggactcagagcgtgtcctctgaaggcagagctctgctcactgagcacttcccatgtggcagacctgtgtgtgtcactttctgtacattaggaacacaggcaaggcagctgtggtgccaagcagatgcccgggagccaaactggggaagttcctgtttgtttctcatcagtaaaatgagagtaacttgccacagctgagatctgagcccaggcagtttgggtacctcatcacattgtttgcaaggattgagttagtatacataaggcaactagcacctagcacagtgcctggaacagagtagctgctcaattaaggttagctgttattatcattaatgaaaattaaacaagatagcttatgtctggcccatccatggccagacacggtatcacatgccatgtctcctctgtcagaatggctggtgggatttgggaggccgaggcgggcagattgcctgagctcaggagtttgagactgggcctgggcaatatagtgaaaccctgtctctgctaaaatacacaaaatgagccagacgtggcggtgtgcacctgtagtcccagctacttgggaggctgagacaggagaattgcttgaacccgggaggaaaaggttgcagtgcaccgagatcatgccactgcagtctagcctgggcgacagagtgagactctgtctccagaaaaaaaaaaaaaagaatggctggtgggaaagaggcagtgatttcctctcctccatttgctcttccatttctcaaaaccatcctgtcttctccccctttacttgtaactgccccagccacctctcactccatgacctccacagagtctttttttttttctttctctttgagacagagtctcgctctgtcgcccaggctggagtgcagtggcgcgatcccggctcactgcaagctccgcctcctgggttcacgccatcctcctgcctcagcctcctgagtagctgggactacaggtgctcgccaccacgcccagctaattttttttatttttagtagagatgggatttcaccatgttagccaggatggtctcgatctcctgacctcgtgatctgccctcctcggcctcccaaagtgctgggattacaggtgtgagccaccacacccggcggcctccacagtctttaactggccctctttgcccagtaggatcagccctggccagagccatctcacccagccacttcccctggcaccggaacccccatggagctccctctgggcccctgcagctctgctggggcaactgcacagcctggcacgctctccctagagtccagggtctcattgccatccagccatctcctgtctccactgactggccttgccccaccctcagctctgtcatcagcactcacctgaggggtgctcggggttcccatctgacatgggggagccctctcctgggtgccggtggtccaagtgggcgctcttgtagtgggcctggatggcggcggtcccaccttgctcggcctccccaccggggcactccgcctcgccctgggcggccttcccgttcttccgccgcctgggctggtacttgtagtccgggtggtctttcttgtgctgcatacggagccgctcagcctcctcgatgaaggggcgcttgtcactttcgttcagcagcctggggtgtggtgggaggcggagaggacagcagaggggctggcgtgaatgccagagcactccaggttggcctccctctgagtgtccatcttggaagatgtgaggccctgggatggggcacccagaggacaggacccggggtgggggctgtgccctatgatttgtggactgagagatgtgaggcccaaggaataacagcctcagagggctgcccccaaatctttcatgggctggagggtgagagaggggtcagcccgctgctcctggcagcccctgaggaggagttagaagtaggagtagaggtttcaaggggcagatgccagttcaaggaaaggaaaaactttctcatcatcaaagctgtctgcaagtggaattggctacttcagtgggggtgagctccctgggactgagggtgggcaatagaagcagcatggctgggggagaactcagtctctgctacttactagctgtgtgtgtgaccttgagcaaattacttctctgagcctgagtttcttcacctataaaaggatgataacattggcttaacttgggtgtgggattggccagaataatggatgtgagatgccttgcaccagggcctgggaagcgggctgagcaccttgaggaagaggtgcttttctttctttcttttttttttctgtgagggaatctcactctgtcacccatgctagagctcagtggtatgatctcagctcactgcaacctctgcctcccaggttcaagtgattcttgtgcctcagcctcccaagtagctgggattacaagcatgcgccaccacgcccggttaatttttgtatttttagtagagatggggtttcaccatgttgaccaggctggtctccaactcctgaccttagttgatccgcctgccttggccttccaaagtgctgggattacaggcatgagccattgtgcccagcccaagaggtacttttctatttttaattttttatttatttagagacagagtctcactctgtcgcccaggctggagtgccgtgatgcggtctcagctcactgcaatctcggcttcctgagttcaagcgattctcctgcctcagcctcccgggtagctgggactacaggcacgcaccaccatgcctggctaatttttgtatttttagtagagacgaggtttcaccatattggccaggctggtctccaactcctgacctcaggtgatccacccgccttggcctcccaaagtgctgagattataggcatgagccaccgtgcccggccccaagaggtgcttttctaatgctgcttgcgggggtggttggacaggaggatctagggttggactcttaactctgggtcctgattgtgtgaattccagtgtggtgggactgagggggcagatgtggctcctctttaccatgggtctgggtggggggtactgcctcctgtgggggatcctatatccttgtccagaaaatagcagagagtagaggaagctagcctctcctcagaccctggaacagtccctgaaaccaacacatggagagaagaagccctgaagccagcgcccttgccaccgactccagccttaggccagggttggagggtggagggcatttagggtttggctgccccagggtgaggagggcaggatggggtaccttacagagggggtcgaggggaaagtccagattctagaatcccagaccttggtactgagaatccatgagtctttgtgggagcagccttgtctgtcagtccagagggcttgtctcttcagctgccccacccctcacaccccagtgagtgccctcttcccccagtcagcagaaggccgagccctccctccccaggctgggcgggggtggtcatgccaggcacctcctagccggcagcagcattcctctgcggcttagcctccctgtctactccccccaccccggccctgagcccagccctagccccagctttctcagagggtccctccagccgagactctgtcagagtcagtgtacacacttaggacaaagatgccggagcagggccttgagagtcagggagtgggatgtgggcaccctctctgacggctgggaccaggggagggggtggagcaggccttgagggtgtgactggggagaacccacagaggagagagctgctccgccagcagtggaccccaacagaggggcttctgggatggctggggacatgggacacagagctcactctttcacctatccttcccttgccccctgcccagctggcagccagcatcagcaagaaagtgacaggggccagaagagagagaggattccaacatcggattccgctgctacctcctaagctagttcccagcattagcctaaccctgacagaaatctaagcctggggccactgccatccccgaccccagctccctcctccaccagctgtgccggacagctgattccacctccaccccaaccccaagcccagcctgcccaccatgtaaacccaatctccagcaccagtccccactcaacattaccagccccaaacccccaacttcgcctccagctctaactccaaacccagtcctcatctgcaccttcctgtcagccctctttctccctggtctcccaggtttggaatgggggcaagaagaggtaggctgattcctcacccaaactggaaaccccaaccggggacctcccacagtggggcactgattgctgctacctgtgtcctgctaggccaggggcataagaagactacttggggaaggggcctgtggcactgggaacagaggctgggtgacccccaccacacaggagggactcttgcctgtgtccgcctttccagtttcttggctctggttctttccaggcagatcagccaacccacaggcaccaccctgtgatcagcctcaactagcccctccccagatgggcatcaaaggttagaatgactgttggggctgacacggccccttaggacctgggctccagtgtgtctgatcccacactcccttggggcactccacacagtctgtgtgtatctttctctttttggttttaagacacctgttttccagctctgcctacctaaccaccccacttcttgacatcccaggagtcacagcttggggaggtttcaggagaagcccctggagcaattggccagcccagcccaaatccaaatgtctctcaggacccccctccagggtccagggagccaccctctgttggcattgcctttgatccttgccatggttctggccccatcctcccattgggattgggtcctcagcaagtagtgccagttttcctgactgccacacctcaggctggcccctgtgcacacagcttgagtgatggccaagaataagtcctcctgaagggagtccaagcccagggttctgggctgggggaacctggggacagggacaatggaggagccaatcttaaacccttggcaatgggagatggagggaaaatgaggtccgtccttgctttgactctcgttgggctcgtactgtggtcttctcatggtccccagagtctgccctatctgtatgtctctcctggttgtctgtttctcacttgctctttgtcccctggcactaaagatactggcctgggccaagccccacccagatctggatggaccttgggtggaggagctagctgtgacctctgctcttgggcagaactgggctgtctgggtccacacagcgggctggtcgctgagccctgggcctgccctgggtgagcagggcactgagggctgagaaggggcaggggaaggggcaccaggtcttcagcaaacacatggcaagaacaggccagggggcgggatgtgaatcttttggtctcttggagatcctcctgcaccttctaccactctaagcctctagacccaatctctacccaactgtggctggcaagggggagggcagcggaagagagccgggctcctctgacaaagccctaattttctggaacccagatgctcctcactcttgttctcatcttcttgcttccccccaacctcctgaccactcctcaaagtgtaggtgatccaccactgtcaccagggtcaggggaagtcctctggacagagagtatgggagtcctgggttctggccctggctctgctaccaacttctatgtgacctttgtgattcctttgcctttctgggcctgtctcttggtcagtctagcgagaatcaggtgactgctaccggctcacatctcctggagtccctggtctctttcagagctgctctggcactcccgggtgggagtgggggactgtcttgttccacacatccccaggaggcctggctgaaccccagacctgagtcgagggtgggataattgctccctgcgggggatgtttttcctagaggtgtgggctggtcccagggaacctgggactctgagggcccctgggcaggaaggaggccaaggtttccttctggccagagtgctcagctccagctctggggcagtggggaagaggttgctcaacgttggggtggggccctggcagggaagatggcgccgaactgggagagggaggaaagagatcagcttggtgactctggggcagggcaggagggggagccccttactgtgtgtcctctccctaggaggatgaagaagcccccaactcaaaggagggtggcgtcagaaagtcccagggaagagccctaggataggatgaggtcccgcagcagcagatttgtcccgcagttcttcatccctcactcttccaaagactctcatctgaattccgttttctttaaacctcccctgagttctccatctgactgcctcagtttccctgaatctccagccaaccctttggttctttccaagcgtttccctcgtatcctcctgaccacagcagctggtggcatagtgtgcgtatctgtgggcaggagttagtgaaggcctccttccctccctccaaagccccaggccccacggtctgccacccgcaaaattccaaccacgagggggcgccttcctgcccgccgccccgtagggagacccggcctaggccgctggagttccgagttccagggtccttgtgatggaagggcgggcgcggcccccacacctggtcttccagccctatccaaggaggactgccagacagtcccgctctgaggtgcaggaggccgggccgcctcggctaccctgaatccacccgaagctagagggcccgagcccggggggcggtcgggtgctcacctccagagcttgcccagcgtcttgctgagctcagcgttgtgcaggtgcgggtactggtccgcgagcttcctgcgcgctgcctgagcccacaccatgaaggcgttcatgggccgcttgacgtgcggcttgcttttgctggcgccgttgacgcgcacgggcatgggcaccagcgtccagtcgtagccgctgagcacctggctgacggcctcgcggatgcacacggggaacttgtcatcgtccgcctcgccgtcctgctgctccttcttgaccttgcccagctcgcctggccccgggctggctcgcaggcccgatccgccgccgccgccgtcgggccctagcgagggcgcgctccccggggacaggcagcggggctcctccgagcccacggggctcagctccacctccgataggtcctgctcctccgccatgtcgcccccggccgccgccgccgccgcctcggccgcctcccccgggccagccgccggggtcctcgcaaagagtccaacgcccacctggatggaaggagggcgcgatggagcggccgcgcgcgcagccccgagggcggcccgagacaggacgtgggcacagccccgaggtggcggcccttcctgctccagctaaacccatctggcccctggggcccacgcacatgccagactctaggtgggtgcgtcccgcctctgtgtcttcccaccacctggtcccaaccgtctcttggtgtgggtggctttttttttagcctccttttttgggtggaggtttgttgatgataaggaagaaaaaaacggagcctttattttgctctaatcccggcccctggaatttcccaccttttctctcacctttccttcttccctcagcctgccccaacggggtttagaggagagccaggtggggggcaagggcggggtgtcgcctctctccacctcacagcagggtcccaggcctgggcgggccagggaggagcaggctgcgcactcacctcctcggacctctcctccagtctggggctcgtccttaggaagtggaaaaccgtgtcccaaggtgtgcggtccagctcggggctgggaggtgacgctggtgggctgggagggaggggcggggggccctgagcctcaggccacggcctcgttaggacggagcctgaatccttaccaccaaccaccctggccggacagcccgagactgactgagcgactgagcctgagccgctgcggagggctggggaaggaaggagggggagaggggggaggggagaggagggagggaagggcagaaggtggagcctccaggctttccttcatccccaacactcagggctcctccacccggagcccaggcccccccacccagctccctgccctactgcccaggcccatcttgctgaggcttatcttgggcttagtctgggaggtggaggggaggttaggccgaggaaggaagagatgtaggctggagggtcagaacctgttggatggaagaaaattgggcccaaccaggactcctaacgtctgcctcaggtggcaggatgggcacttggcaggggactagggagagacgtgaaggcggtgagggtcctgggggcccgtgagggtggctggccctagctgcttcgtctgcgaaatcctgttgagtgcctagtgtgtgccaggcactgatgcccagctcctcaccctgcctcctaccttttcccaggcagccctttctgccccatcctgcacagtaagagagacttctcagggatccctctgagaagtgcagagccccagcttgacccctggtcccttctctgcagacacccagcacacgcgcgttctggtctggttcaaggtggaaacacaagactaaagctgccaggaggccaaggtgggacaggttgggggccctctctcagtaggtcttagaggcattttgggttgctacctactgggacccagctccttccacactgggctcaccctgtcttgggagagggtaggggagtcctagtcctgattgtcacgaagtcctctactcccccaccccaacaaggggtggggacttgccctgcctcttccctcctctgcccacctctccctccctccccttttctttcctgcccatcctccgttgacacctttttctctctctttccttggcctctcctccaaaggtcgcagtgctgttctcttaactgagggcagccccgccggggtgttgaggccgaggtggggtgtatgtgggttatgtaatggagctggggtcgcattggcaaccatgtgacgttctgagctcctcaacagcagggcaaagccccaagaccaccccaaggggtcctgtctggagtgggctgcaaagggtctggggaggcaaggcctcatgcttgggaaagtccaaaggggtgtagggggtgggaaatgggacacaatgaggtagtcacacgaggcagaggcatgttgggggtggggggagcagacactggaacacacacacacacacacacacacacacacacacatgctcacacacacaaccagccagacaatcgggccagtgtgtctggggcctcggagcccagtgaattaggagtttgataagggttttctctttctctcgcttgctggccttggacaatctccccccagttttcctcgacgccacccccggcgctgccaaccctcctccccccgcctcccttctcttccctgtgcccagactcttgttcggggccttgaaacagtgagctgtctttgttcgaaatacaggtgaacggcaatcatgtgattaacacacacacacataaaaagctttttaacagcgcccgctcggcctcagaaccgcccggagaggagccgccctggatggacagagggacgagggacgagcatctgccgtcgtgtcccggctgccctgcagtcgcctccaacacccgctgctgcccgcccgctgcctgcctgcctggcatctctctctcccggtgggtccccactcatccttccacccctcagttcctcctctttgaggaaaggacctccccgctctctgctgtgtctgtgactggcctgagacccg

SEQ ID NO: 303 - DNA, 21305 bp, Homo sapiens
  source 1..21305: mol_type = other DNA
cgcacacatacagagtcggccacacgcgcgccgcccggccccactcgcgcagcgcgggcctccgccggccgcattgtccgcccgcccgccttgtcccgcgtcgccgctcttcgcgtgcccgcgcgccccgggcccggccgctgtgtcgccctgagcggagcgccgcccgcgggatccccacgcggaaagggggcgcgccccggcggcggcctggcctcggacgcccccggccgggctagaagccgccgcggcagcaggtgagtgcgggcgagctcaggagagggttggggggccgcggcccggcctgaccccgggtcaccgtcgggccactcgggcggggccgcgccgccaggcctgcttcctcctctccgggacgtgctgggccggatccagcctccacccgggtccgcggcccgcgccctgactcacctcctggcccccgccccgcctgccgcgccactggtcagccgggagggcggtgtctgcgggcgggacttcccgggcagcctcccgggaggaggagggcaaaggccgactgccccaacccggccccgggcagcgcctacgggttttgtgccagacaggccgtttccagggacaggcagttcccagcctctgcctgtcagaactcagggcctcagaggaaggcccgttttgttcagttctaaaacaaaacaaaacaaagcaatggggggcgcggtgtgacttagagagccaggaggcgcgcctttggtgacaatttctgcaggtttggcctgtgggaatgagggcagagggagttagcaccgggcgtttggcaggtcccacaagggcgtgtggcctggctgtgcccagggagtggaaatgtcacgaggaagatgccccagatctggtttaagtctgaagatggatggagatgtttgtgatggggaagggcggaattgagaaaggaagtcgcccagctgagaagtggggaaggatgctttccgatgagcgtttcctaactgattgttagggaggaggtggggcgggggtggtgtctattatgattcgcagtagtagatttcagctcccagaggctcacttcttgttttggagaatggggcctcgacctttttcatcttgtgaaacccagactcaatggtaaactgttttgtgatgccaggatgccgcaggaaagactgagaggcatctctgggagttctgggagggcggaggcgggtgctgacagttttcagcactccccgctcaacctccatcagaatatttagttcttcccagcggcagcttgggtatggtataaacatgttgccttgtttctgccctgggcaaaggtgtcacctccttcagcaggacagaggctaagaggagtccctgtgtgggcagctggagccttcaggtagggaccgtacgggcggggcagggaggggggaggggagattaccttataaggacaggaatagagacaaggacccaggccaacttcctgcttttcctactaccaatcggtcccttttccaacaccagctaaaagtagaggggatgccagatgggcgtctgacctgggaagatgccaacaaggccaggacatgaggctgcttgtttttcagaggaggactttctagctggactaaccagaccttcgggtttctgcagcctgggttgggaagtggacttctatactcaccacacaacccagagaactggtcatttaagtatcaaccaggaatattagaagtgatcaaaagtcacaagcaagtgctaggaattcccaagtgactttgttgtacgggccagcagaggcactaacgttgagactccccatgttggcagtcggggactttgaattcgggtgtctagacctgagtggttcattaatcttcctcatgtcacagaatgctacctcttgccagatctttgcactttggcttcctttgtcctcattatcagttccagagccttgatttctgccccacatggtgaccggaactgactgtaattcatgctgccctcctcctccctattttgttagtttgctaacaaatatttgttgtgtaacaagtttgtatacagccttgttttgcgcatgtgtgaggctaaaaaagattctagctgaggacacacaactagaatcttcaatacattcctgaaacaactggaaaactttatgcctgagtagaaagacccaggccctacagcctgtcagagctgagcccaaaccctggctttggcacttacaggctggggactgtggacaagttacccattgcctcagtgtccaggttcttcccttgtagatgggagtaatgatacctaccttgcttctaataatataaatgaggtatacaaggagcccggtcccagcagacacttaccattttatcatcatcttaccaagatgtggcagcacagtgtgcaccgtggggacagacagtgcaagcgccatcaggacgtaggtgggagcctggccaacttggtgaaaccctgtctctattattaaaagaaaagaaaagaaaaatccttttggctgagcgtggtggctcatgcctgtaatcccagcactttgggaagccgaggtggacagatcacctgaggtcaggagttcgagaccagcctggccaacatggcgaaaccccgtctctattaaaaatacaaaaattagccagtcccggtggcgcacacctgtaatcccagctacttgggaggctgaggcaggagaatcgcatgaacctgggaggtagaggttgcagtgagccaagattgcaccactgcacttcagcctgggaggcagcgcgagactccatctcaaaaaaaaaaaaaaaaaaaaaaagaacataggtggggtctacatgggaaaggttttccatcaaggttcgttggggccctcgatgaacgagcacatgtcagcaaagggacacagctagagcgagactgggagaagtctctagggagaaggcaggtggggtggctggaccaccgggcgtgcaggcagtgaccagaagcaccagagtctctgctacttgtcagaggtcgaggaagacccaattctggcttgtgcggagctcagcaccatgaaggataaagacaaggaaactgagaattgggaagcctgtggaaagcgccctggaagaggctccagagtcacgaagtgagccccaggccgggcgtgactccagccgctgcacagtgcaggggtgcttcacagatccctgccttgccccccatcagggctgtttagactgaacgccgggggccgggggccgggggggtggtctgttctcggctgtgaggcgatgcctctgtcccacctcctctagagaggagctggggacagccccaggcctcacatccagtcctcctcctctctctccttagattctcttcaggggaagagtccacatcccacctcatcatgtcccgaagaagccagcgcctcacgcgctactcccagggtgacgatgacggcagcagcagcagcggagggagctcggtggctgggagtcagagcaccctgtttaaagacagtcctctcaggtagggacccaagggagtgccacggcccctgacagccccacaagcttttggtcactgcccgcacgccctgtggtccagccatccccctgccttcttgttgcaaccttgggtggaaatcgaaggacgtgggcccccgtccggtcgagggggtccttccttgctccatgtgtatgagcacacagcacccattcttctcccaccgactgtgagccggggctgctgccctcatgcttagaaaacaggaagtggtaggtcgggcgcggtggctcacgcctgtaatgccagctctttgggaggccaagggaggtggatcacctgaccctgaccaacatagtgaaactccgtctctactaaaaatacaaaaattagcccggcatggtggcaggcagctgtaatcccagctactcaggaggctgaggcaggagaatcgcttgaacctggcaggcagaggttgcagtgagcgagatcatggcattgcactccagcctgggttgacaagagtgaaactccatctcaatctcaaaaagaaaaaaaggaaagaaagaaaacaggaagtggagagaggcagcttcaaccataagccaggccggaaaccccaaaactgcaggctgggctcacaggaaccccccctgctctggacgggcgtgtcagccttaccatccttcctggccccacgcctgcatgtctcaccacctgtccggcctcagcagctggccagcgacatggctgagaacaggcgcagtcctcaggccactgggaaatgggctgtggcagcagctgcctggtcgtcctgcccggctcacaggcatggggcccagaagacaggccctgaggctttggctagctctgaggccaggtcaggtctgtctggtttcagtgggttgtaaagtttgaatgtggctccatccctagctgccgctgcccgtcttgcccatctgctggtgagattcagagagaacaggagaggacgtgccagcattgggagagtcaggggaatggcagctgcgagttgcctagcaacaagggaacccacaccctgcactaggcagggccgcaggctgtggctttccttcatgctcctggctgggctcacctccctgctccctacctctgccctcatggttgtcccacaggaccttgaagaggaaatccagcaacatgaagcgcctgtccccagcgccacagctgggcccgtcctctgatgcacacacctcctactacagtgagtcgctggtccacgagtcctggttcccacccaggagctccctggaggaactgcatggtgacgccaactggggtgagtgtggagccctccgtcccggggctttgcttcctcggcctcccgcgagatactcctcacagtgtcccctgcagtccccgggattccctcctcagagcacctctctgcccagaccccacttttcagaagctcttggaggcccagaagagcccctggttcttccctgcacaggtgaggacctgcgggtgcggaggaggagaggcacgggtggctcagagagcagcagggccagcgggcttgtggggcgcaaggccaccgaggacttcctgggctcttcctcgggctactcctctgaggacgactacgtgggtaggcgatgcttcctccctcctgagcagatccgaggctgctgggaggcctcaggaaggctgggcagggagccccggggagctggagagagggcagcatgtggcaggcacagcgcccctcccatgcccggccctgggtgcgccccagcctggcctgcggtggcccctggtgccctgggctgtgactgcccttcacttgtctgtcctccccaccccacgagtctatggcaacctaaggccaacatccttgcattcaggcccattccagcactttcctgtggggctcacacatggtgggtgctcagtcattctgagtggtgtgcatgtcagaccccagcacctagttctgaacagcagcttgaggggtggctggtgaggagagggatgcaaacaggaagctgtcagaagaaacagaatgtcaaagagctcccatttcattccttactgcacaccgggcctgtgtggggctgtggggatgtgaaggagggtgggtgacttgtggtcttggctcacagaagacagtgaaggaagaggctcgaaagtgacagagactgagccagtgtcctcgttccccgcaggctactcggatgtggaccagcagagttccagctcgcggctccgaagcgccgtctcacgggcgggctccttactctggatggtggccacttcgccaggtgggctgcaacccgtgcccagttacttccattcttggtgatagtgctttcttacccatctctctgcagttgggcatcctgcccatgcagagagactgtaggaccattggggaaaggtcattctagaataatcactgggagcccagagctgtggggacccccttgcgtggaagggaaggagtagctgcagagcaggacagagggtgtgggcaggtgggatccaaggacctgggtcccggtagggcaggacagaggcatactggcaggtgggggtggggtaggggcagggaggacggcagacgggacaaaggagcggtgcccccaaacaccatatggagccttcggcttgatggtcattcttccaggccggctcttcagacttctctactggtgggctggcaccacctggtaccgcctgaccacagctgcctccctccttgacgtcttcgttttaaccaggtgagcgagactccacccttgccaataaatcgcaaggccctggggtgaagggacgggtaaagtgtgtcaacctgtaatggtcgattctctgagggttttccccagtttccctggagcctttattagcgatcacggagtagcttccccaaagcccacccctgcctgacagaggatggactcagagtcaggttcttctccccgaattgatagcccttcgaggcaggattccagagcacagattatttcttcttggacacattctactaaacgccacactagtctagccgtgcctggctctcagacacacgatggctttcctcctgcagggtaggcccactgactccaggcaagaagtggggtttcccagaaagtccatcttccttcttgggcctgggacaatctaaccccccgagttccccactcatggtcagagccacaaagaggctctgcctgaggatgctatgggttcattccccaagtccctaaaccagcagaaccaggatttgagaatgtgccccttaggcagaagaacacggaacccagaagtcaggatccctctggccgtaatccaggtccgggcagaggggacagctggccatactgaaacaaggggcaaggatgggtttgtgtcaccaaaaacaggttccttgttgttatttaaggagttactttttttttctatatttgcatacttagaggacctgtccatataaaaatttttgagtttttcaaagaccacactatttttaataacatcagtaaaattcagtcaaaattgtcccatcactctaagacctgcccagcaggaaaggctctgacgtgtccaggctggccctggcacagtgagaagctcaagctatcctccttagctctagttcagcacccaggaaaacatctcagggtactccctgggtggaacgtggaggcctggagctcccctcacacctccgcctcccccgtcctgccctcccgcgtggtccaggcgcttctcgtccctgaagacgttcctctggttcctgctgccgctgctcttgctgacgtgcctgacgtatggtgagcctgcatggggagagcagagggaggcacagagatgtgttcaccagagggtggtgacctttggcaggcagggaaggggcaagactgggtggggtgtgcctgtgactgggcagggcctgagccctggaccctggatcatctctgcatggccctccccacctctcctgagcctcttttgtgccgccctgggcaggagcacaccctagtgccgcaacattgggtgaaaagcgggatgccctcccattatcattagcagtcatcctccttccactccaacagggacatctgctatgagggagttatttttacaagatgaagttaaatcttgagctgtctttaaagtaaaaacaatgaagcagcaaagggaaataagtgccttttttgtttgttttttgagacagagtttttgctcttgttgcccaggctggagtgcaatggcgcgatgtcagctcaccacaacctccacctctcaggttcaagtgattctcctgcctcagcctcccgagtagctgggattacaggcatgcgccaacatgcccagctaattttgtatttttactagagatggggtttctccatgttgtcaggctggtctcgaactcctgacctcaggtgatccagctgcctcggcctcccaaagtgctgggattacaggcatgagccaccgtgcccggccataagtgcctctttttacaccagtcacttaccagctgtcctgaatcatcccaggcgctagcacaggcctgccttggttttttgtttgttttgagacaaagtcttcttctgtcaccccagctgaagtgcagtggcacgaacacagctcactgcagccttgaccttctgagctcaggtgatcctcccacgtcagcctcccaagtagctgggattacaggcatgcagcaccacacatggctaatttttgtatttttagtagagacggggtttcaccatgttggccaggctggtctcaaactcctgacctcaagtgatccacccacctcggcctcccaaagtgtcgggattacaggtgtgagccactgcacccagcccttccttgtttatatagacattttgtgttcagctttttacttgacagcttggctagtttcatatgaattgcctatgtgactctcagctcaattttaatgactgcaccaagtaattaaagaccatgctttattattttttgagagtttgttttataagcttaatatcattcaacttgtatttcttttattaataacagggtagaacacttttccaaaagttagcttcgtttttgtgtttgctgctacaagaacagctggttcatatccagtggcaactgagcaccacccttaaaataataatgattcttcttctttttttttttttttttgagacggagttttgctctgttgcccaggctcgagtgctgtggcacaatcttggctcactgcaacctccacctcccgggttcaagcgattctcctgcctcagcctcccgagtagctgggattacaggtgcatgccaccacgcccagctaatttttatatttttagtagagacggggtttcgccatgttggccagtctggtctcaaactcctgacctcaagtgatccacctgcctcggcctcccgaagtgctggcattacaggtgtgagccaccacgcccagtcagtgattcttttttgtgtgtgtgtgatggagtctgtcgcccaggctggagtgcagtcgtgcgatcttgactcactgcaagctccacctcccaggttcacgccattctcctgcctcagcctcccgagtagctgggactacaggcggccgccaccacgcctggctaatttctttttgtatttttagtagagatggggtgtcaccatattagccaggatggtctcgatctcctgacctcgtgatccacccgcctcggcctcccaaagtgctgggattacaggcgtgagccaccgcgcccggcccagtcagtgattctttataattgcatagcaatgtacccagagagcactttcccgtgcattatctcagttcaatttgagcttcaccatggccttgtggggttgctgtagtcagtgctgtgaacccatcacatggagatgcacgtggagggggctcagtgacctgctcggggagtgtgtgcatgaaggccatgtccatgctggacttcaagccccatgggcatgagcttccttttgcacctgccaacctctggtgcttgagtagcgaatggagctttatcaggacagaaagccctccctcccccgctcccctgccacctgccccagagctcaggagtaaacaggtatcaaacagatggccctgaaaacagaatgaacatgtctctgtgtggctgcagcttggtgctcgtgtctgggcctcgagcagcctctcttagagggggtggtgctttctgttgcagtgactctcagccatggcggcccatgacagtcaccaggaagctttacaaactcacctacgcaggggccccaccccaggccaattagcttgctctccagagggcagggccagacctggttgtactaaaatctccccaggtgattctgacgaccagacagggctgagaaccaccatcaggtcctctgggctgtaccctggatcatccctaactcattcaaaatgttttctccaagttttgccacttacagaaagatgaaggattcccgtgggggtgtgagaatgaatatgctctgaggttgttgggtggaagttgccacctcagagaatgggggcacctgcatccctctgatgcctctggaagggcacagctccacgagtgggacaggccacaagcactggcagggatcaggtagccatcctccctggcgcgcgcctcttgctggaggcccagctggggtaacaccctctcccctgtgcacaggtgcttggtatttctacccctatgggctgcagacattccaccctgctttggtttcctggtgggcagcgaaggacagcaggaggccggatgagggctgggaagccagagactcatcgccacatttccaggtgagtctctgagggtggtagctcccaagagcttagcaataattaggtgacggtgaaagtggtgggtgcgccctcagcctgcctcacaccgtacacacaaagctgaggcgtactgttagttgccatcttacaaggcacagaaaacagaaagaaaaggaatccaacaaattatcttgtctgctttgttccttttcaatgctgtttcacaaatatttactgggcaccttctatgactaggataatatcccagtcagttacctcttaccaaagataatccacccctaaaagcagtggctcaaaactacaatggttgattagttcatgagtctgtgggttgtctgggtggtctttctggtctgagaaaagagaagcaatcttggctgggctcgtacttgcctgtgtggatctgtctgtctgcagttggctgggggggtcagctgggggccagctggtcaaggcccttgcctaggacagctgtactccatgtgcactttgctcacccggcaggctagccccagctgtttctcatcgcacccaggcagggtttcaagagagaaccaaggcaaccagacctttgaggccttgatccagaaccagcacaccgtcactcccgccacattctgttggctaccgcaaatctcagagccaaatccagattcaaggagagggaaatagacttcacctctcagcaagagagcccacaaggtcacatgacagaggtgcggctgcagggaggagtgagggatggtggccatttttataatctgccagagtctaaagatgaatcaggcccaggctgtgccctcaaggagcctgcagtcagcataaccagaaagcaatgtgagcacaggtactgatactgacaatttaaacctctaagccaagcctggtggctcacatctgtaatctcggcactttgggaggccaaggtgggaggatcacttaaggccaggagttcgagactagcctaggcaacacagtgaggccctgtctttatttttaataaaactcttcattttctaattatggttatttgacctgcacttgcatctcactgaatttaacttggtattacatttttattattcatttaaaaattttttgagacagggtctcattctgttgtccaggctgcagtgcagtagtataatcataactcattgtaaccttgaactcctgggctcaagcgatcctcctgcatcagcctgtgaagtagctgggactacaggtgtacaccaccatgtctgtcaaatttttaaaaaaaatttttgtagagacagggtctcactatgttgccaggctggtcttgaactcctggcttcaagcaatcctcctgcctcagccttccaaagggctgggattacaggcatgagtcactgcacctggcatagtatcactttttttttttttttttttttttttgagacagagtcttgctaagtcacccatgctggaatgctgcgtcacccaggctggagtgcagtggcacgatctgggctcactgcagcctacacctcccgggttcaagcgattctcccgcctcagcgtcccgagtagctgggactacaggcgcgcaccaccatgccagctaatttttttatttttagtagagacagggtttcaccatgttggccaggatggtctctgtctcctgacctcatgatccgcccgccttggcctcccaaagtgctgggattacaggcgtgagccaccacgcccagccggcatcacatgtttaaccatctatttttgtatatattactttccagaccatggtctttccaattttattatatgtgctgccaaagtgagtaccagaccatgatcttattattttacaaaataatgacatgtcatctatgacttttccttttttcaccattaaagacattaaatacagttcaatttcagaaccatcttttttgtaaaaaagggtaagttaaaaaaatgaatatatcttgtattagcaacatttgcatgaagttaaaataaaaacagcttcctggtctgggagaggctgttggtgaggcaactggggtgatggggcagaggattttttgctggtttttgtgggctttttttttttttttttttttgagacggagtcttgctcttgttgcccagactaaagtgcaatggcacgatcttagctcactgcaacctctgcctcccaggttcaagcgattctcctgcctcagcctcctgtgtagctgggactacaggagcctgccaccatctccagctaatttttgtatatttagtagacacagggtttcgccatactggccaggctggtctcgaacttctgacctcaggtaatccacctgcgtcggcctcccaaagtgttgggattacaggcgtgagccaccacgtcccgcctgtttgtgtgctttttgagtcatgcaaatgtagcgcctatttaaaaaccagaatttctaaaactcagaacctctgctgctcagtagctccctggcctttatttgacagtttttatcacttctcttggcaatgattttgttgttaagccaacaacattctcaaattcatgacacactatcaaatgccaccctcagtccaaatgacatttattccattttctctgtgggacatccagctaaagaggaaaaagaacgtattttcaaattattctgtctcttagccatagttacctagggaaggagtgaaagccattgagagtccacagacagaactcgcagccctggctcccctgcccctgtaggaggcggggaaggagtgagcttcaggccaggagggtccacggccccctgcagccatcctgcagcttccagtcctcctcctggaccatccctgcactcagaccttctccccggcccaccttccttcctcctctgggatcagacttcggtactgtgtcctcagggaccttcctctgtggccggcacccagtgatccctggctcccagcacacccagctcagaggtcggcagcccctgcccacgagctccagccggccctgcatggccttatgctggaacgtctctggaatcttttccctttctttctgtgttggctgtgtcggggtggtctttgggaagcactatcatccaagggtccctcactccgtggctctctctctgcccttccaggctgagcagcgtgttatgtcccgggtacactctctggagcggcgtctggaagctcttgctgctgaattttcctccaactggcagaaggaggccatgcggctggaacgtctggagctgcggcaaggggctcctggccagggaggtggtggtggcctgagccacgaggacaccctggcgctgctggaggggctagtgagccgccgtgaagctgccctgaaggaggatttccgcagggaaactgctgctcgcatccaggtaggaggtggaatacctcagggtgggaggtgggtgacacccataggaaagcgtgaaggtgcccagcagcagagagaacaagtgtcatttgggatcagacagctctgccattttgcagttactccctttctctttttttcttttttttttttctttttgagacaatatctcactctgtcacccagcctggagtgcagtggcgtgatctcgactcactacaacctgtgcctcccaggttcaagcgattctcttgcctcactcagcctcccgagtagctggattacaggcgtgcaccaccacatccagctaattttgtatttttagtagagacagggttttaccaagttggccaggctggtctcgaactcctgacctctagtgatctgcctgccttggcctcccaaagtcctgggattacaggcgtgagccaccacgccaggcctcctcaccttctctaagcctcagtttcctgctctttgatggaggccatcgtgtctcccccacccccatagtgagctgtgcgagtagaaagccccagcatggtacctgacaccgcagaggtgtgcagtggagctgaagcgggagtcttgcgtggttcagagaaggctgagagccagggctctggaagcaaacagaccttgtttgaattccagttccgccacttcctagtcatgagggtccctataagcatggctctgtccaacctgtcctctcactcccgtctcacaggaagaactgtctgccctgagagcagagcatcagcaagactcagaagacctcttcaagaagatcgtccgggcctcccaggtcagcgggcttgcggcactcagggcctgtgactgggtcctgaccccatccaacatgttcacctcggacccctcggcccttccaaagggactgtttgggtgttgcatggggaggggagtgccctcctctgacttctctgtttgacccccgaccccttagttggagagctgtgcaggggctccctggggtgtgccagggcacagcggcctgtcatgctggtgtgcatgtgctgagtgtgggtgaacagatacctcagtgtgtcagacatggacgagactcatgagggctttgacaaggaggccagtttgatttttgctgcaggggtcaagagaccttgggcaggggtgtggttaagcaaagacgctaacagacagcagatcctactctggaacaccaatttctgagatgagtatttcttgtatttgtcccttcttcctacacaggagtccgaggctcgcatccagcagctgaagtcagagtggcaaaggtactgggcgccaccagctggcctcggcctgctcctccccagccccacccactctccaggcaggactggggagcagagccgcagagcagagagttctgatcatcttgccaagcagatggtagggggaggggttgaaacccagctcaggacccctgcccagggcctgtctttgaggtgccatggaggttagcaggggggtcctgagggcggggggcaggctgtgtgagaggaccgggattcatttatagacacagcatcctttcttacagcctcacataactgccttctcatgccccagatgtccatgcttgtggaggatgtgagaggctgaggcagagtacattctggactctgggcttagaaagggagcaggctcagaattagctccttgggacaggcaggggttctgcagccagaacccccaggagaggccttgccccttctcaggttcacaatgagtgctgggcacccgctctcctgacgggagcccactagggggtcctctttcatctttggtgtggccttacctcccaccaaagagatccgaggcttactcttctctctctgggaccagcatgacccaggagtccttccaggagagctctgtgaaggagctgaggcggctggaggaccagctggccggcctgcagcaggagctggcggctctggcactgaagcagagctcggtggcggaagaagtgggcctgctgccccagcagatccaggccgtgcgggacgacgtgagtgggaaccaccagggccctgctggtccctctcctcctcctttgagacgacgtgtcctggggcctgcaaagcagcaccccttgcccctgcagcctctgttatgcccaagagactgtggcgttggccttgacacatgtgggctctcactgacaggcgttcttcctgtttttgttagtgcccatggagtgttcataactctttcctccagtggcctccctcctaccctatccctgctatccagctaagcactagccctgtcatagcagctcctgctgtccctgcaagccccccagggtgacacccctttgggttcctataggtggaatctcagttcccggcctggatcagtcagttccttgcccgaggtggagggggccgcgtggggctccttcagagagaggagatgcaagctcagctgcgagagctggagagcaagatcctcacccatgtggcagagatgcagggcaagtcggccagggaagccgcggcctccctgagcctgacgctgcagaaagaaggtgtgattggagtgacagaggaggtgaggcccacatgcccctctccacacacccacccacagctctcctccctgggagccctggacagtcccacactgccagctccctggcaggttccaggatggaagtgccaagcaggaggctttgcatgctgtggggctggcatgggtgggtggcagtgtgcccacatctgcctgggcaccagcacagtgcaagcctagaaggggtcagcccatgggtccttggcccacggccacgaggtgacagggggacacgtctgctccctgctgcaaccgtctcctggtgcctgcattgcagcaggtgcaccacatcgtgaagcaggccctgcagcgctacagtgaggaccgcatcgggctggcagactacgccctggagtcaggaggtacgtgctctgctttcctcgctctgccttgtcctggaccccgcaatggccggtcccctggcatctaccaggttggtggtggggcagagcaagcaaagctcaggatcagcagaaatcacccaacctagtacccatgacaaaggcaagtggcaattcagggaagtcaggacgtaccgagtaccatcctgggccagggagaggctgacctttaaagctgctctgagcatctcggttagggttaaaggctaggcctggggcatctgccgtccaccttcagcgaggagacagccaatggcctgagcggggccctcctcccgtgcgggagcccaccctgccttcctctcctgtctcaggggccagcgtcatcagcacccgatgttctgagacctacgagaccaagacggccctcctcagcctcttcggcatccccctgtggtaccactcccagtcaccccgagtcatcctccaggtgggcacctggcaagcacagcagcgggggctctgagcacactgagggctggtcccatctggggtcagcaagagctggactcagggccctgtcctgacatgactttctgctcctccagccagatgtgcacccaggcaactgctgggccttccaggggccacaaggcttcgccgtggtccgcctctctgcccgcatccgccccacagccgttaccttagagcatgtgcccaaggccttgtcacccaacagcactatctccagtgcccccaaggacttcgccatctttgtgagtatctgtcctgtggtggggccagaggggctgcagggggatcctgtgggcctctctactgaggatcaagtcagggtcacccttggactggaagggaggggagtggatttggaagaggaggagctagggtgggagacagcacttcagtccctgttaccttaggctttggaggcagaaactgtggcacaagagagtgaagtgacttgtcataggccactctggtgcctgacctgctgggtgggaggagcagggattggagtggggaggggtgttctccctgctccagcccctccccacttccctccgctctctttgcaggggtttgacgaagacctgcagcaggaggggacactccttggcaagttcacttacgatcaggacggcgagcctattcagacgtttcactttcaggtacgggatgctgctgtgctagcagaagtggcgcagactccccatccaggcagcaggtgctccctgggcacttaccctgccaggcatggggttcagagagggaagccctgctctcctttcccacagctcaagatgtgatatccaaatggggtgtaacacgcatcctgcagacgtcagcacaggggaaggcaccttccagaagggcagcatgagggaagcttcctggaaaaggacaccaggaggtgggctttacacaagaggggttgggtggccaggaaaggaaggccgggagaggcgttcgaggagccgccgccagcacatgccagggcgcgggcattctaccatggccagctggagcctcaggcagtgcatgcggcttaaacttcagtgggcatccgatctcctaagtcagttagaaatgcagattcccagtctccaccccaggagagtctggttccttagggctgacaggacccaggagcctgcatttgaacaaaccattggcctaagccccacaccgggggagtcctggagtgaggaattgggttggcgggatagtgggaggtggacgagggacagtggcaggaagaggaggccacagagaggcaggaaataagccctcagggacctgggggaggcagtgctgtgcttcaggtgacaaagctatgtccatttgactaacatcactatatgactcgaaggggcgagcctgggcctgggagacccgtcaggaagtggttgagggaaagcagccagaacaggataggtgggggagaggggcgttgggagtgaggacaaagacgtagcagggagggtcgtgaatgtccagttggatggggtgggaggaagaagccactgcgatgggggctgatgtggagcagggggcaggtctggctgagtctgaggcacctatggaacagtccagtggagctgtcgggggagccagaaagaactgagttgtcatcagctctgaggaggtaactaggctgcaagagaggttgggatttctctttaggaaagtatagaggccagacgaggtggctcatgtctgtaattccagcactttgcaaggccaaggcgaggggattgcttgagcccaggagttcaagaccaggctggtgaacacagcgagatcccgactctacaaaaaatgttaaaaaatttagccgggtgtggtgacatgcacctgtggtcccagctactggggaggctaaggtgggaggatcccttgagcccagaaggttgaggcagtgaactgtgatcacaccattgtactccagcctgggtgacagagcaagaccctgtctccaaaaacaaaaaaagagggtagaggacagaacgatgtgccagagagaagggacaagccaggagtgtgctaggcctgtggcatctgcccaggtaagatatgctgctaacaccattcccaacactgtggctagacagaggcccgatgggcactggagaaaaagaatcaagtgtgccccacatcagcatctatgaagccctctatgaaggtggttctatctgttgatcacaataaaaaaacgattgtggatgaattcattccggtttcagatgaagtgtgctacaggtggccccttaacccactggctggaaacactgctcaggaggctaaagataggagcttttgaagcctggttctcttcagagccccagggaaggagcaggggagccatctggccctaggcgaggctgtctccccttcccaccttctctgtcagtgaggcctcacaggtctctgatgctcttaatccctttcttctctacccaggcccctacgatggccacgtaccaggtggtggagctgcggatcctgactaactggggccaccccgagtacacctgcatctaccgcttcagagtgcatggggagcccgcccactagccctgcttactggtgcctgctgccagccatctgggagtgggtgaacagcaccccgccgcttcccccacacgcttgctcggcgctctgacttctaggagcacaagagaggagcctgtggccccatgcagatgaaaaggacgggcagggtctcctgagcagcaggtggctcgaggcggttagcaggctccagcagctcccttcttccttccctctgtgcccgtggcgtctgcttcccatcctgggagtgtgtatatatgtagcatatcatgggggactgggaagttgggagaggtaggacctgactggtcttggctggggtcaggggctggtgcctgggagctgatgaagcaggtgccagggctgtgggaggggcaagctacggcctgggctaggtgagctgcctctgcccctgggcaaggaagcgaggccctctgggaggagggtgcttagctccagagcaggatgggacttccccaggcaggaagcacttgatggagagctgcccagctctcctacaaggttagtgccctccacctagggaagcatgaaccacagggtccctgagggccttcgacaaaagtgtgtatttgtcccggggagggtagcagtgggccatggggcttcttgtgccctaaaggggactggctgctgtgatcttctaaggggcccagggccaaccctgtaggcttcccctctgctggggacggtagttgcttttctctctcctgatgctaggttggggcccaccctgctccctgttcctgctagggcctgccagtgcccctgagcttgctttccacattctcccagggtatggagacctagacctgtctttggggccattagcatctggggttatagcaagaagagtggggagcatggaactcctgggctcttgtggggacgttcagggtatcggggtgcgaggtctgtctgcaccggcccccacatctaaccaggccctgatgtaggggtcgtccgctcaggctgcccccttgggctcttgcagctcttgttcaggtagtcgcccttctggtttgttctctgtggggcagttggtgggggctgggggaagaggctggcagaagttaccctggatagggaagggggaggaggggacttttagagccagcaggccccactgtattatgtatatatttttcaaggtctgtttttctaactgaaaagctaagggcttgattcctagccccgttctgtggggcactgggtgatactcagtttcttgttcctggccgtggagaggggcctggggcactggttccggctgtgtctggtggtctggctgcggggaaggggcaagaaggcgggcaggccttcactgcagcactgagcctcaaatccgctctggagcatgaggctggatgcagtggtggtgaggccgccccgctccatcccgaggcagccagggtttgttttgcgctctcctgtcacaaatgctgcactattggttcttaagttttttatctccagatcctaatttatgcctatgcaaaaaataaatgacgcccaagagctgtgggatgtggctttc

SEQ ID NO: 304 - DNA, 32744 bp, Homo sapiens
  source 1..32744: mol_type = other DNA
tttgtttggctgctgttttaatctttcatgcatttagcagtcatggatggtgccagcgaaggaacaggtgccagggcgttgtgactccacccagcgctgcttcccgggaccttccaattggacaggagctgggggaagagctggttcacagccctttgtgggggatgggactttgggaaccccaaacttctgctgggaccacaaggagaagagggcagcagagtcacagctgcaggtgagtaataaaggctcatctgcccctctgcctgggtccagaccatacgtgcacaaagctagcggccaggagcacaggctgcatgacacatggaggtggtctccttacttttcatgatgtgacgtcactgggccttgcatgctgaccagtaagtgaccgctgttgactctgaaaggcaaggaacccctgtgtggcggagatggtggcctgccctccgtgctggccctgccataaactctccttggcacaggtcatagcaggtttcaggtgcgtcgaattttacgaaatgatgataaaattgtgactagtccaggatgggtagcctggagagaaaggcaaccacgctattaaaaaaaaataagctaaaaattataaactgtggatggaaggaatctgggctttggagaagtgcctgggtttgtgtccaggtttgtcactgtgtgaccgtgactgcggggagcgaagtaatccacaccttccagctgagggttctgagggacaaattcaacctccttctttcaaagtcagccattgtcagcagagagggaggttctgccccttgggggatctttggcaatgtctggagacagtttgggttctgggcaggtagctggtggggcccgggttacagcttaacatcccacagtgcacgggacaggctcccttctccccagcaaagaatcaccgggcccccctgtgcactgtgctgaggttgggaagccctgcagtagagtgccaggtccttgagctggcctgtcttcgcctgcacttttattgggtaggactcaactgttactattgatgaggataaaatattttccactgaaatgccgagttttcaaggccagcaatggtgcagaaccttctggggatcttccgattggttctgttcagcagtcgtttaccaagggtctggtttgtccaaggctggggcaagtggccagtgagaagagcgtcccctgcccttgagctggtggagtgagagaaaatgcccagaaaggaggggtgcgggtggggcaggggagtgagagggaactcccagaaaggaagggtgcaggtggggcaggggggtggttacctgtctggagagggacagctgaagcctggagatggtgtggtggaagccagtcttcgagaaggaacaggacctgagtgcttcaggtgcaccggagtagggactaatccaggtggctttaattctttgtctattataaaaattggttttgggctgagcctagtgggctctggctcatgcctgtaatcccagcactttgggaggccgaggtgggctgatcacttgaggctaggagttcaagaccagcctggccaacatgacaaaaccctgtctccgctaaaaacaaacaaacaaaaaaaaaaacccacaaaaaataaaaattagctgggcatggtggcgcacacctgtaatcccagctactcgggagtctaaggcatgagaatcacttgaacctgggaggcggaggttgcattgagccgagatcaccccactgcactccagcctgggtaacagagtgagactctgcctcaaaaacaaaaaagaaaagtgtaggtgatataggatggttctgaagatgctcttagcctgacctgattctccgacctttctcacttgttctcaaatataactgccgtccgggcacagtggcttatgcctgtcatcccagcactttgggagactgaggcaggtggatcacctgaggtcaggagttcaagaccagcctggctaacatggtgaaaccctatctctactaaatataaaaaaattagctgggcgtggtgccaggcacctgtaatcccagctactagggaggctgaggcaagagaatcacttgaacccaggaggcggaggtttcagtaagctgagactgcaccattgtattccagcctaggcaacaagagggaaactcggtctcaaaaacaaaaaacattgcttctgtcccattctttcaggccaatgcactggtgtgagctgcatgtccccagaaaggccccccaattcagccgtcacctccccagggggccgtggtggggagggggctctctgcttaggacagggcccctcctttcctggtggccagtctctgggggaactgacattgcacggccacttgccctcagatgtgacagaactggcagaatctgagaatctcgagaaggaagggaccttctgaggtcacctctgttcatccttacccaggcaggaatccccggccaccgcagggacgggcatctctgttccttccgcaaggacagtgccctggggttgggcagctcagaattagtgaggttttccgtggaaacccactctttggggtttaaatttgatttaatacaccatcatcatcttcaccagggtgaggctttgccctggggcagggggtggggaatccctgtgtccaacacagtaggacctggagcattcattgggtcagtgagtagtgggagcctgctgtgtgccgctgaggcgttgggtgtgggggggtgggggtgtgctagggcacaggaaccaggagagagtggagtggcaggtggacaacacagtgaggccgatgaagaaatgcagctgggggcaggtctgggacgaagatggagcagagggctgcatctgggcatagaggcgggtaaggaggtctctgacaccagggaaatggggcaaaggccacatattcttccagtccccagcccctcggatttaggtggccatgtggctggtcctaacagccgggacatggtcacaccggacagcttttaggaaagactgtcaccttaaagtatgcaacacctttgtggatgtttggtgtgttttcgaaacatccacacagggttctgatgttctcgatggctttggaatgtagtgctagatttcctcccacaatctcattcttaaaatgtattgccaaggtgagcctgaaacactgtgccggaaagcagggaagcacagttgtccctggtatcctctgtggagtgaatccgggaccctggaggataccaaaatctgaagatgctcaagtccctgatatcaaactgcacagtatttgcatataacctacgcacatcctcctgcatactttaaaccagctctaaattacttatgatacctaatacaatgtaaatgctatgtaaatagttgttacactgtatcacttagggaataatgacggagaaaaattctgtatgtgtctggtacagatgcaattttttcttgatatttttaattcgtggttggttaaatccatgaatgtgcaaccaaggatatggagggccaactgtactcaaggaatgatggggacatgtcaaaaggacagaggcacaaacagcgtccacattttggatacttcaagcatctgaaggagcaatgtggagtataacacattggattttttttttttaattcgtgcacttagagtgatattaaactaggatgagagcaaaggcttttttttttcttttaacattttacttttatatagtttcaaacccgcagaaaagttgcaggaatactacaaagagttcctatgtgtattaatccattctcatgctgctaaaagagacatacccaagactgggtaattttaaaaggaaaaaggtttagtggactcaccgttccacatggctggagaggcctcacaatgatggtggaaggcgaaggaggagcaaaggcatatcttacatggcggcaggcaaaagagtgtgtttaggtgaactgtcctttataaaaccaaccagtctcatgagacttattcaccatcatgagaacagcatggaaaaacccgtccccatgattcagttacctcccaccaggtccctctcatgacacgtggggattatgggagctacaattcaagatgagatttgggtggggacatagccaaaccatatcactatgtttacctggagactcatgaatgttaacatttttactttatcctcttcactctctttctgtccctgcctatctgcctctctcgatataataataatgatatatatttctttagacgcacacatttacctggtgatatatatattttctgaatctttgagggtaagttgcatgcattatatcctcttcacctctaaatacatcagtgtagcttcctaaaagtgaagacattctcttccataatctcagtatgtgtcataatcaggaaataacattgatacaatggcattgtctaatctacaaaccttaattgtgtttttttccaattgtctcaatgatgtcctttatgccaaaataagaggcaggacaaggcattgaatgagttgtcccatctctccagcctcctgtagtctggagtggcccttcagtctttccttatgtttcatagccttgattctttggagaatccaagccagttatgttccagaatgtcttgcagcttggattgatctagtattttcctcgttattagatccaggttatgcgttttcggtagaagtgatgtgttcctctcagcgcatcattaccaggagacatgtcatgttgattgttttactttcttatgatgttaattttgattacttagcatgtgagcacacgtctgtggtcccagttacccaggaggatcacttaagcccaggagttcaaagccgcagtgagccgtgatcacaccactgcactccagtctgacagagtgcactgtttctatttttaaaaaatatatattacttagttaatatagtgtttatcaaatttgtacactaaaaaatgtaactcttctttgtaatcgatcaatatttatgaggaaagaattttcacttttggagttacctttccatcaggaataactagaagcctccacaaaacacaggaaacagttacttcagacattggacatgcctttgctcccccttcaccttccaccatgactgtgaggccttcccagccatggtggaactgtgagtccattaaactgtctttctttataaattacccagtcttgggtatgtctgttttagcagcatggaaatggactaatacacataggaactctttgtactttcctgcagcttttctgtgagtttgaaactatataaaagtaaaatgttaagaggcgagtcagatctgtgatccccaagaaaagggtggcaagtgaggtgagccctaccctggtcttggctttctgcctggacataattcctggactgtgctgtagtgagggggacccagacagagccaggtctcactgatttaaggagacaaagatcagagcttgcagagattacgcttattaaaaacagacatcaaaagaatatttctgccagaaaaattccaacacttcttaaagaaatgcaacaaaattcagcacgcgacgacataaaaatttaatgtctagcattcaataaaacattattataaagaagcaggaaactgtgacccacaatcgggagaaaaatcagtccacagaagcagaccaggaaatgacagaagtgatagattctacaggacaactgacctggatgtttaaaaaatgttagtgtcgtgaaagattgttctagattacagggctctaaagagacatgaaaaccaaatgcaatcacatgtgctgtgtgatgcctgaatggatcttggattaaaaaaaatacagctgtaatagacattttttgaagccttggtgaagtttgaatgtggatgagatattagaaaaccttctatcaatgctaattttcttaggtatcataatggtactgtgttatgcaggagaatgtttttaggagaaacattctgaagtatttagagatatccctaaagtgatgtgatccctgcaatttatttattttttattaatttttaaaaattttagttgtggttaaaaatacacgtaacataaaatgtactgtcttaactatttttaagtatacagttcagtagtgtttggcatatttgcacaggtatatttcacaccgtgtctctgaaaaaaaaaaaggctggaataattcccttctatccatgcctttctcttaattggggtttgggggtgcttggacttatctccatgttactcttccaattcttagagtccctctcttcccctaaacaatgctctacacacaagaggctttgtgagttgtggatttagtctgttgtaactccacaccatacaggattagatttcgcatctgattcttacatcagccctgcagccccaagagatgagagatagctttgagggctatcagagaactccctgtattctgcacataccttgagctgagaatgtaaagccctgggactgtccttttcttgctttaaactctttggtgtgatgataacaagctcaccccacagtccttagataacctgtgctcgtattgcgtatggaagccacaactctgccaaagccacaatttaataggtacttcgttctgagtgatgacaggtaattattttgccatcacaggctacgatctattagaactccattctctaacagttactaggtccccactgcctttaaatcaaccagaacaagtaaccaatcccagttcccatcctggaggtcgtgttgcctgcaattgtttctggtaacaaatccgaagttaattgggattcagttgccgatgattagagtctcttcagttgtttggaggagaaaggaatctaacataggaagctgtgtgattctcaagctgttggaaggctggaggcagcgcctccagcaaggactcttggaagaatactgcagagctggctcctgaaggaagctgccgagtcaggctggccctagaagcatgctttctgggttgaatgctttaggttcacctctgcagatccactccccaccattttctctcctcacatctatgggccgcagcaggggacttcttttctctggcttctggctggatgtgggcaggggaggccctggcaggagggaggagagtgaggcttggtcattgattcctccagctgtgcccttctgctggttcaccatgagctggctgtgtccctctaccaaaggccacagctcctatcccgaggcccctcttagagcttcagtgattctgttcctgggctctgccacccactccctccttcaccctctaggttttgaagaagtaacagctccccatgttgctagcctggggtgtagcactgtctcttctgggttcctttaaccctgccccagctgtccctttattaaacagtcttcagttagcacatgggaatataccgtctctttgctgctgggactgtgactgctgctacatctatgtggctgtgatccagagtcagaagccaccaccagaaccactgtgtccagagctgggctgagcctgctacacacgccccagcaaaataggtcctgcacggtggcttctctccccacctgttacaagccccagtctagcacgggcacttcagaatggcagggactgactcatgtgcctcagtgtcttcctctgtaatatgggggtgatgattgtacctacctcacaaggaagtttccagtaaaatgaaagcccttaaaattatgtttgtttcatcaccaatgactccataaatattagcaacaataccagtactaagttttgtcattttttattaacttcttgtaaacgaccctactttcctgctctcacacactccttacacctgcatcccacctgatttagccactttctgcctaacctgtcagaaagggtagatagcttcccagtcacctgttgctagggaaactcaccatttcagcccggatggtgaagattccagcttgagagaccagctcgggtctgaagtgtttctctatctactgtgctgagatctctccttctcgaaccctgctatgcctttgcatacgctgttttctccacctgccacgttctcaccccttcttcttccactgcaaactcctatgcagccgtcaaggccccattctcctctggaaagccttcccgatccccttggcaacaaccaccaccaatatttattcactgagcccactttgtgccaagcattgttctagacacgggtatgtaaccgcgattgagagagacagaccacgcacagcctggattttattttaagagctattgggtgccgttggtgggtttgagtgagtggggtcaggaagtgactcactcctccgagggcttgtgggagcctcagctcaggggcgggcagggggcgtggggaagtctgcagccgagagtccaggtaggagtctcctgcgtggtcccgggagaggaaggggcctggcccggggcggggtgtggaggtgggaggacggcggtgcgggatggagggtggaggccaggctgacagggtgctggtggtgggttgcgggggtcgaccccaggctctggcctatgtagctgccattttggaggtgaacagcctgcggggaaactggcatggtttggggaaggcggggagagggggagaaatgaaagcattgagtttaagtggcctgcagaaccccgggggcccaggcggcacggcgggcgctggggctccgggcagagctttctggaggtttgtggcagcttcactttcacggcatccacccccctcgggccctgccgcagagaggaggaagctcctgccggctgagcgggcctggaggaagtgagcagcggggctcctgcctcccggcctggtccccgaagaccccagaagaacccggaacttgcttccattcggaatccagggaccaccctttgcactcagtaggcctttgttttcctgcgtggaaagcggttgggtgagttctggcatcggggccaccatacttgagtgttgggggtcacggagggaggggcccagacaccacctgggaaggatcccagagtgcagtcccagcccaggccacccggggaagggagtcggtaaagtgggaccttgagtccccacggcccctccggctgcccctgctcagaggctgctcggcgtcctccctccctgttctactgaggagttgccgcctctgaacttcagccaacccctccgtctccaggtgaagaaactgaggccctggggccaggaaggggcttgcccaggctgctgatccctttgggcagcatcgagtccaggccctccttgtaaccatgcatcaggaccagagagggcagggggtttgcccaacgtcacacagcctgagtgaggaggagctggcctgggacccaggcttcctgacgcccaggccaggctctttcgttttctctggccatggccctcagcttggatattaaggggctgggagtcagttgtgtccccaccacctccatgctacagggcaggatggagtctggcatcccccgccccaggctggctgctggtgtgacatgggtggctccagtcgagtgaatgcctccgtctcccacagctcagggggctccctgctctggccaccaacttctgccatgtgactcccctacctcaatgtctgattgagtttgaaaacactgagaagacccaggggctgaaaagggaggaagagggaggccagaaggcgccagccgagccagcgaagccttcacaggagaggaagtgggccaggggaacaggaaggagggctgggctggcctctgggtctgcccctgtcccgggcatgtggtgagcccagccttctgcctgtaatgaggaggaggaagatgaacagtgcctctgtcaaccctggcccttccggtttatgggatgggagatgtcaccattccacgtatccacctcagccagccccacacaggccgaccggggaggtttcccttgagctcaacctgacaagctctgaggagtgagctgtacctactttgtcctgtctgggatagggtggggggtccctgggtagggggctgggggctgcaggagcacggtgggcggccgctctgcacctgcctgaggaaggaccacttcctccgccaagcctttgcttggctgtgcccgccctcagcttctgtgcctttttctaacccgtcaccccgcaagggttggctcaagggctctttctcacagggcccgtaccccctgcctaggctggcatgctgacgtgtccccagaacctggcttctaccctccttctgtgcctccaggtctagagaaaatgaggggctcagtgagtttggggcttctcagaccgtgacgccctctcctgcctcctctgtgcaggcttgggaggcgatggagccggagttcttgtacgacctgctgcagctccccaagggggtggagcccccagcggaggaggagctctcaaaaggtgtgtgcccacgcaggtctgagggtggagggtgaaggtctgtgtggcaagagtgagcctggccatgcctgggacttgcagcaccttcccagctgtcagctgagcgcccaattctgctcacccctgcctccaccttctgctttatgcttgacctaactcctcctcctgggaccttctacagagctagaacctcttctctccagatgagagacggtgtggattacgatggtgaatactgattgctctcatcctgtgagccttctgagtgcccctactgcaccagcacctcttaccaatagcaactcatttattctcaagggcgggcatcagtgcctgctttatacagatgaggaaactgaggcacaaggggtgacgtgccacagtaacaggaaactcttagcaagtggtggacctgggttctgagcccaaggagggtggtcccagaactgaggttccacacggaccacgcagcgatgcccaccatggagtgatactttgcagggtgtggggctcctgacgtgctcccctcacacgtgtgggtccctttcaaaagtggggtgagcataggatggagcaattcaacgactataggtcgccctttcagtaaagctctgtgtcatgagccctttggggggttggcggccacagttcctgcaacctcccttctaggagatggctcaaaagaaggacatgggcaggtacccagagctgtcaccctctctgtgttctctgaaagaaacaaatgaacaacagcttgcaaggaagcagcgagatgtcccagtggggaagggctttaggtgaactcattggaatttatgtaaccacaaaaacataaatgtgctgacaaagaaaatgtgtgaaataatttaagggaagggagcagaatgcggctttctccagctcctgtgaataccgccttttaatgtttatttatttatttttttcttgagacaaaaatctcactgtgtcacccaggctggagtgcagtgccaggatctcggctcactgcagcctctgcctcccaggtttaagagattctcctgcctcagcctcccaagtagctgggcttataggcacctgccaccacacctggctaatttttgtatttttagtagtgacggggtttcaccatgttggccagctcggcctcaaactcctgacctcaagtgatccacccgcctcggcctcccaaaagtgctgggattacaggcgtgagccactgcacccagccctgaatgccgccttttaagtaggtgttatggagcgagaactccagtgccaacagggtccctggcacggcagatgagaccccagaagggacaagcttggtccagagtcacctggctgtctttgtcaccatctggtattctgtgtttaaaacattgaagattagaaagtgtcctgaggaaagttgctgagttagaatagtaggacttagttactaccaaacaaaacaaacaaaaaaacccattaattttttgttttacaactgatttaaattactaaaagttctggcaagcagagctgggacattggatgattcaagcggcaagaagtctgctccaggaaggagcagcaccatatccattcactcattccttcattccttcctttcttcattcattcattcgcctgctcacccgcccaagtgtttgctgagagcctgccctgtgctgggcacaacagcccatgacgctgttgccttccctttcatcagaagacatgggtctgggtagtacttgaaggttttcagaatacctaggaaaagcctttattggggtcacatgagagatgatgcattttgtgaatttaggcaagacagtcgccactgctgactcagtatccccccatgtaccttggaactagttgatctcagaggtccttcttggccctgacattttgtgggttctgtgagtctaaaatgtgggcagatgctggccatggccttggggaaggggagctgctgggcctctgagggccaccccggggagtctgactacgagaggggccatggaggggcctggcagacctggggtaagtcccaccttagccccttagagcctggtgagcctgggcacctcctcccctctctggctggggtttcactttacctaaataggtagggttgccagatatatcaaacataggatacccagttaactttgaatgtcaagtaatcaagaaataacttccgagtttatgtctcaaagtataaatgctgcagtgtctgaggatgagctggtgttcgtgagggaaatgagggaaagcacgctggggcggaagtggcaggaccggtgcccctgggtctgcggtgctgaaatctgtgggtgacctgcagggagtgtggccaagcgccccacagggtccccatgcgcttgtcatacccactctgcttccaggaggaaagaagaaatacctgccacccacttcccggaaggaccccaaatttgaagaactgcagaaggtacagcagcctccacagccctgacttccctgggtgcctcttggcagaccaggcagcggcctccacggggcggggacagcaggctgtccccactccttggcctcaggctggggggtggcgacccccgaagacccctggaaggcctgttgaatggagcaagtcacccacagagcctgcatgaacaaacatctattgagcaccaactgtgtgccttcacatacaccatcccagcaaccccatgggatttgaggggaatctattatcccttacatcccggggacaggacagacagcaaggcttagacaggtgacctcatctgtcaggggcacgcagctgcccgtaacggagctgtggtttgacacgagctgccagcccctaagcccgtgctcctccccagcttgtctgcccaaggtgtaggagaactggtgaggtggtggtggtgggcctgggtcacccattcttagttctctccttggtcatgggtctgctgctatggccactggaccagctcggcacaggtgggctccaggcctctgtttccctcagcgtctgtgtctccagtctccacatggcctctctgttgcctcctccagggaggcctcctggcctacaccatcttccatacccagaggctttgtgggccatttcccatcctccttcctattccctcactccatccatccacctttcccacctttgaccagcacacctggcccagccctgtgactggcactggggacaccatctgtggtcttgcccggaagacctggtgaggtgctgacatgtcgtctcagctcggtctcctccacaggctgatccagagacaaggatttggatgccagtagttgagttgggaggttatcccaggggtcatgggagggaaggggccaacacatggttagtgatggagctggtcatggttctgggggctcaagcctgctgggtaccctggagccagcatagagcaagttcagtgcattcctgcccaaggggcgatggagctggggtatttatacaccaccacccctgccccgacaacctcctgacaacctttagtgaacagctgctccctgagaaagggctgggccttgattccctggcactctgaccttttgagcacagcagagtggggacagtttcgagcagagctgcaggtgggagctgggccagtaggcaacagtcaaggagtgggcagggtaccagcagcccccgcattagcttcctagggctactgtaacatgtgaccacagactgaatggcttaaaccacagaaacctactgtcttacagtgctgcaggccagaggccctcaaccaaggggtcggcaggcttggctccttctggaggctctcaggggacccctgtcttctccctttcccccagctgtgatggctgcagcatcctggtctcccagatctgtggatgcatcactgcagtccccacctccatcttcacgtccaatgtcatgtccctcatttcctcctaggacctcagaaggggcacctttaacatccatatttctactgaccacctcttcagggcaatctaggctttttctatcaagtgctcattgtccaattctttccattccccaagccatttccccatttttgggtatttgctatggtagtaccccacttcctggtactaaaacctcacacatgataatgacagccccacactgctcaggtttgtgatggagagaagcagggagtctgcaggaacctggggcaggcccctaacagcctgggagatcaaggagggcttcccagtggaggtgacatttgaccaggccttgaaagatgggtaggagttggcaggcgagaggcaggcattctgagccaggtggagggccaggtgagaagtctccatccccccaaaagttgtccccttggagcctgcaggtgttgatggagtggatcaatgccactcttctccccgagcacattgtggtccgcagcctggaggaggacatgttcgacgggctcatcctacaccacctattccgtaagtggctgtttctggggctgcctgggcctcggccccatccccctgacctggcccctccagggcccacaggtaggctctctccttcagtccccacaatggtcccgggtttagggacacctgtctcactttctagatgggcctgggctggggagatggaggcgctgtccacagcccatgagtgagggggccgagctggggctcagggtggggctctgacgccagggttggtgctctttctaccacaccacactgcctctctaacacttattgagtgcctgctgttttgaggtgctgggaggtaacaaaagaacccatgatccctgccctcgggctgccctaggctgctagagagaaaacgggcagtcctgggtggctgggggcagggctgggctcctgtctccgtgttcctcctcagtctggaaagctccaaggggctttgcaggggatgtgcattctcagggcctcctcctggtcccgggcaagtgttccccacaagccccagagtcaccctctcctttgtccttgtatggtcatgtctggtctacgcatctcttctgcacacaactgtggtctcggaggccacagataggcccaattccatgtcctcagcacttcgcctgaggccagcctctgcagtgttcgccgagctctttggagatgggctgcacaatcccactcatgcggctagcacttccgggcatgtcccatgtagcaggtgcagttcatcctcagaatagccctgtgctgttactgtccccatttcacagatgaggaaagggagcctctgagaggcctcataatttctccaaggtcttatggttagggaagcaggggggtcaggatagaagcctaggagtgtaggctttaaccactaggccacactgccctgcagagatgaagtggacacagctgtgcagaagggcaggggctgcaggcacaggctgatcaaggtgaggtgggctctctcaaccagctcagggggctgaggcttgctcacatcatgtggcctgcatggcccaccaatcctgttctgtgtagatgagggtctcctggaagctggagggcatacccgattgaggctgtgagtgtggcccacggtccaacaccaagaatgggctctccagacccatgttccctgaagcaccaggcaggctcagcctcctggagggtccctgaggtgctctctggtctgtccccggccaggggtcctcaccaccctctcctgcctccagagaggctggcggcgctcaagctggaagcagaggacatcgccctgacagccacaagccagaagcacaagctcacagtggtgctggaggccgtgaaccggagtctgcagctggaggagtggcaggccaagtggagcgtggagagtacgtgggccacaacctggctacccctggggagtgtggggccgctggggtccttctgcttcaggcttctcacccaccaggaaggcgcactcatccttctcccagcaggggtacaacctgggagtcaggaaggaggtagaagcctcaggcagccacagtcaggcatctggctgagcagccaacagcccagcacacatctgtgccctagagggtgttactgctgcaaagtgcagcccaaggatagcaaacagtctctgtttgctatctgaatgacagccactgttgagttccaagtaccgtggtccgcccatccacactctcatttcattaaagtattggaatatctgcagggcctgcttatacaaaaaatgagtgtgcctggtcgggtgtggtgtctcacacctgtaatcccagcactttgggaggccgaggcgggtggatcacctgaggtcaggagtttgagaccagcctggtcaacatggtgaaaccccatctctactaaaaatacaaaaattagctgggcgtggtggccggtgcctgtaatcccagctactcaggaggctgaggcaggagaatcgcttgaacctgggaggcagaggttgcagtgagcccagattgcaccacttcactccagtctgggctacaagagtgagactccttatcaaagaaacacaaaaaccaagagagcgtgccaaacacctagacttccccaccccacctggttcacagtttggtatagatttccttcccttcaattctccatatccccccaccccacccagatgagaaaactgaggctgaaagaaattatgcagcttctccaaggttgggcggtgaggatttaacagagtccgttttcaaacccaggttttgttgggtcccatgcgcctgcattcgcagcctgtaaggtctcacaatcagtaattgatgttgatgaaatcaaccctgaattaagtcacatgcagctgaaatctaatgatcgttcagccagtgccttcccagaggtcacttggttgtttccgattgtaaacagtgctgcagtaaacatctttgtgtctagagccccttccacaaggtagatcatacccctgggctatattctaagaagtgagatgatggggtgaagtgtgatgatttttaggttctgaacacgtatctccagatctctgctctccagaaggctggacacagacctccttggtctgcagatggttgttctgacagtgaggaagcctccatttggctgcacgttttggcggcctcctgggctctgacctgtctccactctcttcccaggcatcttcaacaaggacctgttgtctaccctgcacctccttgtggccctggccaagcgcttccagcccgacctctccctcccaaccaacgtccaggtggaggtcatcactatcgaggtagcagcctgggccccagggatttgtaagcagaagctgagcctcttgggcccccattgccgtaccctgcatgggtggagctggctggggcggggctgacccagggtgagtttcagggaaccctgagaaatagaatccagccaggatggccagggggtgctgtctggagctggggacgggctggtaagggtctagtggggctggcggaggcctgggggcatgaggaggtccacggctggccagctccacttgacctcagcagagggcatctggctggcagaggctgaggccaggggctgtcaggccatatccctgagccatgcgtggccgtccgttcattgccacggggagccttcacgccctgagcaaaaccaatgctctcaccatgagggtactgtctcctgtgagattaccgatggctgtgacagtgccctgttctctttctaggaaccttgccgggtttccccaccctcagatgttctgtctagcatgcggcctgcctgtgctgcggttaatacccaggaatccacgacttccctctccagacagactctgagcatcacaatagggggccccaccagctctttgcttctcatgaccgcccccaccccaccccagcctcgggtccctcatgcataggggctttgtgtgtgagggcttgcctctgactcgccccaagagaataagccaagtttggccacacccagtcagagtcatttctatttttttttttttttttttttttttttgagatggcgtcttgctctattgctcaggctggaatgcagtggtacaatcttggctcactgcaacttctgcctctccagctcaagtgatcctcccacctcagcctcccaagtagctgggactacagatttgagacactgtgcctggctaattttttgtatttttggcagagatggggtttcaccgtgttgcccaggctggtcttgaactcctgagctcaagccatccacctgtcttagtctcctaaagtgctgggattacaggcgtgagccaccacacccggctttctactgttttttaaaaccattgattataattccctaccaagcagttgtgtggcttggtctatactgccaacataaatcagaagtgacttcattgattcactccttcaccattcatttgttcatagtcacatgctcattgatactgccctcctcccactgtgagactctggggatgccttggggagtgaggcagacacatccccaacctcaagactcctggggaagaaagacaattaagccagaggctgtcctgaggagggatgatacagagcaaacggatcactggggcttctttgggccccagagttttctggattatttaatttcttccccctttatttttcttagagcaccaaaagtggtctgaagtcagagaagttggtggaacagctcactgaatacaggtgagggaaggatgagggcccatgggtggggctggggctcacagcggtggatgggggcagggtgggggccagggcagatctgcctgacctttgtgggaagggccctcacattctgtggctttctctcagacccgaaaatgctgcgctgacctctcaatcccacggcagcacacaggacccctttctagcctccaaccaggtccctgcctggcccctcccagccaccctgctttgttttctagggtgggggcccctgggtttggggtacagggcccagtgaatctgtctctctagtgtgagcaggatgttcctctttccttgcaaagctgtaagagttagaggcccctgcatggccaggggctggccgtcttgctgcctgcccactttagggtgtgactgtcttgttccccgcccactttgggggtgtggctgtcttactccccacccactggggggtgtggccatcctgctccctgcccactggggcatggccatcctgttccctgccctctggggagtggccatcctacctcctgcccactgggcatggccacctgctccccacctactggggttgaccatcctgctccctgcccactggggctggccatactgctccctgcccaccgggggtgtggccatcctgctccctgcccactggggctggccatactgttccccacccactagggctggccatcttgctccccgcccactgggagcatggctgtcctgctccccatggagcagaacaggtggggcctggagagggatgggcccaggggctgcacaggctgccaacaggtccaccgttgctggcttctgtgtggcgctaactcacgatctctcacagggatgcagccaagatgctggccaggtggggctgccatcctctgaaggcttggctggggctggagctgtgtggacagcacatggtgtctgtctctcctggcagccttggcctctgtgctgagcccaggtctctgtcacaggctgctgggctctgccccgtgggccccagctttcttctggagggctgtggttagagagacttggcctgccctggacctacagaacttctcttctatggggtagaggtggatctaaaaacgtgaccaaaaaaaaaagaagaagaaaaattgttcaaaaacaataaaaatggagtgaaagaagccagacccaaaagaggacacgcagtatggtttcatttccatgaacttccaggacaggcaaaaccaacagatggcaagagaaatcgcagctgtggtcagcgtagggagggagaggatggaagggagaacacggggggtgctgggaggttctgcagcatgtaagtgggggtgatcacacaggtgtgtatgtgtaaaacgcacaagctgtgagcttacgatttgtgcactttatgatgtgtgtgatgtatctccctcagaacagaacacgaacaacaaaaccagcaaagtccaaatgtttctaggtgtggaagcctcagggaagggcatgaacctgtttctgccctttgcttcccacaaagaccttctctgctatctgccctacctacaaagctgccaggaaaaccacaagcatgccagtttctttgcaaccttgccagcactgaggcttgtcatattgagaaattgtaggtttgcggggtgttttttttttaaccatttgtttgctttttccacccactgcacagcacagacaaggacgagcctccaagtgagtactttcatcatttttggaaatctgttcctatctgatgcgtgttaatgcagacaagtcttaatgcagggttaattgctgagcattctctcatttccctgtcacttgctgtttgtatctcaagcctcattcttattcatttgtccctctttctgtctgtccatccatggagctggctgctccttctcatgatactgttcctgtggggagagagatttataattcacatgggcagtgatggtggagtctgttaaatgtgtgggctctggagtcagtggcctgggttcaaacaccagtgttcccactcattagccacttaagtttgggcaagtatcttaacttgtccgtgcctcagtttcctcatctataaaagggcactcaccttttaaactggcagtgagggttaaaggagataatgtatgagtgtgttcagcatgtgggcagtgctcaatagtgagtgggcaataatgtggcttctgctcttctgacagagctgttcaccaatcagttgattgttctagttgttacttctttcatgcatccattcctttgtcactggtctggccagctcttccccttcccatccattaatctatttatccatctattgatccatcctttcttccattcatctatctacttacccacttatccacccacccacctatccatccatccattcatacacccatgcatccatcaacccattcttccattcatctatccacccacccatccatttatccatccctccatccatccattcatgcctccattcatccatccacctacccatccatcacctgtccatccatccatccacctatccatccatcaacctatccatccatccatccatccatccacccacccacctatccacgcattcatccatccatccatccctccatccatccattcatgcttccattcatccatccgcctacccatccatcatctatccatccatccatccatacacccacctatccatatattcatccatccatccatccatctatccatccatccacccacacacctatccatccatccattcatctatccacctacccacctattcatccacccattcatctatctacccatccaaccacctatgtattcacccatatccatccatcctaacactatttttcctccctataccctccccacttagacacatagctatgtgggcagggatgctatgaggggcaccttccctgcagaggtagagataataacctgccaggagcttctgagaatgggggctgaggaaggcggagtttggggagaaaggagaaaggaggggcaaggagggctggctgaggatctgtgtatgtagcaggaggggcagcctgaggacatgaggggttgcccagggagcagtattttgggcagggggcagcatgagaagtgggtgtcagagggtgaagaaaggacacagagcaggggcattttaacgtgcatgatgctatttggtgctacttttcccccttcactaacaagggaactgaaacagagagaggtgctgtgacttgcttagagtcacacagctgctgagtggcagaagccacagcaaactcaggccagtctgtgtatttggtgcccaaggaccagtgtccccatgggaggtatgttagctgcaaatagcaggaatccagctagtgcacaaagggcattagcctgaggacatgggcacccgaggctggaccccagggcctgagccgctgttcccagaccccaagggagtgactgagttgctgaagagctggccttttgcaggcagcaggttcagacactcttgggggcggggggaggcagcagggagcagtcctcactcagccaatttaaaaccaaggggaggagactcatggaccctgatcacccacctgtggcagctcccgtggccctggggagtggagtagggccctgggaggagggagtgccagctggcagataaagggatgcagctgtgcagatgtagtaacaggtgtcagctgcaggaagagtggctgtttatgaagtcctactgtgtgcccagtcactgtgccatggggccatgtgtgttatctgctatggaattccatctctgcaacaaccccagctagggaggcacagagagagacggtgactcccctggggccacacggccaggagagcagtgactcaaatccaggtctgttttatttgagaaccatgatgtaaaacgacagctccctctggactggttattctaagaaacttttgtgaaaaaaaaaattccctgtttggcacaaagataatagcatcgtaatgaggtgtttattggatctgtgtctgcagaggacgtctttgatgaattatttaagctggctccggagaaagtgaacgcagtgaaagaggtaggagagatcaaagctctcagcggctctcaggctgcccaccccacccactgcccacctgcgctgtaggagggaatcacgggtcctcccatcacacctgctgtgtgctaggcccttgttcttccctggttaggccatcgtgaactttgtcaaccagaagctggaccgcctgggcctgtctgtgcagaatctggacacccaggtagggactgagctgcggcgtccccaggcagggcagggccactggccgtaggaaggaaagagggttctgcaggccctgggaacctgctgtgtggtgggggttgcatcacctcttggagccttagggtccccctccccggtgggactgttgctggcaggcagcagtggtcaccagggacatggtgggatcccgggggtggaggtgtgggaacacttcacaaagctggagtcacctcggctgtcactgcttctcattgttataattttattttataattaatctcagactagctgatgccaagacttgaagcatatgagtcttccctgcgtggttgtgttcgcccaaacagaatttattagatttgtcccatgtgccaggcgtaggtgacagcgcagcccagccgtctgcaggctccatgtctctcacaagcaccctgaggagcccagcccctcccccggctgacttaagtcgaattttcccaggagcaggagcagaatctcagggggtcagcacccaccatgggctgtggctttccacagtgaagctgtgtccctgtaggcttcccacactgcaggggagcagggggtgcacagtagcagaccggctgccagcccggggcctgcagagtgggcatggagtctgctggatgccagtggcctgaatgggacatgacgtaggcatctggccacctgggttctgctgggtgctggggtctggggtggggagggagtctggtcccagatggaccagttggctcatgaagatcgtagccagagctgctgacctctcagagagactctggatgggcattggctggggagggaggggttaatgtactcccatgcctagtagctaaaaccaataaagccctcactatgtgccagtcccagggcaaaatgctttccatgttaactcattgaatcctctccataatcctctgaagtgggaactgtactaccccacttacagaggaggatgttaaggcacagagaggttaattaacttgtctaaagtcacacagtgataagtagtggacctgggatttgaacccaggcagctggggccagagttagtgcttataaccacctcacatggtggccacgtgagaagtttgtgtgtgatatggtgtggcagcatggcagggtggaagtatcacgctctgtagccagacagacacacatttccctcctgcctccaccacttatgggccctggggtctgctgagaaccctccacatttgctgtgtgaccttgggtgagttactggacttctctgaacctcaggctcttcttcttataaagtgggtacaagatagcaacttggtagaattgtgagtgatacatgagctggtgagccccacgtgtttggtatattacctggcacgctgccggcatgaaataagtgagagatttgtagttttattatattttatgtgggtataaacaggatgatttctgagatttacattctacctgttctatctgtatctctcccttggtaaaataatgggtttcagagactcatggcatgtgcaaaggtggtatttagagactgttcaataaaatggggtaaggaagtcccttgcatttcagttgtattaccaaggaatagcagcagaaaagatttcaggcccaaactaataacatcgaagcagacttaatatgaggaaattccattaagggcttcgaatggcagttccttccaatatcccatcctgtgttttgtatctttgaagagtctcaataggattatattaacatatgatatgctggtggcagggacgacagctttatctctgaacatacagacagaacagacagaaatattaatgtggcagccagcgagatgagcctggtgtgctgctctctgcctttctctgatggaataattttacacttaactctgttttcccctgtgtttctgtagcttgtggaagagcgtgctgtttaaaaactgatatgaggcttttctgcagtaagtttagaaagcactcttttcactgagcatgtactatataccaggcagcctgaaaccactttttacctgcaaccctgtgaggtcaggcatgtcttccccacttctcatcaaggcaccagaggctcagagaagttgtatgacttccttagggccacacagcctgtaaaagacagagtgggcttcgccaggcttcttccatgtgattgtctccagttccttcctttgtagtttgcagatggggtcatcttactcttgctgattggacaacttgaaggcttcttcctgcacttaaaggaattctacctcactcccaactctcctgcagaaatggtaagttttccaaggatttttctttatggtctacctctaggtgaacagatatacagaactggcatgaccagtctgtttattcacttccaggtgaagtgaagggtgtaggggaagcttatttgtctatatgtctgcctatccatccatccatccatccatccacctattcacctatccatccatctacccatccatccatctacccatccatccatccacccacccatccatccatccatccatccatccatccatccatccatccatcatctacctatctatccatccccatctacccattatctacctacctgaccgcctattagccctcctgttcacctaccaagccacccaccatctatgcacccatccatttaactgcctacctgtccatccacctaactgcctacctgtccatccacctacctgcctgtccatgcacctatcttcctgtctgtttattcatctacccagtccatccatccatccatccacccacctacctgcctgcctgtctacccacccataggaagtttatctatatgtctgtctgtccatccattcattcatccatccacttgcctaccggtccattcacctgcttgtcctgtcatgcatccatctgtttgtccttcaatccatcttcctgttctgtttattgatccacccaatttacccatacacttgcctgcccatccacccacctgctcatccacccatcccctacccacacgcctgttcccccattccctgagggcctgtttagtgccaggccctgaactgcatgggatgttaagttgatccaacatagctcttgctttcagggagctctcagtctgtgcccactgttctcctagtgacgtgtggtcttgcagggccacagtgaaacgtgttggttcagatgcctgggtcagaggaggggcctggaagaatgagggcttagaataatctcaaggagtcaggaagggcattgcatcagaggggagccgggaagttgatcagggattggtttgcagagttatcaaggaagggcttgcagaggggagggaatagcatcagcaaaggctcagaatgtggcaagaacaggaatgggtcagggaggtgtaggtgcttcactctggctagaggggctggaagggtggggcctgacctggggggatcagcagttcccacgtggaccctagaggctggtggactggctgggagctggctgcctgcttccaggcatgagggctgtggcttgacctggggaagagggatgaagagagtgatggaggtggggtgagagggcaggtgagcctgcaaagatgcagctcccaccgcctcttccccaggtacagccttcagtgcccgctggctagtcctgcctccgcccccgccaggcccctgtggtgtgtgccaccacttcctccagctccctgggctctcccatctctgggctttgccacaagctgttcccttcccaggagcacccttcctaccaggtaggcctggcccatgagaagggattttactactttccaaataaggaaagagaggtccacgggcagccaaggcttaccccgggtcactgccaggcaagaggcctgagtcttgtgctcttcgccaccagctccctgcctgcctggacctcaggttttctgtctctgaaaatgggctgacaatccctgccccctactcaggccacacaggtagtaagaaagagtttggagaaccatcgaggagaaagcattgagggacatgtggtccctagtatccccaggcttgcctctcacaggaggtgacattggaggcgtgcatcccaaaggacaggctggagtgttggtggctggtggcgtgcccaggatcccgggcagccagcttatctccatccatgccagggttcccgtggcctggggcaggaggacctctttatctctctgcagcagtagctttttctaaagaggtgaagcaggaggcagggccacatgccccgtcccagggccagcctctggggctgtttctgggagagacaaaggcttccatccctttcacatgctcagggcgtccttggccctggatcaggcctcttggcctatctggggcccagtagcaggtgaggtcccccctggacccctaccagactccccctccacctaggcccttcttctaggccgctccccttaaccttcctggacacccacccttgtgcctctcccctgcttcaagtggagcacccaactgccaagccccatctgcctccccgaccacgtcccctcctcccttcctgccgactcccagccacagccacagccacagccacatgacctctggcccccttccagctctccagggcctggtcctcccccattccctcacatccacgcaggctgtgctctcagcccagcctaccctggctttgcttcccacctgcttccctgggcgggcggccagctctgcccaccttctcagctcctctgcagtccctcggcgctctgtggggccctgtaccacagtccacactcccttggggttagctccctgcactttgcctctcctggccctctccccactcaccctccctccttgcccctgtgagagcggggcagggctgcatctccattttacagaggggagcccagggcccgagaggcttacccagtaccacccagctgctcaatggcagcctcacaccagcacagcctgccgcccgcagcctgccatgtccctcgcccccacggggatgcatcttgagtgggtgtggcctccaccttccctggaggccaggtgctctggacttggttcccaagagctgggatgttgggtcagagcaacgaggccggggcagtcagtgtctacggtcctggtggttgtggcaggcacggtgcctgctgcttcctaggttcttccattcggaggagctgcatcagccagccattgccacaaacgtgctgcttaacaaaccacccgaaaacctaggggctgaaaaccatgctcatttcttcccacagaccggcaggtcggctgagtttagctgctagaggctcagctaggctttgtcactcctccgaggactggatagggatcaggctgtcgtggctgggtggctcggctctgtgccacagcctgccatgttccttctgggaccagcagctggcccgggcacgctttcctcctggcaatggcagacacatgagagaccaggcagaaggcatgaggccctggctcagaatgggcaggctgccacttccatcgaagcaggccctgtggccttgacagtgacatgggacagccctgcaaagtgtgtgggtgcagaattgggccgatggtgggatctcccacgggcagtgtggacgaatgtgctagcaaatcctcatgttgggtcttggagttaggaactcttcccatccccacttccacagaggaaacagttgagagaggcacagaagtctggcccagagcacacagtgagttagggtcctccctgtttccctcctgtggagccaatgtgagtctctgggagatggaggggtggcagggctcagtggggttgaagccaaggctgagactggggtcagagcctgcctcgggaaggcaaggcactgaaatgtgagcggtgaggagagaaggcggaggaagggggcaggcaggaccacctgcgggctgagggcctggggctcggaacccagctcagagccactctggggtgcccctgggctgcagggcctctgctcaatctgttgcaccatccaagccccagttacaagacgggaacaaacgtgcagacttccatgttgctgtgtgcagccgctttgctgaatccactgattttagaacttacttctgaatatgagtcagattagatgtgggggaaaagcagcagcctcttagctcagactccaagaatgaatttttacagcatattgtgggcaatctctgctgcaggaatgtgtaatcaaaatgctgaagaggtcgtcagctgaggagggcgggaacaccagcccttgctgaaggtgggcctctgcggaattgttatcttggcagagtagcctcttgaaattggatttctcattatcagaccctctttgctgatggtgtttatgtgagatagttattcattgtgggcacggaagttaaggatggagggagagaggatcattcgctcccagaaataaaatccccggagccaggaatccttggcgtccttccacgttaaattactttccccaggaggatttgcacgtatcctcccgggttgtaaccttctctcagctccgtggaaggtggtagttttatcttcatctcaagccacacgcggaagaaaaatctctggacagagcatcatgagatagctctggagccagggtcagctcttactgggggatgatcttttgttcagattgagtgtcattgaggaagagtgtgacaaacagaagcagatgtcataattttcagtgtcgatagcaattcccaaagcataagctctatgagggcaggaggtctggtctgttttgagcactggttgtatggctagcacatagtagatgacaagtatttttttaaataagtgaatgaacgaagtgtttccaaaacattggtcccaggaggtgttctgtgacaaatgggttctatgaataaataacttggggaaacatgtctagtcttgaaggttcatgcggcccaccaacacattcaaggctctaataagtcctgcagtgaaggacttccatagtattttatttaatccaacaatttctaaaaacgtttggccacagatatcccctttcctgtccatcttagatcacagtttgggagatgctggctcgctgaatgtatcaaaggcggagctttgaggcaggagagcacagtgcggagtctggaacctcaggttcctcagggtcttgttctcactccgacatttactctccatgtaactgcaaataatattcgtgatgagaatgcgaacaatagcaacaattgcaaccctagtttcccagaatattccagtctaggaggaagaactggggacacagtgatgggaacttccggtgatgctctggtctgtccactcggagcttcccatccatcttggtctggacagtctcagagtttcaccccgcattggcccctgcagcatgctgcaacattggtgccgtgtgatagcctttgtttcgctcttgtcacccaggatggagtgcagtggtgcaatcttggctcactgcaacctccgcctcctgggttcaagcaattctcctgcctcagcctcccaagtagctgggattacaggcacgtgccaccacacccagctaatttttgtatttttagtagagacagggtttcaccatgttggccaggctggtctcgaactcctgacctcaggtgatctgcccactttggcctctcaaagtgctgggattacaggaatgagccaccgtgcctagcctgtttcttcttgttggctgactacagaggagcggccctgctgctgctgctgggcaccctgcccatacactcctttccatctgggacccgccctccatcttcatgtccccacgtggagaaggactctgctcacccacttccagctcctatgccttcatcatcctcaccttcaaatcttgctttgtggcttcaattctgtgtccgtcatcacattggacgcacatggcagccttggagaggaaggcagacaggtgtatcatccccgtgacacagatgaggcacctgaggcccagccaggatgtgtgacttgtccgaggtcagacacttagtggcagggatgggggtggcagtacacagacatccaagctagatcccaagagtcctcttgctcgggccatccagcaggtggctggaggtggcctgggccaggctggcgtttctggatgagtcttgcctggccttgctcatccaccgctcggccaacctggcctcttggcccctggcgggttgccatgggaactgccctgtcctggtggggctggtgtggccaggcagatagggagggaacgggaccagcacagctgacccccgggctgggatgtccaccccgtctagtggatctacgggtggctaagacattgaagggaggacctgtttgaggtcacagtgaaccaggagttcatccctcttcacccacaccaggctgctgccctaaggcaaagggctgggacctactctgcttgtagacgaggcccaagggagaagctagaatggaaagggaggggacctactgtgggagggccggcaggctcctgggctctcaccatatcctgtagcaaggcacaggggaactgtggtgagcccactttgcaggggagcaaggggaggccctgggcagggactaagctgagctctgaatcactgggggacttgactgatgcccgggcgctctccaccctaaagggagccatctctgagactgcaccccaggcaaggggtggcggaaaggacagccacctgggtggggaccgctccagtctctagcctgctttgcatgagcattggagcggacagacctggtttgagcgctttctgtctcgtgagctccagtgagccccttggctcctctgagccttgatttcctcactgtgctttgccctgggaaacagctgttctcaaaggtgctctgccaccccaggcccttgctcctttccctgggtagttctccctgcctggcgggactcaccaccaggcttcacctccaccaggaagccttccctgatccctattgggtatcctccttggcgattgcctttttcacgggcagtggcccctggacgcaagcgtgtgcccagtgtggtatagcacctgctcagagtggggcctgtgagtggctgaggaatgagacatggattgcttgtgtgacagagtgagctgtagggagatgctggatgaccacggattgtggtcgtggtcagggatgcccaccttggatgggagtttaggctcatgatggacatcacagacaacaggaagggcttggcacttgggacccaa

SEQ ID NO: 305 - DNA, 32744 bp, Homo sapiens
  source 1..32744: mol_type = other DNA
gcctggcgggaaagtcgaaaactacgggcggcgacggcttctcggtgagtaagtggagcaatggtcgtagtctctcgaggccccgctcccctgcggcctaatctctaagtccgggccgcggtcggcgttctcctctggggctccgcgccccgaaccttggcttcctcatctgccctgagatgggataatccccacaggtacctttctgcgtcattaaaatgcggaaacgagaaaggcttttaccctcacccgcttcccgatgaactaatccaggcagtcggcctcatctcacttctgttgggcttttctggaagccagatggtatcgcacgtgttaaaggcgggtgcctggaagccggacgtgctgacaagacttagtttttccatctgcaagatggctgataatggttatccgtattaaccgaagcggcgataaataaaaagtttagcacagggcccggtacctcgtaaatgttaaccattattagaagtcattataatcatcaagagtaagtataggtggtgaagagcgcaggtgctgaagccagactccgagttagaatcccagttctgcccgtgatgatgagaataatggtacccacctcaaaaagttttgtgggaaataaatgaattattaaatataaagcacttgaaacagttcttgttagcttttagcatttcccctgcactgcgagcttttttcactctgaatattctcagaaattttccttatgccggtaactatgctgggcattagggacattgagtaagtgagactgggttcctgctctcaaagagccccagtctagtgtgaggtaagggcccctaggtataccctgtggagcagggaagctgcagtagcaaactcccttagggataggaggaacacttttcaaggaagatgacattcgattgaatgtttagatctgagtaggaatttccaggcaaataagagcacttcagatgaaaagaacacctttgtgcaaaggcactgagaccacgaaggttctgatttacaagattaaaaggtcatgtgattcaggcacttcccccacctctgctgtctgatttctaactccacatctccttgtttcagtatgagtatctatttgcctggactcctcttctcctaccccttctactggctaactgctgtttcagccctcaagtccctgcctaaaaatcacttcttcaggccgggcgcggttggctcacgcctgtaatcccagcactttgggagtccgaggcgggcggattatgaggttatgagatcaagactatcctgggtaacacggtgaaaccccgtctctactaaaaatacaaaaaattagccgggcgtggtggcgggcgcctgtagtcccagctacttgggaagctgaggcaggagaatggtgtgaacccgggaggtggagcttgcagtgagccgaggctgcaccactgcactccagcctgggtgacagagtgagactccgtctcaaaaaaaaaaaaaaaaaaaatcacttctttaggccgggcggctcacacctgtaatcccagcactttgggaggccgaggtgggtggatcacttgaggtcaggagtttgagaccagcctagccgacatggtgaaaccctgtctctactaaaaaaaaaaaaaaaaaaattcaaggagattgtccctaagaaatggtccttgcttctctttaccacccttactagcaactagactaaatttcctagtaagccctcatagaacctgtacttttatagcacttacataactgtagttcagtacattaaggctatttgttaccatactgtaaattccctgaggacagggatcatgtctgtctagttcacagttgtaaccccagcacctagcacagtccctaacatatagtattgaaatcatgaattaaaggacaggtacgttggggatagataatggagggtcttgaatctcagatggagagtgatgggttttatccttcagcaacagcgaagtagtctgcctaaagaggtaactaagacttgaaaggaaggtagtattggctagatgtaagagttgaaatttgcttagcacctaggtttaggtagcattaatatggagatgtgagcccctctgattttggatagagcagttttctttgaacaatagctttaacttctcagaatttatcttctagagggtaacttctgtttcccgattttgctctaggaagtaatttaagtgcacaagacattggtcaaaatggtttccaaaagaagactgtcaaaatctgaggataaagagagcctgacagaagatgcctccagtaagtatctagtcatttgttgctttatttcctgtagcaatgtgtgaggcatgtgagagatataaagttcctgcttttcaagtgctgagaatcttcaaagtgtaatgaatggagtgcacagaattaagggagaaatatcagatttgggactgagtttttgcctcgaattctgcgtataactttgagtatgaccacagcctctggacctcagtctccacatccataagaggaattagtgttacagactttttctgctatacatcatttaggtgttgagacacaaagacataacatagtctgtacccttaaaaaactttatggtctttcttcctctcttggaaaaaaaatattatgatctagacacatgctatgttagtgatgtgaaaggaaaaatacatcaaagcaagcaaaccagaggcaaagaaacagtgcagactctgcccatatgagaaatagttgacaaagatcccaagagttccagatataaggagttgatggctgggtgctatcgctcacacctgtaatccaagcactttgaggggctaaggtgagagggtcacctaaagctaggagttcaagaccagcctgggtaacatagcgagactccatctctacaaaaaatttttttaattagctgggcatggtggtttgtgcctgtggtcccagctactgaggaggctgaagtggaaggatcacttgagctcaggaggtcgagggtgcaatgagtcaataacagcaccactgcactccagcctaggcgacagagcaagagagaccatgtctcaaaaagggagtggggggcggggaggttgatagttcatttattgctcttatctactctattaatcttgatttgtgttggtttgtttttattttactaggttttttgggaacaggtggtgttcggttacataaataagttctctagtggtgatttctgaaattttggtgcacctgtcacccgaaaagtgtatggtgtacccaatgtgtattttttcaatccctaaccccccttccaccctttctcttgagtatccaaagtccattatatcattcttgttgttgttgttgttgttgtttgagacggagtctcactctgtcacccaggctggagtgcagtggcacaatctcggctcactgcaacctccacctcccaggttcaagcgattttccagcctcagtctcccgagtagctgggattacaggcgccagccaccatgcccggctgatttttttgtatctttagtagagacggggtttcaccatgctggccaggggctgtctggaactcctgacctcaagtgatccatccatctcggcctcccaaagtgcaaggattacaggcttgagccaccacgcctggcccattatatcatttttttttttttttttgagatggagtttggctcttgttgcccagtctggagtgcagtggcacaatcttggctcactgcaacctccgcctcccgggttcaagcgattctcctggctcagccgcccaagtagctgggattacatgtacatgccatcatgcctggctaatttttgtatttttagtagagaaggggtttcaccgtgttagtcaggctggtctcaaactcctgacctccggtaatccacccacctcagcctcccaaagtgctgggatatcggacgtgagccaccatgcctggcctcattatgtcattcttaatgcctttgcattctcatagcttagcttctactgacttgtggattgaagagttatttcttactaggttattggaagttaagtctgattcttggtcaattcaaccgaaatagatgaaaatgcttgctgaacagtgattataatgataaaaattgtgagtccaaaaccatgtaaggaataggcttgatttagaaacggaaactgtgggccgggcacagtggctcacacctgtaatcccagcactttgggaggccaaggcgggcagatcacctgaggtcaggagttcaagatcagcctggccaacatagtgaaaccccatctctactaaaaatacaaaaattagctgggcgtggtgtcacgtgtctgtaatctcagctactcgggaggctgaggcaggggaattgcttgaaccccggaggtggaggttgcagtgagctgagatcacgccactgcccttcagccggggcaacagagcaagactcttatctcaaaaaaaaaaggaagttgtgaagctccaatggttgattagtaatggggttctagaattagaatatagagaaattggtagaaaatttgaaactgaagaggaataatataggaaattactgaaagtaaatgttatactttggaaatactgttctccaaaagagaagagacttctgaattaagtttattagaagggatttgggttctcttggtcagtaatgaacaaactgaaactttcattctggttgtgttttacatttcattcaggaaggtagtggtctttgtctcattctgattaaggctttattagaaagagggaaaggaggccaggcacggtggctcacgcctgtaatcccagcactttgggtggccaaggcgggcagatcacgaggtcaggagattgagaccatcttggctaacatggtgaaaccccgtctctactaaaaatacaaaaaattagccgggcgtggtggtgtgcacctgtagtcccagctactgggaggctgaggcaggagaatggcatgaacccgggaggcggagcttgcagtgagccaagatcgcgccactgcactccagcctgggcgacagagcaagactccatttcaaaaaaaaaaaaaaaagaaagagggagaggaattgaagaaggaaaaaacaaaatggcatcattaagggagaagagtaaattttaaacttggcttcaagtacctgtttgtttcttgtttcttatttctttttatgggttgaaagtcttgggattaaacctatctgagcattgtagtcaaagatatgatacaaagaaccttccccattctgtctaccctttattcagatcattgagtctcaaatttggtgtgtatcaggattattatctgaagaacataaaaaattcggattcctaggtcccattcccaagattttgactcagtaactctggtatatggcatggaatatgccttttttttcctttgagacagagtgtcactctgttgctcaggcaggagtgaagtggcgcgatctgggctcactgcaacctctgcctcccgggttcaagtgattctcctcctcagcctcccgagtagttggtattacaggcgcacgccaccacacccagttaattttgtatttttagtagagatggggtttcaccacgttagccaggctggtcttgaactcctgacctcaggtaatcagcctgcctcggcctcccaaagtgctgggattacaggcgtgagccactgtgctgggtcggaaatatgcattttaataagcttcccagggattccagtacagtggtttgcaggcaacagcttgagagacactggctagtttagtatttgggtggaaaacatttctgtgggttattcttgttaggcacttatttgtttgaatttatttttttagagatggggatttcactctgtcacccaggctggagtgcagtggtaatatcatagctcactatagcctcaacctcctgggctcaagttattcttccgccttagcctccgaagtagctgggactacaggtgtgcgtctcctcacctaactagtttgtgtgtggagggggggaatgggggtgaagggggggagatgggggggtggtctcactttgttgcccaggctggtcttgaactcctggcttcaagtgatcctcctgccttggcctcctaatttgctgggattaccacatgagccaccttgcctggccagaaatggcacattttgaattcttcaaatgaaaataggtgaaaataattctatttgtttgttttggaagccactattgctgaagacagtttatttcactacagcatcaatcctagtataatttttaaggacacatcagttttcctctcatgattattattcctgggtttaagttttaatttttcctttactatttgccatattcttgaaaatttttctattttcagaaaccaggaagcaaccactttccaaaaagacaaagaaatctcatattgctaatgaagttgaagaaaatgacagcatctttgtaaagcttcttaagatatcaggaattattcttaaaacgggagagagtcagaatcaactaggtaatattttaatctaattttattctctgggtttaatgaaatagttcaggactgaatcatgggttttctaaatagagaggcaatgaagattagaaatcagagggccatccatcttgagacaaagttgaaattgctttttagaaaatggtacagtcaggccgggcgcggtggctcacgtttatcatcccagcactttgggaggctcgaggcaggcggattgcctgagctcaggaatttgcgaccggcctgggcaacacgtctctactaaaatataaaaaattagccgggcatggtggcatgtgcctgtagtcccagctgcttgggcgcctgagtcaggagaattgcttgaacccgggaggtgaaagttgcagtgagtcaagatcgcaccactgcactccagcctgggcgacaagagtgagactccatttccaaaaaacaaaaatggaaaaagaaaatggtacagtctttggtcctcattactatgtcttaagtaaagcatttctcatccttttattagaaaaaatattatatattatttattttgtgttttcttatgaaaaaataaatatccagaaagcagctgtatcagtgtcagaataatttcagaagaaaatttataaagccatataagattctgttttgggggagcagattattctatcttgctaaggttatggcaggtcttttttagaacacttagtggctatctgctatcaaagctaagtcttttttttttttttttttttgagacggagtcttgctctgtcgcccaggctggagtgcagtggcgcgatctctgctcactgcaagctccacctcccaggttcacaccattctgcctcagcttcccaagtagctgggactacaggcgcccgccaccatgcctgactaattttttgtatttttagtagagacggagtttcaccgtgttagccaggatggtcttgatctcctgaccttgtgatccacctgcctcggcctcccaaagtgctgggattacaggcatgagccaccgcgcccagccaaagctaagtcttttatgtgggtttagacacaaccccatgactctgggctgggcacagtggcttatgcctgtaatcccagcacttgggaggctgaggagggtggatcacgaggtcaggaaatcgagaccatcctggctaacacagtgaaaccctgtctctactaaaaatacaaaaaacgaaacaaaacaaaaaaaaacgtgtctgtagtcccagctacttgggggggctgaggcaggagaatcatttgaacccaggaggcggaagttcctgtgagctgagatcacgccactgcactccagcctaggcaacagaacaaaactccatctcaaaaaaaaaaaaaaaaaaaaagatttgtctctgaaattaggttgaaaatatttttattggtttcatcaggcaagaaacttgggtttttagagaaggaaaactatggtaggaaactggtgaccagctcttcttttttctgcatagctgtggatcaaatagctttccaaaagaagctctttcagaccctgaggagacacccttcctatcccaaagtatgtatttttcccctggtatttttgcttgtgccagcataactctagaatttggaatttaaggacactggtataaagttgagtgggctagaatgatttttaacagcaaatattaaactaaaaattttattcttttttattttttaaatctccttaagataatagaagaatttgttagtggcctggagtcttacattgaggatgaagacagtttcaggaactgccttttgtcttgtgagcgtctgcaggatgaggaagccaggtgtggagaggaggcatggaatcttgctgaaattcagtctgttttgccaacttcatggggctggggagggagagcacagttgtttcaaatttcatttttggtgtaagctctgttttcctcagagtttaaactaagtttaaaattcctaagcttgtggttatgagcctaacaatcagtgttttacctatgctgacagaatttcaaatctctacctctcccttgcaaagagccatctgctcatttctgtatttcttgtctaacagggtagttcctctttaaatattatgtatttaaccaattttattgagaaaagatgataaaagcattaaaacaaggaaagcaaagtggaaaacagatttcttttttttttacagtatgggtgcatcttattctaagagtctcatcaaactgcttctggggattgacatactgcaggtaagactgtcactttttctgtgaacatttgatggaagaggtttgtggtgtatgctcaagtctaaatagcgggaacacaggatagagtagggttaattggagaatttgggtttgtagcagctttagcacagccctgttgctgtgatgggtttggtagggtaatgtctgtgttttaaaactgtgcttattagcctaatacatctggcggccccatttattctctctgcatctgattcctgttcttaaagctgcatcctgtgtatctctgagtatctggtaatctttatcatattcatatctacattatctcccatttagctttttagatgcttatgtaacttaattttgtccttttcctcctcctcgtctcttttattaagtagacaatacattgatatgatttaaatatctcaagttatacaaatgtatatagagcagaaaacttccctccaccccattctccatttttcctcttctcccctactgttaatcttttcacactcttaaactcttccttttcactggaaatcttgaagataatttagttattttaagtctaagagctcccttgttcctcctgagagctccccttgcaagttatttgataatcttttaaagtttgcattttgtggattaacagttattgtatttaataatattttaattatctgattattttaacgttgccttgataatcattttcagtttttcagaagacaaattaagtctttgtattccaatagcatattctaaaaatgaagacatattcgtgtggatatccttgtaataagatatcaactttagcaaagtgtttattccaggagctctagttggaaagagaattatacatttctttttttttttttttttttgagtcagagtctcctttgtcacccaggctggagtggagtggtgcaatctcggctcactgcaatctctgccttccccaggtccaagaggttctcgtgcctcagcctcccaagtagctgggattatacatttctattgtgtattttgagatcatctcctaactccctatgtcttcttttttagcctgccattatcaaaaccttatttgagaagttgccagaatatttttttgaaaagtaagtggcgttattatggaatgttcaaagtaccctgatgtacttaagttctctctgaaaaggttactctgaaaactattggtttctctgaaagtcatatttatcattatatttcttaagtgactactaaaattttactggagtgtctttgaagtttcatctattaatatgactttgtaaaaatagataggattactgttaaaagtaactattggcctggtgcagtggctcacacctgtaatcccaacagtttgggaagctgagggaggaggattgcttgagttcaggaattcaagaccagcctgggcaatgtagtgagaccttgtctgtatttcaaaacagaattttttttttttttttaagtatctgttgcttatgctcagggataatccctagtagaaggatacacaatatactggtaatggtagttgtctccaaagagggtagccagttggttggaatcaggtattttctgaatacttttctttaccttttaaattttgtagtgtatgttcagacagggtctcactctgttgcccaggctggagtgccgtagtacgatcatggctcactgaggcctccacctcccaggcttaagtgatcctcacacctcagcatcatgagtgcctgggactacaggtgtgcgccacccggtccagctaattttcgtggtttttttttttttggtagaggtggggtttcgccatgttgcccaggctagtctcaaaacttccaggctcaagtggtccacctgccttagcctctcaaactactgggatgtggccctacctgtttttttttaattactatgttaagaaatgaacagcctaatagaaaagtagacaaaggtcatgaacagacagtttacaaagaagaaatacaagaacatcaaatatttaaaaagttcaattttgttagcaatcaaaggcacaaatttaaaacactgtatcaaaatagtaaataataactattacacagtaaaataaatgcattttttcctactctcaaagggtctccttgttgagtgtagtgaataggcatgcttgtacgttgctagtgagcatataaattagttcaggcatcgattcggaagagcaatagattgtatgtgtcaaaaaccttagattttgcataccctttaatcctaatgtcatgtctcctcatttatcctaagataataactgtgaatgaaaatgaaataatattagtttagtgcttgctttggcagcacgtatactaaaattggaacaatacagagattagcatggcccttttgcaagggtgatacccaaatttgtgaagtgttccgtatattgaaaaagattactctttaaaataaagaaatgtaaataattgagatgttcaaaaaatagaaatattatgtgcacattaataattgtaaaaagaattagttaatatcatacattaattgaaaaaaacaaacccaggttacacatagcacttatattaggttggtgcaaaagtaattgcagtttttgcaataagtagttcagtattttgtttaaaaaagaagatacacacatacacatatgtatattaatagtgtacctttctggaatgacaggattatagtcatttttatgttctcctttttaattttttcagagtcctgatacagtaatagtaagtttaaaggtttacttattttgagacggaatctcactctgttgcccaggctagagtacagtggtgcgatcttggctcactgcaacctctgcctcctgggttcaagtgattctcctgcctcagccccccgagtagctgggattacaggtgtgcgccaccacacccagctaatttttggtatttttagtagatatgaggtttcgccatgttggccaggctggcctcgaactcctgacctcaagtgatctgcttgcctcagccccacaaagtgctgggattgcaggagtgagccactgcacccactgaaggtttattttttcaaatttgttttagctaaatgtctcatgctggatgctttacatcctggctagtctttttcagttaagattggctgcaataacaaggaccatgctgtcaaggagatggaagtggtccaaaactttagatataggaggctcgaaggaaggtggaaactatcatatttggaaaaatgataattgagccaacatttctttatttataaatgatttttagtacttttataaatataatctaatttgactttctatgttcccttagcaatatatgcttgcttttttttttttttttttgagacagagtcttggctctgtcacccaggctggagtgcagtggcacgatctcaactcactgcaacctccgccttctgggttcaagcgattctcctgcctcagcctcccaagtagctgggattacaggtacccaccatcgtgcccagctaatttttgtatttttagtagagatggggtttcaccgtgttggccaggctggtcttgaactcctggcctcatgtgatctgcccaccttggcctcccaaagtgctgggattacaggcatgagccactgcatctgacttatgcttgcctttttaagcacttactgcgttgatgttattagtgtcttaccttttaaaaatacttgtcatattcagtttttaagatttattaacattgtctttttaaaaattattattaagagatgctgtctagccctgtcatcccttctctctaaatcctccctggatgtagtcactgttcatatttagcatgtcttctagacatttttcttaacatacgtaagcatgtatctcctgcatcttgggtatcacttgtgtgtctagtgcagtgccgaatgcatagtaggtgttcggtaaatgttaatggaatggctaaaatattttgtgcagtattaatgcttgctgttattttgaccagaaaggctcagttccctgttttctcttcctaacattttagcaagaacagtgatgaaatcaacatacctcgactcattgtcagtcaactaaaatggcttgacagagttgtggatggcaaggtaggcttatggactttatctcttgaatttaaagagtatgtttctcatatcttttggaggttgtatttttttttctttctaaacagaaaattcatacttttccatccatccattagctttttccaattttcataatttgagaatcatagatacttcaccctttaaatttcagaaaagtttaaatacgaagagtagatatcatttattaaataaattaaatatttgggaagattctttttcaaagtacagagataaatgactgtgtttatttctcaaataatttcagctctgcatttcacacgtaggtagtctttctttattctgggtaatgtgctgcagttctaatagtgtcttctactgcaggacctcaccaccaagatcatgcagctgatcagtattgctccagagaacctgcagcatgacatcatcaccagcctacctgagatcctaggggattcccagcacgctgatgtggggaaagaactcaggtggataaaccctctgtcatcatctaagtgaggctcagctatgggggttctatcactgcagtatgcaaagagcagtagtaatatggtctcttctatctaaaaagaggatgataccccccttcatgagtagggtatgggatttgacttaaaaaaaaaaggtatatatttgaatagatccacatactttctttttttttttttttttttctgagacagtcttgctctgtcgcccaggctggagtgcagtggtgcgatctcagctcactgcaacctccgcctcctgggttcaccccattctcctgcctcagcctcccaagtagctgggactagaggcacctgctaccatgcccgactaatttttttggtatttttagtagagacggggtttcaccatgttagccaggatggtctcgatctcctgaccttgtgatccgccctcctcggcctcccagagtgctgggattacaggcatgagccaccgtgcctggccccatgtactttcttttaaatggtatacctgttatgagcgtgaagtctggcttaggattagatatctaaatttggccagtggagaagttgaccatgatcccttaagtttcattaacttgttcttcagggggtccttaaccctggctgcacattaaaatcatttgtggagcctattaaacatctaccttctttgggttcctaggtgattcattctaatgcacagtcctgcatcagaccgcttgcggagacccattgcttactgtcattcatttgaaaaatagtaattggtagggaagtattgaagaaggggagaacaatatccctaggtaataaagtttccatcttaatgcaactttttattgtactagaagtattttttttaaattcagtttgtaatacttccttttgtatagttgtctgcaaagctacctccaaaacatccagtgatttcttgccctcatccttttgggcaggatgctccttctgggcaaagtactacgccatccactttacctgcctgatgccagctcatctccttttgtatagtctttttttttttttagcatctgtcaccgtctgttgggcgcagtggctcatgcctttaatcccagcatgttgggcggctgaagtgggtgggtcacttgagcccaggagtttgagaccagcctggacaacatggtgaaaagccgtctttcaaaaacatacaaaaattaggtgggcgtggtggtacgcacttataattctagctactcaggaggctgagatgggaggatcaattgagcgtggaaggtcgaagctacagtgagctgtgatgacaccactgtaactgtactcaagcctgggcatcagagtaagaccctgtctcaaaaaacaaacaaacaaaaaaaaaagcaatctatcactgtccttctcactatgttgtgctcctgtagcaccacctacatgtgtctctcatacttatcagatttcattgtaaatgttttgggttttctttttcctttttgcggggaaggatacataccaaactaaatagtggtgttctctgggtagtggggattgtgatggaaggcttcttgtttctacttttattatttgaatttttataatgagcatgtattattttttgcagtcaaaacaatttttaaagaaacatactataaacggtaacttaatggcaactaagtatgtcctttattttcatactctaataaatgattttctcaagtcattgtctgcccagctctgttcaaaccattatacaacttttttctttttctaccattcacagtgacctactgatagagaatacttcactcactgtcccaatcctggatgtcctttcaagcctccgacttgacccaaacttcctattgaaggtagaaaagactcagctttccagaaacagagccagctttccaacctcccagaacaagtgtcagtcagtcattgccttgggagtaatgaatatttcattttgaaaccatagtgaatcacatttgatatctctctttttttttttttttcccctcaatgagtttcagatgctattctatggtagagtcacaggtctgtttttttttttgagacggagtatcactctgtcacccaggctggagtgcagtggtgcaatctccgctaactgcaacctctacctaccaagttcaagcagttccctgactcagcctcccaagtagctggggttacaggcacctgccaccactcccggctaatttttgtatttttagtagagacggggtttcaccatattgtccaggctggtcttgaactccggaccttgttttccacccccctcggcctcccaaagtgctgggattacaggcttgagccaccgtgcctggcccacaggtctgtttttaagcagtaagttttgagtggaaatcttccatgttgtctgagtcatacctgcttcccataggaataatactttttatgccttactgtagccagttgagaatttaggctctaaatgtaagataatagctctgtttcacatttattgcccgtctatttttgatgaagctgtggtattaacaactaaaagattctaatttggggaaaaatctaaaattttgtttttccctaaattataagtgggaagatggagtaagagaagtgatttttttctaattttatctaacagttcagtacaaagttgaggtagtgacatgaaaacctattaagtttctgtgcttttaatttttaggttcgccagttggtgatggataagttgtcgtctattagattggaggatttacctgtgataataaagttcattcttcattccgtaacagccatggatacacttgaggtatgctcttatatcccatcacacctagataaagcaacttaagtgccaattgctcttctctgtccccagactaactgagaatactgactaatccggatagcattcagaggagagaatggagctattcaacagattcattgatctatataagctgctataagttacatttactcttcctgtgtagtacctcacagaattctgaaattttgggtatgatgttctatgacattgcattggctattctcataactctatttttcaaaatgtccaacatttaaatttttttcttcctcagtctttcaggagattgtcatggtagagagactggactgtgcctacccactatgaatgagcagaaaaccatagctaatatttactttctgcaggtaatttctgagcttcgggagaagttggatctgcagcattgtgttttgccatcacggttacaggcttcccaagtaaagttgaaaagtaaaggacgagcaaggtaaagagctcatcctcacacaggatgtcacaattttctgacatcccactgtcagagttagagcttaatactactacaaataatgatactattatgacatttacatctagtattatattgtttttcaaattacatatatgtatgtgagtatgtatgtgtttatatattttcttagccattcagatcaatcccagacagacgacagtgcaagtttattagccatcttatacatgaggttgtcatttgctccagggtacatggcaggaactccgatcttgtaagttcttttctggtacgtagaagagtaatttttttcctctctgctacttgtagttcctcaggaaatcaagaaagcagcggtcagagctgtattattctcctctttgatgtaataaagtcagctattagatatgagaaaaccatttcagaagcctggattaaggtgagatctttggaactttgattatcaaggaggaaatgagtggcaattagtgacagatgtataactgaggtagactgaaataaaaatctcaaaactcattcaagtggaaatgatagctgatggttgccagatggacacattggctcttagatgagataacagggcatgctgaataaggtgtaacgtgtttcgctgatgtgtcataatatttttgtgactctctcctgttttttcaggcaattgaaaacactgcctcagtatctgaacacaaggtaatgttcatgtactatgcattttcagtattgcagacttaaaagtaatgacattggctagcttgccttcccactgtctttctttctcccccctccagtcactcttctctctcttccctagttgctctaataaacattagctgtctggggaagataatctgaggtggcgactggccagatagcctgcccctactcactctggctataaaataagcctacagtatccacaaggggaaatactaacagtgtaaacaagcacatcaaggtgcagtcaaagaagccaggtccccactgatgagatgaagaaaataaccacctaagtctcaggtccctgtatctgcctaattgcccttccttccactcagcaccactgtcaagataatggcattccatgttttactttactttgctcatgtagacctgactagagtaaatcaatctgtccactgtcaaggcagtggtactggatcttatgtctctattaattctagaaataccttccatcaaaaagccagatgattggccgggcgcggtagctcacgcctataatcccagcactttgggaggctgaggcaggcggatcatctgaggtcaggagtttgagaccagcctggccaatgtagcgaaaccccgtctctactaaaaatacaaaaaaaattagcctggcctggtggcacacgccactgcactccagcctgggcgacagtgcaagactccatctcaaaagataaaaagccggatgattgagttccttaggtgctgattggttgcctttaaagatttttctttggttggaatctgttttgtgggatttttgttagttttgttatccaattttgggatgattatcttaaaagctttcatgatgctgaataaagcaatgaaaattcagaattttttctggtgaaaaatatcaaagtactccaacacactgtttttggttttggataaacataaatttaccaccttggctgcctgcatacctatttttacatatttgtaatcattgtataaatataatttgtattcttacttttttttcttaacattttttctcctgtcataaatatttcaaggtctgcattgtcttcattgttatctttaatgactgtattctggtctaataactcagttttggtgtcctaagaagtggagcattcagttaagataagtagtaaaattttttttgttttttcttgtttgtcctgcttgcctttttaactgtttttttttttttcctggaagcatagactcaggttgccctgaatacacgcccaatgttttctctttttttgttttgttttgtttttgtttttgtttttgagacgggttctcactctgtcacctaggctggactgcactggcgtgatctcggctcactgcaagctccgcctcctgggttcacgccattctcccgcttcagcctcccaagtagctgggactacaggcacctgccaccacgcccggctaattttttgtatttttagtggaaatggggcttcatcatgttagccaggatggtctcaatctcctgacctcatgatctgcccgcctcggcctcccaaagtgctgggattataggcgtgagccaccatgcctagcatggcttattcttcctgatgactgtgtaatattccaaaaattaaaattactccatcataatttattgaacctttcctgtattgatgtattgatgggcatttatagtctttccaacttttcacaaagtaattttccttttttttttttttttttgagacaaagtcttgctctgtcacctaggctcgagtgcagtggctcgatctcggctcactgcaacctctgtcacccgggttcaagcgattctcctgtctcagcttcccaagtaggtgggattacaggtgtgtgctactttgcccggctaatttgtgtatttttagtagagacagggtttcagcatcttggccaggctggtcttgaactcctgacgtcgtaatccacccatctcggcctcccaaagtgctgggattacaggcgtgagccaccgtgcctggcctagtaattttcctagtaatactgaaaatacatactgtagttggcaacaaatacacgctggagttggcaagtgattgaatctttcttttaataaatgtcaagatgttcagagttacttctgtagtaatatcactttcatgcatattgctctgtattctttttttttttttttgagaatggaatctcgctctctcacccaggctggagtgcagtggcgcgatctcggctcactgtaagctctgcctcccgggttcacgccattctcctgcctcagcctccccagcagctgggactataggtgcatgctgccacacccggctaattttttgtatttttagtagagacggggtttcaccgtgttagtcaggatggtctcgatctcctgaccttgtgatctgcccgccttggcctcccaaagtgctgggattacagatgtgagccactgtgcctggcctgctctgtattcttaaggggtatcaatggttaacagttgtggcactttatttatctgaaaaatatttctgagttttgtgaaaagtgtagatactcccaggggagtgtgtggaacaaatgagcattatccattctgtgttttaattagaggaaaagctgctgtttcattgtagcaaatgtactgatttgttaactgtttttctgttgttgcatatttattgacaataggtgtttgacctggtgatgcttttcatcatctatagcaccaatactcagacaaagaagtacattgacagggtgctaagaaataagattcgatcaggctgcattcaagaacagctgctccagagtacattctctgttcattacttagtaagtgtcagagactattgatttttaatctaaaacagaaagctttacagctctcatgtaaaatttcatcttatttcagtccattgttcaaacccattgagatttttgaattttgtttttgcattaatcattttaattgtctatctcaatgcagtttgcaactttgacaaactggccttccgtatcctatttaagtagcttataaaaaccttgaggggaataggaccagcctgtagaaactagtagaaatgtaaatatgtacctatttgaactatcactctttagccattcaaaactgtggactttaggtgataattcctctagaaatgtaaattattcaaagtggaattttataagctaggaatagtgttttgccagctgaacgttcaggatattagcagtatagaacttagaaaactggatgggccagtggtttggggtttgggttaggagctaatgagaatacctcgctgggtcttaaattttatatttaggaatagatttaacggttgtattattttatcttgcagttctttctgtgtttatttctgccaattatacatgttttgggctgtaattttctagatgcagaaaccacatgtaatttttcattgcattttccccaataaagcattatacccagcttagtactaaatataagatttttaaaaattatggtatcaataaggaagctatgtttattaactggttatttagtctgggtccattaatgtctatgtacattgaattattggtaggttatgatcacttctcttcttgatcttcttttaaaaaaatcagcttagttagcattgaaccttatagacctacttcaaattataaccaaggtggaacatccctgggggtagtatgattgcatggggaaactgggatttagaacatctggcctccaatcccaaattgagcagataggaatgttctattaggcttgtaatttaacttctttgagcttaaaagtcaattattatccaaacgtggaatcccattgatgctgagagtaatctcagaatgatgaaggattatttttgtgtaaaacaaagattaagatttcctaagttaaaatgagagctagggaggagaagtctgacattccaaaaggataagcaactcttaggttgtgtactaactgtttcctacagcttcttttctctctctactcttccccactcaaggttcttaaggatatgtgttcatccattctgtcgctggctcagagtttgcttcactctctagaccagagtataatttcatttggcagtctcctatacaaatatgcatttaagttttttgacacgtactgccagcaggtatgttgaaacatttattttggcaaggagggaacacagaaagggaaaataatctgatgtttatttcttgttggttggaactcactgaaggggaaggaactctgacctgggtctcaagaaagctcaattctagtcccagccttgatgaaaggaagagacttgactggtggctctaactctgtgttctgagctctaaaattctctgtctgaaattaagatccagatctagtccatttcaaaacatgagacacttttttttgttttgttttgagacgtggttttgctcttcatgcccaggctggagtgcagtggtgctatctcagctcactgcaaccttcacctcctgggttcaagcgattctcctgtctcagcttcctaagtagctgtgattacaggcacacaccaccacgcccggttaattttttgtatttttagtagacacagcgtttcaccatgttggccaggctggtctcgaactcctgacctcaggtgaaccgcctgcctcagcctctcaaagtgctgggattataggcgtgagccattgggcctggccgagacacattttaatagcatatatccagagagggaggactgtatttgtggaaaatgtttatgaaagcaagtaaagaacagtgtcttattttgtatttttacatatattcttcctgtcattaacaatgttaaaacgcatttgaatggaacttttaaaatgaagatttgtaaaaaaattttaaacatttaaagtagagcaatagttgcagctgacatgaggtagctgttgcagttgaaaatgtaattctgttatgactattatggagtgacagtataaagggagaatggcatctaagacatttctggaccctcttaatgtcttagagacactgtcataatccatgtttgcttggaaacatgcaagtctagcctgtactatatggagaaaacctttaaagcttttagctccttgagtgccatctttttgaggaatttcaactgatcttgtacaacctcaacctaaagggtaaaatttaacccatatgggaaaaagaaagaggaaaactacgccaaggagcaaaatcaggagggcttaggtagagctcactgataaaatatgggaaataggtcaagatgggatggtcaagttacactggcatattcctaaatctcctgaagccaacattaatgaaaactagataataggtgatgggtttgggttgattgtgattttaacaaagtagagattggagaggccttgggggtgaatccctttagaatggccatccatattttgttttacactgttctgttgactctcccctgtataggaagtggttggtgccttagtgacccatatctgcagtgggaatgaagctgaagttgatactgccttagatgtccttctagagttggtagtgttaaacccatctgctatgatgatgaatgctgtctttgtaaaggtatcttattggcttcttgtactttagatattgaatactataattggtgggaggtggtgggaaggaggtgagatgatgggcaagtaatataaataaaaagtgactattctatctatgtgttaattcattcagcaaacacttctttatacctaacctacaggctaatctctattctgggtgctgtgaatgtaaagtaggcccttacctttcatgttaaagactaagacacataagcaagtcactataaatacaacatggtgaattctctggtaaagtactatagatataacagagtaagaataattaaatttagcctgggaagctggagaattcttcaaagaggcaatgtgagtgattgctgaaggatgggaatgactgacaagagaaagtatgggaagtgcgttctaggcagagaagagtttgagcagaagcaaactggtgcccaagtcaatggtgtgactgaggaatgagaagcaaacaagcatgactggagaataggatatatatggagaggaatgattggaggcaaggctggtaagacataggacaggcccatgttgcaaagagtctcaaataacatgctaaagagtttcaactttattttttagacaataaggagctattactagtttttacatacagttgacctaatctactcagcattgagagataactcagtaggctatatgatgggtggattggagactgctgaaatggtctaagggagtgagagtaagggccagattttggtcacgggaatgtagaagaaattatggcttaagagacaatttggtgttagaattaacatgacttggtgactgttaagaatatgtggcggtccgggtgcggtggctcatgcttgtaatcccagcactttgggaggccaaggcgggcaaatcacgaggtcaggagatcaagaccatcctgcctaacacggtgaaaccccgtctctactaaaaatacaaaaattagccgggcatcgtggcggtcgcctgtagtcccagctactcaagaggctgaggcaggagaatggcgtgaacccaggaggcggagcttgcagtgagccaagataacaccactgcactccagtctgggcgacagagcaagactctgtctcaaaaaaaaaaaaaaaaaaaaaggcttagaagagcacagacattttgagaaggttaaagtttaagtggcagatgaaagcaaatgtccatagaaggaaaatgagaaacctggaagattaataatgtgagcttaaaggatgtcaggtagcaaaagcccaggaatgagtttcaagagtgagggattggccgggcacagtgactcatgcttgtaataccagcactttgggaggccgaggcggacggatcacctgaggttgggagttcgaatcagcctgaccaacatggagaaagccctcctctactaaaaatacaaaaattacctgggcattgtggtgcatgcctgtaatcccagctactcgggaggctgaggcaggagaatcacttgaacccaggaggtggaggttgcagtgagctgagatcatgccatcacactccagcctaggcgagaagagcgaaactgtcaaaaaaaaaagagtgaggccgggcgcggtggctcacgcctgtaatcccagcactttgggaggccgaggtgggcggatcacgaggtcaggagatcgagaccatcccggctaaaacggtgaaaccccgtctctactaaaaatacaaaaaaattagccgggcgtagtggtgggcgcctgtagtcccagctacttgggaggctgaggcaggagaatggcgtgaacccaggaggcggagcttgcagtgagccgagatcccgccactgcactccagcctgggcgacagagcgagactccgtctcaaaaaaaaaaaaaaaaaaaaaaaaaaacaaaaaggagtgagggatttatctcccagtgttggacactgaaaaagttgaagatggaggcagaggctattggctttggcaattaggatacctctggtaacctctgagagaacagtgttaattgaattataagggtggaagccagagagcagtaacttgaagacttggggaatagagtcaatgtcgagaagcatcaaggaggagagaataaaaaaagtagcttgagaaagaagctggttgtgagggagatattttttagatgaggaggtttgagattgcttgtaggctgagagaaaggattcaatagagaggaagaaatggagatttttaaaaattaattaaaagtttacaaagctgttttattactttttcctcagacaaaccatgaaaggtagtatagctattattatcaccatgttatagatgagaaaagctgaggcatttcccaaggtcacaaagtaaatagtttccttgtgactccttccagatctgtagagaaaggagaaataattcattgagtagaagctgggaagggatgatatggcaaggaatagggtaaagacataacttttggtagaatattgttttcactgaaaaaaaagggaaaggtggaggtaaagaataccgagaactgggaggtgcattagaatgactaagcagtagatgattaaagcccaggattgtggttcagagtgaagaggataaagaaaactttatgtttcctgatagttagttcctagtctctgataataagagatttagaaagttgtaagaattttcccagtttatatccagtctatcaaacctttgggctctgagcatagcttttagaacttgagctttgagcttttaagggagctaaaaagttttagatacctggctatctatgtgtgtctcttttacagggattttaattttttgaattttaagggaaaaatgttagctgctagcctcattgttggcatcattttttccacagggcattttagattatctggataacatatcccctcagcaaatacgaaaactcttctatgttctcagcacactggcatttagcaaacagaatgaagccagcagccacatccaggtaagaggcaatatgttgggaaagatttttttttttttgagacagagtctagctctgtctcctagactggagtgcagttggcacgatctcagctcattgcaacctctgcctcctgggttcaagcgattctcctgcctcagcctcccaagtggctgggactacaggcacgtgccaccatacccagctaatttttgtattctccatcaaaaagtgggcgaaggacatgaacagacacttctcaaaagaagacatttatgcagccaaaaaacacatgaaaaagtgctcatcatcactggccatcagagaaatgcaaatcaaaaccacaatgagataccatctcacaccagttagaatggcaatcattaaaaagtcaggaaacaacaggtgctggagaggatgtggagaaataggaacacttttacactgttggtgggactgtaaactagttcaaccattgtggaagtcagtgtggcgattcctcagggatctagaactagaaataccatttgacccagccatcccattactgggtatatacccaaaggactataaatcatgctgctataaagacacatgcacacatatgtttattgcggcactattcacaatagcaaagacttggaaccaacccagatgtccaacaatgatagactggattaagaaaatgtggcacatatacaccatggaatactatgcagccataaaaaatgatgagttcatgtcctttgtagggacatggatgaaattggaaatcatcattctcagtaaactatcgcaagaacaaaaaaccgcacaccgcatattctcagtcataggtgggaattgaacagtgagaacacatgggcacaggaaggggaacatcacactctggggactttgtggggtggggggaggcgggagggatagcattgggagatacacctaatgctagatgacgagttagtgggtgcagcacaccagcatggcacatgtatacatatgtaactaacctgcacattgtgcacatgtaccctaaaacttacagtataataataataaaaataaaataaaatagaataaaattaaaaaaaatttttttgtattctcagtattttgtattaattttaaacctcttgaaatttgctagaaaaaaaaaaacaagcaaatgatagatttcctagtgtgtagtagtggaaatggagtacatagccatagtactagcatttttttttcttaccacaaacattaagtgcctattctgtgccaggcactgatatattagatcctctgccctcaaaaagctttgtctgttagggtagagatgggtctgtgatcagctaaccatgaaactgttcagtttctgagtgcagtggggacacagaattgccttgttttctaagaaacatctccatctaatgtgaacttcacgtgggcttgcttttgtttgtgggcgccattcactgaaaaagccaggctgtaatcccagcactttgggaggccaaggcaggcgaatcacatgtgccctggagtttgagaccagcctgggcaccatggtgaaaccccatctctacaaaaacatagaaaaattagccaggtgtggtggcacacacctgtaatcctagctactcaggaggcggaggtgggaggatccattgagcccaggaagttgaggctacagtaagccatgtttgtgccactgcactccagccagggcaacagagtgagactctatctcaaaataaataaataaataaataaaacgaagagattagattggaatcataacttgtaactcgtttgtagctttagtgctaccttatggcagtaattcatactggactgtgactttgaacaaccagcatatatatatatatacgtatatatatatatacgtgtatatacatatatatatgtatatacgtatatgtatatacgtatatacatatatacatgtatatacatgtatatacatatatatatatatatatatatatatattttttttttttttttttttttttttttgagatggagtctcgcactgtcacccaggctggagtgcagtggcgcaatctcggctccctgcaaactccgcctcccaggttcccgccattctcctgcttcagcctcccaagtagctgggactacaggcgcccgccaccacgcccggctaattttttgtatttttagtagagttggggtttcaccgtgttagccaggatggtcttgatctcctgacctcatgatccgccagcctcggcctcccaaagtgctgggattacaggcctgagccaccgcacccggccacaaccatcatattttttatctttttttccccccctttcttggatccccagtcagcacattttttttaattaaaaaaaaaacttttggactaggtaatatacatgtgtcatacaaaattcaaaacatatagaagagtattcagtgaaaaataactctcacttctcagttctgtaggcacctggtttgtctcccacaggggcaatcactttataagcttctgagatgttctgagaatttacaaatttgtgtttacctgtagtttcctttcccttcttgttctacatcttagcttttgcatttagcagtttattttggagattgcttcaaatcagcaatataaaactacttcactattttattttatttttgaattttgataaaatatacataatataaaatagaccgtttaagctgtttttaagggtacaatttagtagcattaagtatattcacaatgttatacaaccattgccactatccatttctagaacttcctgatcatcccaaacaaactttgtacccattaggcaataatttgccatcttcctctccccaccccctaataatcactaatcacattctgtctatggatttgttcattctagatgcctcatataaatggaatcatacgatatgtatccttttgcgtctcgcttatttcacttagcataatattttcaaggttcatgtaggttgtagcatgcatcagaactttattcccattacagctataataattccattcttggccgggcacggtgactcacgcctgtaatcccagcactttgggaggctgaggcgggcagatcatgaggtcaggagatcgagaccatcctggctaacacggtgaaaccccgtctttactaaaaatacaaaaaattagctggacgtggtggcaggcgcctatagtcccagctacttgggaagctgaagcaggggaatggcgtgaacccgggatacggagcttgcagtgagccgagatcgcatcactgcactccagcctgggagacagagcgagactctgtctcaaaaaaaaaataataataaataaataaataaataaataattccattctttgtttttgttgttgttgtgttttattttgttttgttgagatggagtctcactctgtcgcccaggcttgagtgcaatggcacaatcttggcttaccgcaacctctgcctcctgggttcaagcagttctcttgcctcagcctcctgagtagctgggattataggcacgcaccaccactcccggctgatttttgtatttttagtagagatgggattttgccatgttggccaggctggtcttgaactcctcacctcaggtgatccgcctgcctcggcctcccaaagtgctaggactacaggcgtgagccactgcgcccggcccccattctttgtttataccacattttgtttatccattcatccattgatggacacttgggttgtttccaccttttggccatttgaataatgttgctgtgaccattggtttacaaatatttgtttgagtccctgttttcagttttttagggtgtatatctaagagtggaattgctggatcatatgatgaccatatgtttaccattttgaggaaccaccaaactgctttccatagcagctgcataattttacattcccaccaacaatgtatgtaggttccaatttctccatatccttgccaacatgtattttcctttcttaaaaatttcttttgatttttattaattaattaatttaaaaattattattatttttagatagggtcttattctgttacccaagctgcagtgcagtggcgtgatcatacttcactgcagcctggaaatcctgtgcttaagcagtcttcccacctcagcctcctgagtacctgggactacaggtacctgccacctccccaggccctattttttaactataatcattctgatgagtgcgagtggtatctcattgtggtttgatttgcattttctaatgactaatgatgttaagcatcttttcatgtacttcttggccatttctatatttttgtagaaatgtctattcaagtcctttacccatttttgtttgttttgtttttgagatggggtctcactctgtcacacacattggagtacagtggtgttatcttggcttactgcaacctccacctcccaggctcaagcgatcctcccatgtcagcctcctgagtagctgggaccataggtgtgcaccaccatgcccagctaattttttataattttggtagacattatgttttgtcatgttacccagactggtttggaacgcttgagctcaggagatccacccacctctgcctcccaaagtgctggcattacaggcatgagccaccgtgctcagccctttgcccatttttaaattaggtttttgtcgttttgaggtatgggagttatttatatattctggatattgatcccttatcagatatatgatttgcaaatattttctcccattctatgggttttcactcccttgatagtgtcctttgatgcactaaagtatttagtttcaataaagtcaaatttatctatttctttttctttttctttctttctttcttttttttttttgagatggagtctcactctgtcactaggctggagtgcagtggcacaatctcagctcactccaacctccgcctcccaggttcaagtgattctcctgcctcagcctcccgtgtagctgggactaggggcatgcaccacaacgcccagttaatttttgtatttttagtagagacggggtttcaccatgttggccaggatgatctcaatctcttaacctcatgatctgcctgtctcagcccctcaaagtgctgtgattacaggcatgagctactgctcccggcctccattaagttttaagatggcactcaccatctttgtgaaaagttgaacattactaacaaagtctaatcatatctttagaaggggtaaacagtgataccatttactgaattggaattactattaaaattaaaaaaaacagcatattcatttaaccacaaaccagtcttagttttaaatgaggaccacccaacaagatattctgtcagtcattcatgatctgaattctggtgtatgagatctattaaagtatggtacacataaaaaagtcatgagatatttgttttgtaataaataaggcagtgaccaattattactcattagtagcttttttgagttaagctatcaagtttgccctttctgccttcttaattccggcaaagatcatttttcttccagggatgtacttcttgggattctccaaatactccatcagtgtatcctctccccaggtgatgcctttgttcttattggtgtctgtgtaagagaatccagtggcctgacctgtcttccgcacgaagagaccgtggagattaggcccactcttgtgcttgtctcccttttccaccgtgtggcactgggcacacttctgaacaaaaatcttcttacctttctcagcatcacccatatataattctgtttttcatcgctggcaccacgaaggttgccactccaaagctgtacgacccactctctatcaattttttttcttgtgtttcttgtccttttggttgtcatgcttaagataccattgccgaatccaaggtcatgaaagttttcttttattttcttctaagagaaggttttagctcttaaatttaggtctttgatccactttgtgttaatttttgtatatagcttattttaatattttaaggatttaacgtcattcttttgcacatggatatccagtttttccagtgccaatttgttgagaagatggtcctttcaccattgaaattactttggcacccttgtcaaaaatcaatttgtcacatatatgaaggcttatctttgaactctgtattctatttcattggtctatacgtctgtccttctgccatcaccacactgttttgactgctgtagctttgtattaatattgaaatcaggaagtgtgggccctccaactttgttctttttcaaggttttggcagtttggggtcccttgaaattccatgtgaattttggtatggatctttctgtttctgcaaaacatgttgtgggactttgataaggattgcactgaatcactttgaatggtattagcaatattaagtgtcttccaatccatgaagacagtagctctttccatttccttatgtctttaatgtttttcagcaatgtttattttattattttattttattttgagacaatgtctggctctgtcacccaggctagagtacagtgatgtgatcctggctcactgtgttcttgacttcccaggctcaggtgatcctcccaccccagccttccgagtagccaggaccacaggcatgcaccaccacagc

SEQ ID NO: 306 - DNA, 32744 bp, Homo sapiens
  source 1..32744: mol_type = other DNA
ttacatctgttgatctgacctgactggaagcgtccaaagagggacggctgtcagccctgcttgactgagaacccaccagctcatcccagacacctcatagcaacctatttatacaaagggggaaagaaacacctgagcagaatggaatcattatttttttcccaaggagaaaaccggggtaaagggagggaagcaattcaatttgaagtccctgtgaatgggctttcagaaggcaattaaagaaatccactcagagaggacttggggtgaaacttgggtcctgtggttttctgattgtaagtggaagcaggtcttgcacacgctgttggcaaatgtcaggaccaggttaagtgactggcagaaaaacttccaggtggaacaagcaacccaggttctgctgcaagcttgaaggagcctggagcgggagaaagctaacttgaacatgacctgttgcatttggcaagttctagcaacatgctcctaaggaagcgatacaggcacagaccatgcagactccagttcctcctgctgctcctgatgctgggatgcgtcctgatgatggtggcgatgttgcaccctccccaccacaccctgcaccagactgtcacagcccaagccagcaagcacagccctgaagccaggtaccgcctggactttggggaatcccaggattgggtactggaagctgaggatgagggtgaagagtacagccctctggagggcctgccaccctttatctcactgcgggaggatcagctgctggtggccgtggccttaccccaggccagaaggaaccagagccagggcaggagaggtgggagctaccgcctcatcaagcagccaaggaggcaggataaggaagccccaaagagggactggggggctgatgaggacggggaggtgtctgaagaagaggagttgaccccgttcagcctggacccacgtggcctccaggaggcactcagtgcccgcatccccctccagagggctctgcccgaggtgcggcacccactgtaagtaaggcccttgttttcccttccctgatcccagggcatgatcgggtggtagcaaactcgggaatgcaaactttccgtagcctgcctctcctgacttagagcaagtgcttttcaagatgcagtacctgggccagcagcgtcagcagcccctgggcactggtgggttctcagaaatgcagattctcagaccccatcccagacctgccaaacaagaaactctgggtggggtccagtggtctgtatgaacaagcccttcaggtgagaatcattgtcctagaaagcagaaagtgaggactcttgcttgttcattctcttctccgtcctgggttctagttcttctgtctttaggtcaaatggctttatttctataacacagaagggaggttagagcagacatttgccagttctaacactctgactccactacattttgattttagggttattgttagtgtttgcttttagtttggatcaaaataacaattgcagtttacatttagggggctcttcccatgcgtctggatttactttacaagcttttaatgtattaactcataaagtcctggaaagtcctcacagctctgcaagatgggtgctagtagtatcatcatgcttattctataggtatgaaaacaaggtgaagttgctttcccagtcacgctgctagtaggtaacaaagtcaggatttgaatgcaggcatgtgagctccagtctgcctgacccaccactccatgccacctgccttgggccactagactaaggaaacaggtccagtgcctgagagccagaatactgtgctgactgcaatttaccctgccagggcagccccagccccaggaggtaagctgagaagtgtaggtgatgggcagagctgtgcccagggagatgctggcccatcctccacaccccctgctcccttactgtcaccatggctgaccactgaggagggagccttggttaccagcatccagggagcaaggcagcttgttagttttagtttggtgatttaggtcccttttcctataggccattgctcctcccagagcctggagagtttcctggaaagcaaacatttgtgcagggcagcagttggaagcagggccacacactcttcggatccctgatctagttcccctcagcctggctgctcagccactcacactcgagggtgtgcaattgcagggtcagcagccgggagtgaacatctccttaaattgtgtgccccgggtgcctcactcaccgcaccctacttccatttcaaacccgctacactgttttcaagccttacctttaaaagctattttcaggaaattcccaccccattctagttttgtgccctccttgcaccctggagttttaactcacagcacttacaaaactaaagccaaatgattattgatgtatttatcagtcgaatgcctgctttccctgctatgctgtgagccccttagaaggtcaggactgagtttgtattgtacatcccaaagcccaacatgcagtaaagaagtgattgctgaatgaacaaacatagttttcaaattttttgacactatttttcactggcctggagcaagagtgagcatcctctttttgccgataagaaataatattgcctgaaacgagagggtctgtggctaccaaagtggtctgtgtgtgtgactgtgtgtttgcatagtgcaaatgtgtggtgaatatgcatatttgtgggtcatggtatatgtatgttcgtgcatgtgtgttgtatatattctctgtgttgtgtgtgcattgcattatgtgtattaaatggatgtcgtgcatgtatgtgtagtacatgcaggtactgcgttatgtggtgcctatatgcttggtgcatgttactttgtgtatgtgatatgatatgcacagctatgcattgtgcaatgtgtcatcttgtgtgcatgtgtgttaatgtgcatgtattatgtgcatggttcatatatgtattgtgtattggggtgatgccacatgcattgttcatctgggtgtgtgttgcagtttgctatttgttttgcatatgttcacgtggtgcatgtgtgcacaggtattgtgttgtaactgtgtttcttgtgtatgatgtgcttctgtggtgcattgtgctataaatgcattgtgtgaatgggatatgcatatatgtacaagtgtgttgtgtttattatgcatgtggtataaagtgcatggatatgttgtatgtggcacaagtgcaggtaaattttgtggtgtgtgtgctgtgcacgtatttgtgtgtgctgtgtgtgtagtgtgcatgggtgtaatacgtgtgtattgcgtatcttgtgcatgtggtgtgatgtgcacatgtactgtgcatgtactgtgcctgtgtgtgctgtagtgtttgttttacatgttttgtggtacatgtgtgcgtatgtattctttgtgtgttgcatgtatgttatacatgtgaggtgtgagtgatacatgtgtatatgtgcaggcatgttgtgtatgttatgcatgtagtgtgatgttcatgagtgtgtgatgtgcactgtgagttgcgtggtgcaagtgtgggtacattttgtgctgtgtgtgtttgatgtgcacgtgtgcgtttatgtgtgtgtgcaacacttcagtggttgcttcttccagccagagtaaccaactcgtcttgacttgcctgagacttcccagattttagcactgaaggtcccaggcagtcgggaggaaactcctcaacccctgcgaagggagacgattggattctccaatccccagcttgccagggttctcacggaacggccgccagctttgtgcggaggtgctcagcgccctctgctggccccggctggtgcgtgcggcctgcgcagcccaggccttggctgcagactcccctctccagtctgcggttcaagctctggcgccttcccttaactggattcctcgcctgcatgcacaagagagtccctgcaaagcaaggcaaacgatctccaccctccccccagggtgacaggactcttcggctcctacccctttaaatctgggccacaatacaacacagaagagaaacaggcatatattaagtgcctgcagtatgcgggccctgcaccgctgctttcccaccaggaccagcagagcgctaggacatcaggagcctgtgcctcgggctgtagcgcaccccgtgctatcgccagccacacatccccttgcaattccatccttgactcctaagccagacaagcccctctggcccagttcctacacccaaatgcccaaactagctctgcctgttgtcctttcccccctgcccaggccacaggcctttttctgagtacctttagagtcatttctggaggtcagtttgaataggtggcatttgaggaaaattaccaatgatgcaagagcaaaaaagaaaaatatcagtggaaaagaggtcaaaagacagtctctgaaaagagaggcaaaattacagtgaacatttattgagcacttactatgtgctagaggctctgctaagtggtttttgttttcaactcttcatagaaaacctctaaggtaggtttcatttcatggatgaggaaactgaggcacagaaagatggagggactggtgccaggttatctgaccaggtgagtctgacaccaaagtcatactcttaaccaccacactacactttgccagtctgccactctccagaccagagattgggcaagtcacatgggctggaagtgttttcatcttaaaatggggagaactcacacgggtccatggggagacagttgcggaaatgcttatcacagcatccttgatggtgctgaggagctggaagccaccaggatgtcttgtcacagggcaggaggagctgggtgcaccctatgagatactcagcctgagttagaagcaacagactctgggtacattcaacaatgaagggagaccctaaaaatcccctgctgagtgaaaaagtaaggcacagaaagcggcctacagcactgtatcattaggggaaatgtaaatccatgcaaactaaccaatccattctttacaggaacagaacaaactcaatgaaatggttgtgctgtgggaaagggagggtcctcggggcagaggtggggataaaactgaatgaatactgaggcaaaatagagaagagcccatgatggaaccgcaaacaggaacgggattaactcagcccttcaaagctgctgtcaaagaaggggcgggaggaacaagcccggcccatttagcctcctgtagcacggatggttttcaaagttcttccaggccccagctctcctttgatcatcctggtatccagtgcaggggcaatgggttcctaggatcaaagaggctgctgtgtgagccagtgctttgtaatctacatctacggctgaacttgagcgtgcatccgaacaactagatggcttgttaaaaatacagattcctggcctccattcctccagtttctgattcagtgggtgtgaagtggggctcaacatttgcatttctgcaaactcctggtactgctgctgctgctgctcccaatccagagacactttgagaacctctgctctaaggcacactctttatgccgaacagactggccagagcagtgctcctcaaactttaaggtgcatgcgaatcttctaggcatcctgttaaaatgcagtcaaattcagcaggtcaggagggcagcctcagatgctccatttctatcaaaggcactccaaggtggcaccagcactgttggcccacagagcacatttttcaacagtgaggagttacaccacgacttcccaaaagtatgtgcacacccaacccccctatattgcttgttaaaaagacgtagatgttcagaccccctcactggcaatgctccagagttctgagttggagcccagtaatcagaatttttttaagctgatgctagatagtctggggaactactggtagagaaagcgagtggagagctggtagagtttgggaagtttccacgtaggaagcaatactagagtcagaaaatagaaaagagagcagagaggaacaggctccctcatggccccggcagtttgtccctaaacataaatgtcaactcagcggtagctggctgtgtgctacctgcttttaacttgcctttatggttcagcctgtgtttccctggtttatgtacccatagctgtgattaaacagttgtggacctgtggttgaatcctggtaccacctgttactgtgtgaccttgtacaagtcactcaacctctctgagcctcagttcctcaactgtaaaatgggataataataacacccttgcataaggttgtagagaaaatgagacacaacgtgtgatgattttccttgtgtattaagtccaaacagaagttgcccttatcatattcttgagtaaatggcctaggagtaagttggagtgatggagaaaaatggagctgtggatatcatattgctgtcctttttctgactgaaaagttattttctggccctggaggctgctaaatcatcataaatgtgcaggtacattggaattatctggaaagtcttaaaaactattcatactcatgctccacttccaaggatttctatttagttggtctggggtgaggcctgggcaccaagagcttaaaactccccaggtggttctatcgtgaagccaggctgcaaggccccaggtggtcaatggctcttcacagctggtggggagagctgggagggatatcttctgctttgttccccacttcctgccccagaggccataatgggcaaggggtcagagggaagggcaggggcgggagagtcgccttggctgcagctttgttgtcaagtagaagatggtgttgcaatccacgcggggtccactcagttccctgtgaagactctgtcctgccaggccgtgattcaccccaagatgactccccacaccccttgttggctgtgatagcctggcctgcaaaagaggaaggaggcagctgacagggcatcagtaaatccaagagagcagacatgcccttcgggatgagggacaagaacaggaacaagctgggcttgagacctggggctggaacttagctcaattccccccacaagagagggaagacaacccagtatgggcagtgtgagtggtgcttatggggcctggctgtccaagtcgtgaagggatgccacaaacaccaaccttccagccctcgagtccacagtggccgcagcagaggcagtacctcctctggacctccactctggatccatcaccccgcagtggggttgcagcgtagacagagctgactatatagcgcccttttttgggtcaaatgcattcatggtaacaagtgtggtagggtcttaccctgcacttcaggacaaacccagctggccttgggggttagattagatgtggttaatctgcaccttgtcctggggtgggaggaattgatgttatttactccagtgccactcacagtgtggtcctcagacctgcagcctcagaaatgcagacccttcagaccccacttaaacctactagatgaaatctctactttaacaggatccctaggtgatttccattcatgttaaagtttgagagccattatgaggccagtggttcacagcccccactcacattagaaccaatgagtcgtcatgtcaaggctccaaagcagaccaagtaaatgtgattcacaggaactcactctctaagtgattctaatgtgtaaccaggctgaggaccactgcttaggccactttaggtgactaagaacagagatgctcaagtcacttaaggtgatggagttactgcaagtttacacaggaagtaagtaaggaacagggaactgtccagacaaggttgaaggaggtggacaggagggagacccacgatccacagttcctttggggacttggccttcctgacatcctgcagcagtaggggccctagaacctggccaagtattctgtacatctgtcagctcacctcctattgtcttgtcactaacaaccactgccctctactctaactgtggtccaggaaccaacagcatcagcattacctgggagctcaccagaaatgcagaatctcaggccccaccccagacctacttgacctaagtctacatttaatgaggtcccggatggttcaagggcatatggacaccggagaggcactgagctacgtcttggcttctaccaccccgtctttgggttactgtctgctctatgacctgctatcaactgctcactttttgcatgtctaaagctcacacttcttgagatggaggatctggcaggtttctctggccgctagcctggggaggctgtccctgttaggtggaactatggctccaagatgcttcataggcctccggtcagtgttcagaccagtgactcccagtgtgtgcctgtctctggttcagaggtagatgccaggatcagagcaagccaaggatcccctgaacccctccagaagtgagctgtgagagtttggagaacctgcacaaagagaaggggatggcatgtaccttgtgacgtctgtccactgatggagaatgacaggctggcagaatcagcctccactgcagactccagccctttcctcccatctctcttgtctgcaagcttcttcatccattcttctaaggcctcagctccaggctgtgtcccagccctagcagcctcaggcctggcctagaagttggtatggtgttcccaagataagtgccaccaattacaggcaagctaggattttcttgcaatggaggaacttggctctgtgggattactcccctgttaatcttgacaaccaacttacacacttcctgagaacaagttcagtgtctttcttccttcagtgaacaaatagctattgaacaactatcagaagtaagaaggtaagcaatacccagccccaaccccaagaagcttggggtgcactgggggatgcagacaagcaaacaggctggtacatcagtgggatcagggctgagatagagaagcctatccgagtggggcgcctccactgatttgataggaactgggagtcagtatccccaaaacagctttaggaaacctggcagaaacctttctactctggccaggcaaggggagggagggaagagcgtcagtactacagccaggccatctggtgcaatgctgtgactcattctcttcagagccatcatccaaatgcatttttccaagttcacaggggatcctggagctgcaggaaaagagggtgtgcatctgtatgtaaacacaagacaccagactcctctgatcttggagtgtgaagatataaagctagcctgcagaacagctctcttaggctaagattatccctttcaatccaggacacacccctgggctggagaaaggtatcaacatccctgtgttggctaattagggattaagcccaggttgatttgagtccaaagcccttggttgttcctgtcccgctgctcccactcaaaggatgaacaaaggaggtcaggggtggggttttggacacttgagtgacacatacaaaccgagatagtaaaatattcaccggatatttcgttgaagcagagaagttagcctcattatttaacaataaaaacatacatttcttcctggatcctctgcataagtccctagtcacttggggccttgctttatgatgttcaagagcctttgccatgctctgcctcattggttggctcagcaatgctatgaatgtctttccttcagttcctggtacatgccagccctttcccacctctgggccttagcagaggctgtgacacctgccaggcatgtcattcattccccacctgcactctctctctgggctgtgtcctacccacccttcaggtcttggctttgatttcacgtccctacatccagaacgtctcactacagctgctgaataatgatttggttatgtttaataggacataaactccatgctattaggggctatcttagtttaggtttcccctaaagaagatcctgaaagaaggcttcattttgccggttatcccaagaagcacgggtaggggctcaggaaagcggagcagagatgcctgagagaggcatgtgttcaaggcagctacctctgtgggcagctggagctcagcccttggagacagtgtagaacatgcatgcatctcagcgcttcctaccctctgcccttaggggtgagggtgctgggtgtttaataaaccaactcttttcaatcactggctgagcacagctcactggggtggggtaggggttaattttccagctcttcagggatgctctgactggggaaatcacactggtcagccagagaaagccctagggccattagaagttgggccgtcctgtatcataatgagatggcccaagaggatatgggcaggggcaccacagattgtggtcaggcatcatgtctatttcattcatctttcagtcctaacacataataggctgtcaataaatatctgttaaatgacttgatagagagatggaaggtgaagattaaagagaaaatcagaatgaagataggcagtcctgtctagagcctcctcaatgaataaatatcctgtttccttactctgagcttcctggcagccacactgaaaaataaaaaaagacgatattcttatttgtattcttcatgaggaggaagcacactgttgctcagatgaaggaaagtattttgtggcacttatatctgcaaggacttttcttccaaagcatcaaagtggagataacaagtgacagggggacaacatcctcaataagttccctcggtaatggagagcaggtttcctaaaagtgattcttgcattgttccctgatgaaagctgagagcacgatgacaagcacgactccctgtaagcacatttgtaaggcagccaagactgaggggtcaagtaagttgccttttgaagaccttaaggaatcagcgtagacagtgcagaatgtgtggaggaactgatggatcgcatgtttttcaaataaccttccatcattgtccctttatgactctgaatccagaacattctgctcgcactgtagtccaagatggtgatagacagacagatagatagatagatagatagatagatagatagatagatagatgatagattatagcaatatactatcagctatttgccgtgtaactttaaacaggtcatttaagctctctgggctctagtttcctcatcttaaaaatgggaaagtgtgtccatgatctagtgctgtataacgcaccttatcaaaacttagtagattttaaaaaatagatatttttaaaactttggtgcttcaaaagatgtcatcaagaaagtgaaaagacaatccaagagtagaagaaaatgtttgtaagtcctatattgcataagagatttgtatccaaaatacaaaaagaacccttacaacccaacaattaaacaacaaaacactccattttaaaatgggcaaaggatttgaatagacatttcttcaaagaagacataaaaatggtcaatagcacacgaaaagatgttcaaatcattagtcagtaggaaaatacaaatcaaaaccacaatgagatgacattttacccccactaggatggctgaagtaaaagacagtgcaagtgctgacaaggatgtggagaaattggaaccctcacacattgctggtgggattgtaaaatggtgcaactgctttggaaaacagtttggcagttccccaacatgttaaacatggagctatcatatggccagtaataccagtcctaggtatatactcaagaaaattaaaaacatgttcacatgaaaacttatacatgaatattcatagtggcattagtcataatataagtcaaaataggagcaatccaaatgtccatcagctgatgaatggacaaacaaaatgtggtatattcaaacaatgaaatattaggcagtaaaaagaaatgaagtactgatatagactacaacatgattaagcttgaaaacattatgataagtgaaagaaatcagtcacaaaaggccacgttatgtcatttcattcatatgaagtgtccaaagtaggcaagtctgtaaagacagaaagtaggttagtggttgccacgggctgtggtagttgtgggagcagtgggaagtgactgccaatgggtagtaggtttttgggggtggggtgttgaaaacgttctcaaattagacagtggtgatggctgcacacctttatacttgaatccatggaattgtacactttataaaggtggacattatggtatgtgaattatatctcaataaaaatattattaaaacattagtgatttcaggccgggcgtggtggctcactcctgtaatcccagcactttgggaggccgaggcgggtggatcatgaggtcaggagttcaagaccagcctgaccaacatggtgaaaccccgtctctacaaaaaatacaaaaattagcgaggcatggtggtgcatgcctgtaatcccagctactcaggaggctgaggtgggagaatcgcctgaacctgggaggtggaggttgcagtgagctaagataatgccactgcactccagcctgggtgacagaacaagactccatctcaaaaaaaaaattagtgatttcaaacaataaccatttctatgttatggttctataatttggaccggactcagccaggcagttcttctgctgatctcccctgggttcacccctgtggctgccatcagagggcggctgactgcactgaatattaagatggcctcactctcagacctggcagctgatgctggtcctcagctggggcactttagtttttcttcaagcagactgtaatcctctattaggctacgttggtttcattacatggcatctcatgacagcaagtggaaggccttgaggcttaatcttgggaattctcgaatgtcacttctagtacattctattggtctaaggaaggcacaaggccagccagacttaggggctgaagaaatagattccatttcttgatgcaaggagtggctgactcacattataaagaaacacgatgaacagatatgttgtgaccatctttgcacacatgaaaattcctatttcaaagggcatttgggaggaataaatgtaataattcttgtaataattcatgctgctaaagcacagcacctggtacataggactcctcatgaagtggtggctatgataaatattaataagacacctgcatcacaggtgctaccctattcctccattctccctcagtgaaaacaaatcatagactcaaaggtggaaggatctttagatattacacagtgaatccctcagtgtcagatgtgggaacaagggccagaggagagaagggagagacttgtccaaggccccttatctccattccctcaagggggattcagaggtctgagcctgatggaaggtcgtcgtccagggcatgtggcacatctagcacatctagcctcacgctcttccccccagaccattatcctggctccggctgtatatacttgtaagggggcgtctcagaggaaaagaatcacagaaggcaaagtgttgcctgtgggtgaaggaagaggaatcttccccagtggtggaagtgagaagttacaggaactcagttggcacaaaatggcagccataggtcgtgtcccatcacagacatgtttgtttggccatgcagttttatttaaaaatgttggattagtggtcaacatttaaaaattaagatatttcccagaaacagttcaggtttctggctttttctgaaaatcaggaagatgtggcaaaactggactaaatttcctcccagtgacatcagctgttccttttaggtgggccatgtggtctcgggctcactgaagcacccacagggcaagagtcacatctccctggctggtgtttgagcttatgctcccttcaaacctgaacaaaggggttggagcactaggaggggatggtgtagatgcagttcaggacctttcaaagatctttgttggctggaccttagccagcttcctaggtttccagtggcttctctgaattgctgctcaaaccctcctcctagttctggtctacccacccctcattccttagtgcctgaagctctgtaaggttgggtgggagcgggggaggaagagtggatagattgcaaagcagatgacaggtccttagcaccatttccctctctgtcctcacttccacctccctccttgtgtcctctctctccaaggtcctcatgatgacatgaggagcccagggttcccaaacatgggcgagtagggccataccatctggaccatttcttattgtctcctcagcatctcccaaaacttacacactcacatcagctaaggagttggatgctttctattacaagctttatccttctgaagggaagtcatcctgcattttaacaacaacaacaaaaaaaggaagccaccaaagccactggatgagcaagaagattggagagctttgctcccggtggcagcctgaatcacaggaaacattttgctgttaggccagggttctagggagattaggtccaacaggggatctagctgaactccaatcacccacctggcctcctttgcctgtaatccatgaggtgaacagcaccaccatgttgcataactccaagagacaccagtgcatggtgatctctgagcatggcacccactggtgttgggcaatgcaccagccctagtggttgagatgaggagtaaatgagataatgcatgagaatatcctacaaatatcagtgattgttattcccagaataccagcccagttcctctgctatgttgaaggacatcctcagagacatgttcagacaataccagaagccagtcagcacatttttacctgaaaaatagtaacagcttccagttattgaaagcctgctgtggacaaagcacacaacattttacatagccctttaaagtaaccctacttgttatcctcattttatagatgaagaaattgaagctagaaagatatccaggcacatgagaggtttgcaagaatcaacaatagctagctagcattttggggctcttactatgcataagtacttcaaatgtattagctcatttggtccttccaacaacctcattttactgatgagcaacatgagtttaagtaaattgtatgttcaagatggattaatggagtcaaaaagattgtgagaaatgagaattagtgactgaagtataactgagtctgttggtctggagactgttgaaagcaaggatagttctcagagagcttatggtacttgcccaggtcacataaggacagactgggatttgaacccaatgccaaaacttcgccttttatccacttgataaaacatcagctgaactaacacatttttgagcaagtttatcaaggtgaatggaattgcagtttggccgctttcagggactctatttgcttgccacaccctcctacttggttctgtgctgccacctggaacaatgagagaggattcatcccatttgcccatacctgcatgactgtgctgcccataggctgatgaagcccatcctgggatgatgaccatggactgccataagcctgtacatgtagttggtatccctcccttccactgttgtctgggagctaaacagtctgcaccatcctcaggctccccctccagcccactagaaacaaaacaatccctggctaggccgggcatggtggctgacgcctgtaatcccagcactttgggaggccgagatgggaggatcacgaggtcaggagatcgagaccatcctggctaacacggtgaaaccccgtctctactaaaaatacaaaaaattagccgggcgtggtggcgggcgcctgtagtcccagctactcaggaggctgaggcaggagaatggcgtgagcccgggaggcggagcttgcagtgagccaagatcgcgccactgcactccagcctgggggacagagcgagactccgtatcaaaaaaaaaaaaaaaaaaaagaaacaaaagaatccctggcttttcttaaaagcatctaacaggccctgagacacaagactttgtcaaatttgggttataatatttagttccacactccaagccatgttgtgggtgctgggccttctcacaaacctcaggctgggtccgctcagctgctgctggtcctccactgaaacaccagattatttccacggtgattttcagctctggtctccaggcagttctgcagttgcagaacaaaccacagctgtcggtttacgtcttgaaggctgcgtgaacttctttccctgagagaggagaaggattctttctgagctgatgccaggagacctgcctccacagcttggcggggcatcccccatagccttgtaatggctttcaagaacccatttggcctttcacatctcttagcagcctgtttagtttatcccactcacactccctgcccatccattggttcaccatcttctctctcactatgaggagagaagttacatctgttcataaaaccccaaaattcctggagcaaggggagtctatgaaattctctttgaaatgcttgctgtccttatttttctgcctccttcttcctcctgctgcgggaaggagcccccaaagaatcaagaacacacactttcaaggctggaagagcctgagaggtacctcttgtagtaatgggacatctgttaataatggcagcaaacgcatggtgctcactctgtgccacccactgttcttggtgctttataaagatcatttcatctccacaacagcaaatcccaaaaagtgggccctacggctacctttctgaggaaaccaaggcacccagaagctaagcaactttcccagggtcatctccgcagctaggaagtggtggagcctcagtgtccacaacctgagttaccaggtgagactgccacccggcagagaatgttctgtgaaatcaaagaaaggaacttgagtgccctggtcaccatttaactagcagagatggaagctctcacatctccttactttgagtaatatgcaaggagtgtgatcttaaagagctagagtttaaatacaaatttctttcattgaaggaggccctgctccatgccaggcactgtgccaagccctttatcaaacttatttctcccaaaagctctgaagtggacactgttgggaaacccaaacttgaaagtagttcagtggatgtctcatgctatactgtagaatagttgtttaaagatagctataatttgcaaagatgatcataaatataacattcatactaattacattgtgtctttttggaaaatggctataaaacagtcactgtctattgggtgcctattattattctttgattctctcaatgggcctaaagggtaattatggttacccttaccttccaaatgaggaaactgatacctataaatattgagtgaattacccaaggaaacttaggaagcaacggagtgaacattcaaatctaaatatgtctgattctgaagtctaagttcttttgaccatcttactacaaggatacatacaccacacgcacacacacgtgcacatgtgtgtgcataacacacacttgtgttgtttccaattctcatagtctatgaattgagacagagaaaggagccaggcatggctggcaggcatagccgtgctctcttcttggagcagacaggactgactttggtaaactattaaactgtccccacaggaattccaaacccagggctctctgtcccaaactcctttcctatctcagttggcaaatagccagcctcccggcaacaagcccaattaatagtttagggttttttttttcatacccactaaattcactgaggcaaaatttcttttcacagccaccagtccctgtctaggacccctgggtttacccaaatgcatggccacaaaagaagtggagaggatatgaggaaattttgcacctgtttgtgagcagtctagagcaagtctgagggcagagcagaaattctcagccccaccaggggagaaggggagagaatgaagggggtgaaagacctcagcaaagactatgcatgtgctggggacgcagtcatctccctaaaaccttacagggaagctggttccattttggacatgttatttgagcagccctgaactcagactataaaagttcatataaagttcattattttatttgttttaagaatggttctcagaatgctgccatgcatttagggacttcttgctaaagtccataggaatttatctttcaaataagtgttagatgggtgttaaattttctctttaaaactaatatgatatttgagttaacagtattgaaccatgtcggattcctggttttgctcattgtggatgattacgtgagatattttcatgatggggagctaggtaaagggaacataggaactctcagtttcttgtcagtcttaaacgatttcaaaataaaaagtggtaaagtgggaattgaaagaaaaaattactagaaagagtgttgctttccccaaaaaccttgcatgtaacttctctaatggtgataattctgttgcagaataaacattttactttggctaccagggatctcagagtcaaatttaaattcattctagaaatacctaggcccttataacctatatatttatgttctttctccaaatgctgactttctaaatttacttatattcctcagctcctgacttttcttccttatttttattttaccatcattttaagtatttgtattgtgtgtatttttttgtgagtggcttcaaatcatttatggaaataaatagcttgtaaatttataaaccaacaaaataattagctcctttatgagatgtttatgtgtttttaaaaattatttaggaattctgcttaccattacctagactcaattctccctctctacacaggattttgccctgagagtcacacacaggtttcctgtgcattgagagttttctgcctttcttaggactggtaccaagctagggagcagcaagagttggcacatcttagaaggtgtttccctcagacagggccagcctcagcctggttgtcactctgcccgcagttccacctcacagattcctttaggtgtccgaagtttggggtccttgagatggctcctattcaaatgtccctctgaggaggaacatagtttgagcagcagctgcaactcagaaagaggctcttcagaaacacacgttaagaaagtgccttttgtaagcaagtgtgagctatatactgctccatgtatcaggttgttataattcactccaccctggacccactgattctcaacagacccaaagcaaggcaaacaccaagcaccctgttcacagacagcccctcagcagagggaaatgcaaacacccctgctatccagccataagccagcaaagtggaaagggtgtgagagttttgaaggtagaacattcagcgctgccacttgccagcaatgtgagctttgatgtcttcccttccctcgaagcctccgtttccttatctgtaaaatgggagtaagatagcccaacccacggattaattatcagatgaatgtgcagtgatatattaaaggccttgcacggtgtctggcatgttgttggcactcacagacactccatccttgttttttcttccataaaaataataagagcttaaatgtcttctcttttagaagtgtctgttcatgtcctttgccctctttttaatggggctgtttgtcttttttcttgtaaatttgcataagttccttgtagattctggatattagacctttgtcagatggatagattgcaaaaattttctccaattttgtaggttgtctgttcactctgatatttcttttgctgtgcagaagtgcacatgtatgtttgttgcagcactattcatagtagtgaagtcacggaatcaacccaaatgcccatcaatgatagactagataaagaaaatgtggtacatatgtaccatggagtactacgcagccataaaaaggaatgagatcctgtcctttccagggacatggatggagctggaaaacattatcctcagcaaatgaacacaggaacagaaaaccaaacaccgcatgttctcacttataagtgggagctgaacagtgagaacacatggacacagggaggggagcaacacacactggggcctgttgtgggggcatggggagggagagcatcaggataaataactaatgcatgtggggctgaatacctaggtgatgggttgatggtggcagcaaaccactatggcacatgtttacctatgtagcaaacctgcacgtcctgcacatgtatcctggaacttaaaataaaattttaaaaaatagtaagtgctaacatttaaaaattgtgtgccaggtgctatgctaggttgtaggaacataaaaataaagaaaatagtgtccctgaccttgaatggatgacagagattactggacacttaactacacgcatcatcctatccaagcctcaccacagcctcggggagtcctgatcttcccagaaggccaggaggggtgtccctaggtcatttagttgtgccagaaatgtaggcctcaggcccaagccaaagactagagcagaggttctcaaagtgtggtccacagaaaacagcagcatcggcatcacctgggagcttgttagaaatgcaaattcttcagccccactccatctccagaaactctgggggtgggccctgcagtcagtattttaaaaatcccaccaggtgattctgatgcatgctcaagtgtgagcgctgtgagggtgataatattgtcattcattctcattttacagatgaggacagtcatttgctgaggatgacggcaacgcttctcaattgcaatgagagggactttggattaaatgataaaggagctcttgagatctgagaattgggagatagtagacagcaccactatgaggcgtaacaggttctttttatatgggaattttaagagatcccataggacagccatataatgggggcagctccagccagagcaaaggaagcgagttagagggtgtggagtgtttcttgtggccttctcttccccatggctctctggctctcttccctgcaggtgtctgcagcagcaccctcaggacagcctgcccacagccagcgtcatcctctgtttccatgatgaggcctggtccactctcctgcggactgtacacagcatcctcgacacagtgcccagggccttcctgaaggagatcatcctcgtggacgacctcagccagcaaggtagccacggctttcctccaggctcgtctgggtgagccttaccccctggcgggtggagttctcaagcaaaagattgaagtttggaactattttaggcaagattccccaactacagacctccagatgaggattaatgggcaagtaacttatgaatgaagagccactggggaaaccagtaaggcagtgggggctgcaagacagagaaggagaaagagccctgcaggggaaacagccctggggagggtcttgaggggtgtcgcctcagcctgatcccgtggggatctctctcccaggtgccacccagtccaacaatcctctctccaagacactgaagaatcacatagggcggccctgttgtgagtgctcactgcctcctagaccctggtgcagcactttacacatacgcacatatgtgtatcggtccttcactcatcatggcttagacagacccactcactttccagaggaggaaactggggcccagagaagacagcagactggagcggagtcagccaaaagcagcagagtcaggcccagagcccagacttgcagaacctgcctgtgtgcttcctctcacaggaacctggctactagggacagccctaaaagaagatggagacagagaagcccccacttgactcgtaggtcagtggctctcacgcttgagcatgcatcggaatcacctggtgcgatttttaaaatactactgcagggcccacccccagagtttctggtgatggagtggggccgaagaatttgcatttctaacaagctcccaggtgatgctgatgctgctgttttctgtggaccacactctgagaacctctgctctagtctttggcttgggcgtgaggcctacatttctggcacaactaaatgacctagggacacccctcctggccttctgggaagatcagaacgctctgagggaagccgagcattcacgtttttctaaggggaataatggagaagggctagggtagccaggtgcctctgttagttctttctacggtcctcactccagggatgggcctagcctggccatagcagtgagtcagattagccagaggctctgggaacacctggggttcctgggtgcagctggctgcatattaggcaggactaatgaacaggtgcaggacagggctgggttggcgggtaaagtgcccagagactctccaaaccctcaagtggggcggggtccgcccaagagcacacctgtggtgaggcccccaccatctgatgagctgtgttacgtctgtgcccctcgggagtacggaaagtggaggagctgggccccagagaaatgggctaccccagagctggcagccccaccagaggggatctggatcccctgccaagcaattaagctgccccctcctggccaactccccttctgcccctcaccactgggttggctctccatccagtggccccatatttcctgttgacattggggtgcaaggccttttccacaaccaagggcagcactggttctatttctgcaggtccctctcctctgtgtgcttgccaagacccagatcccagacaagcaccaccctgcacactgtttttatttaatcctcttggccacccagagaggcagggcttatcaaccctactctacctgtgaggaaaactgagacagaaaaagatgctgcgggttgccctgagccaccttgatgggcttccaagccgatggtcatgacagcatagtgtagtgtgatagaatcagctagatgggtttcagggtattcgtctggggtggtgatgcccacaccaaatcattaaatcagaaaatgcttgcgatgaccagcccatgatgaccctttacaagtggaagtcagtattactgctgttttctggagggaaggagttgaggatcataccagctttttccgagcactataccactcagacatgggtgctcttacccacttcaaaaccctctgagaatgccaaacaaccatcgcagtctggaagttcttccttatctattccgaagctctcttgctagaagtctgtcctaaataatactaacaagggttagaggtatagctgaagagaccagcagtcagcccaaggagggcttcataaattaatgtttggtgggaatatcagtgaaggactatatttggctgcacagaacagaaacctgctgcagtgacttaaccaatgaatagagatttatttttccttatagtatagaaagctcacagggtggcaatgcagtattggtgtgacagctccacaatgccattggacacccaccttcatctgctttccacttcaacatgcttagagagtagttttggcctcataatcacaacagggctgctctacctctggacatcacatacatatttcaaatagggaaaaggcgaagaagagataggcagaggccagtccggtttgtgctcttcggaaaaaaaaaattagtaaaataatagttttcccagaatcctttcattcattttatttctaccagagctgctgccagcagtgacaggaagtctcgagagatacgtgtttttagctgtcccgagaaacatcaaagttctgtcagtacagtggaaggggagaatgaatggtgaggaagatgttacatttagcaatgttaaagccaatgaagtcactgaggggctgcttctcagatatgcaagtccagaaatgttaatagcttgactaacagagattcctctctagggagtggaccagggctgacagtcttaccagaaaaataattataaagtaacacatcaacgaagcattttaccagtgagaattgcaacagcccagtgactgggactcctttcctctactgctcaggacattgttcaccctgcagaaaatccatggtgcttagaagacagattcccagggaaggagtgtatgaagtctgctgggggctctcgggtggggctgccttaaccttctccagcctccccagagatccagctaccaaagcagccaggctacttgtatccacagttaaggccacctctgggctggggaactgggggggaaattcttgctttttggctcagttctgttcaatgcacatgtactgagtgcctactgtgggccaggccctgcactaagggttagagcagaagagatgcattaggtacaacccctgtccttggggagatcttagtccactggcctggggggactccccatttccaagacttcatggagaccactgcttctctgtgaacacattgttccttccatctccactggcttgttcctcttggtgtgtgtgtacacagacatgcacacacacacacacatgcactcacacacacaatcaagttattcttatcttaaacacaaaacctaacaagcttctctcatcctttccgtcatcttcttaggcctctttttctcccttcccctatagaatcaaccttcctaaccgtctggactcttggtctcagtttttcatcttccgttttctctcccggacccactgtgttgcagactcccctatcaactgcaatgagatctctttgaccagcaccaccaatctcctaccagctgccaaatttaatggagccttttgcctttgacttccttgaccactgtcttaggtcaggtttcctgaaagcagggcctgagatggagattcacgtgcatttgatttttttgagggtgtactctcaggggaaatctgtaggggagtgagtgatacagaagagagagagggaagagctgaacaaatatgtggtttcaggtgaagtccagccatagcctgatcccatgggggactctggagcacaggctgcactgcggggtctgtcttgctttttaccctgcaatggtcagtcattgaccatgactggggctgggggcagcatcctgcatgactgtctggcacctgcagcagagaccgttttaataccccaaggcaagtctccagggaagggttaagatttcagttagcacccacagcagctggggacatgcaaaccaaaccaaaacagttaaggggagctcagggaatctgagtaggacactatattagtctgttctcacactgctataaagaactgcctgagactaggtaatttataaagaaaggaggtttaattgactcacagtttcgcatggctggggaggcctcaggaaacttacaatcatggtggaaggggaagcatgtcttacatggcagcaagtgagagaaagagagagagagaggaggaaaaactatcaaacacttatataatcatcagatctcatgagaactcactatcacgagaacagcatgggggaaactgcccacatgatccaatcacctcccaccaggtccctccctcgccacatagggattatggggattaccactcaagatgagatctgggtggggacaaagagccaaaccatatcagacaccaacagtatctgctacattcttgctgctgcatttggagaatgttagcaagttctcccctttcctggttttctgacaccatccctctaatttttactggagagaatcatggcccaccccaacctaaccaagcatcttacatctcagcaacaaccacactgtagtaatgttttcggttcttaggacccaggtgctcaccacagcttccaaaagagagttgctgacgattgtcttagtcacaatctcatcggttgtggcatttgtcattccactgaccacaaccctgttgattccaggacaactcaagtctgctctcagcgaatatgtggccaggctggagggggtgaagttactcaggagcaacaagaggctgggtgccatcagggcccggatgctgggggccaccagagccaccggggatgtgctcgtcttcatggatgcccactgcgagtgccacccaggctggctggagcccctcctcagcagaatagctggtgacaggtaacttattccctgggcttgcaaagcaagacatggaactgggagaaacagtctacagcatcagccactcacagagcaacccacctattaattcctgaatctccattagagagtgatatattcccttcgggttttcagatgtgtaagttttttaagactatagagttagagttggaaaggaggttagaggtcttcatctaccttgctttatagataaagaaaccgaggcctggagaacagcttctatgaggttgcaaatacttaaaattgtattaaattgcatgacgagggtaacaccttaccatagctatcattgcctttggtgaaaatttggcaatttttttttctttttctttttctttttctttttctttttgtgatggcgtctcgctctgtcacccaggctggagtgcagcggggcgatctcggctcactgcaagctgcgcctcccgggttcacgccattctcctgcttcagcctcccgagtagctgggactacaggcgcccgccaccacacccggctaattttttgtatttttagtagagaaggggtttcaccgtgttagccaggatggtctcgatctcctgacttcgtgatccgccctcctcagcctcccaaagtgctgggattacaggcgtgagccaccgcgcctggccgaaaattcgtcaattttaatcaagcttgtaacataacctggggaaaaagtctctgaactacactaggccgtagattactcacccataaaaagaaaacattatgttctctgatcactaaacagcattctttgtttccccagtttatataaggggtccctaattttctacctaaggccagtccttggaaatgtgaagttggagaggactgcattacattaccctgtagacaagcatcttaacatttttcttgatcatttctctgctctccttcccccatctgaccgtcaatctctttctcacttccttgctcaagacaaacagttcctaaacatgtctagtcaaacattaccctcaatctgaatatcctacccaggaaaactgaaacctggtggctggcccaccttggaccacctcaggcataccacttggagctcatgtaggcatgtagcagagtagaaccacaatcaataattgtttgatggtgcccagcaagacaggaccaatgctagaaccaagccttatgacttctacccatgatgaatgtttattatctcacctgaagttagggatgatcaatcaaatataagaaaaaattcctggaccagatcggaatgaatcctggagacataggagttaccatcagccaaatggagatggtttcaaacgttcaaatgacagaaagtaaattgttaatagttcagcattccattttaacaaagaagaacaatcggaactcaagtgagatcaagacagattaatgtttcccagtttcatgagacagattgtctcttgactcacatctcataagaaaagaagacacacataaattcagcactaggacaagaactaggacacaaaaatgcacaagctggccaggcacggtggctcatgcctgtaatcccagcactttgggaggccgaggcagacggatcacctgaggtcaggagttcgagaccagcctggccaacatggtgaaaccccatctctactaaaaatacaaaaattaactgggtgtggtagcgtgcgcctgtaatcccagctactcgggaggctgaggtgggagaatcacttgaacctgggaggcagaggttaaagtgagccaagatcgtgctactgcactccagcctgggcaacagagcaagactccatcccgaaaagaaaagaaaatgcacaagccctccaaagctgccatttttgattctgtttcatgcaaagggccatcttgaaatcagagcgatgtctatcattggagtcagactctgaagttgatcttgcccatttcccatctgattcccattctggtatcacagacaggtggctctcagagggaccatgaagatcatcttgtcttacctcatgatttcgctatcgagaaccctgagttccaggaaagtaaaaaagacccctcagggtcacacagccatttgacaactgggctgttttctatgctgcttttatgcagacatttagaaatgcagtaattaacatcattaaactttatgtatgtgtaaccctcgcagacttctttcatatgccttctttaatgacccccatgagaggcctcaggcaggtattttagcttctgttttatagggggagaaattgaggctcagagaggtgacatgatatgtaagggcagataattcgtagctgagtcagattttctgactctgggtccagtgctgtttttattgtgtacattttctttttaagagttggagaagctggtcagggaggaacattagtcatccctaaccccacaactggttatgagacatgtgttacctgctgctgtgagtccctcgtatctgcttctcacatcggggccccatttcccagagctaggtgaaggtagaaagacgtggcactacctcagtgtcctaggctagaaagaaaatgaggctccctgggaagccctttgtgattaagagacattctagtttcctgtgcccttcccctctcctcttttcctctcctgtctgtctctgcctctctacctctctcacggtctttgtctctctctgtctcttggtcactcattctctctctctctctctctctctcacacacacacacacacacacacacacacacacacacacacacacagtgggcctctgatcctggtgtgttactggcttgccttcctctttgggttccatctcttctgcgtgatgtgaccacattttcatcatctctacacctcattcatggcttcttgtccactgtgttttctctgggccctagtgtccagcttttaggcactggcaggtgaggatctggaagaaaagccacctttctggtatctgagtcccactctctccactccacctggcaacgctctatgagctgtggcagggagagcagcctcattcagtgtgtgctttactcccccagggacgtcgcccacgtgcctcatacaaagccaagctgtggaaggcatttggtgcagctcctcacatggagaggagagggggcccagctgtctccaaggcttgtgtcaggagacattctgtcaccagatgaggacacagtgcccaaaagacagaaaagggtctttaagagctcttataaaaaaaaaaaagtggggtgggagtggtgagtgaacagtgcagtaagccacaaatcagctctttcaaagagccgtagcctcctccacaccctggccaaggaattcagagcctgctgaccagcctttgttccctgtccctgcctagcaggttcccactagccatgtggcaactttatttgaattggtagaaatcccttcctcatgaccattcctcctgactcccattcctcagaaaattggtcataatatactgattttattagaataagacatcttaatgccaactgtcagcaagttgttgaaataaaaatgcaaatttacagtaatgataatattagagatgttctcttgggttgcacagtgcgcaactcctgtaactgttcatagcaaccctacatagagtctccctatgggcaactgattttagggcagccctgggagatgctgattgatggccagtttctacacaaagtaacaatgatgggaatcaagactagctgttgtatccagctctcagctgacttgtgttgactgccagctctcatacccaagccaagcagtggaagccatacccctggaaggatgaaggtttctaaggggaaagggacagtcttgaaaggggctgaaagatgatatcatctcaagaagctgaacaagttatctcttacttgaaaatgggtctggtccctatctgcgagacatccggtccttcaggatcagccaggggtgctatggggagaagcaatgtggggcagggagaagaacacctcccactctgccctttgaagggttaaatgatggaaagcagtgtaagaaccccttgtgcttgtgcatgtgagtcagtgtgtgtgtgtaagcatgtgagagtctgagtgtgggggggagcgagcatgtgcgtgcgtgtgtgtgtgcgcgcgcatgtgcgcgtcaaggagcagcaggaggtcaggatgcctcctgcccccccagagggagcagccttctttggctcaggtgccccaaggaaactctccagcaaccatcgtacttcatacccttcagcatgacacgtcctcgtatctgcccctggaaaagccgatgccagtcctgcggtcacaactgagcagcaagagcactgggaagggagaattcagagccttctgcttctagtataagagactttccacaaacaccaagaatacgcatgaactttcaaaatggcttgtgtatcatggaccttgaggaacatccaggctcacgagaattaacaaggaatgagataaacgagggcttattctttattgtggtaaaaggttatgggaagcttgaaactacagttagctcttgaatatctggacagtaatgtattcgttgatctcacgtatttcagtgaaccagtctttgttggcagcttgactccttctgtttgccttttgaaacataagcacttgatctcctggaacttaggctcaacataggatcaaccttgtacctgcctgagggttaaaactcaattcacaggtgagggactgacgaagtaagcagacacttccagctccttccaagtcaaacgaggtcagctcgctattttgcttgacgtgaattccaagaacaccagacacatcggtaggtacaaaaccacaaagctaaatagaagactgtgggttttttatttgaattaatcaccgtttttgagtcagtagactacagttagtaatttagtcctgctaggcagccactgtggtccatgggaataaagaccaaaatagaaaacactcctcacttcattcactgacattttattctttatctctatccaaaatgtactcagggaagctcatgattaatcactcttgtatacagttaaaatagaggaaaaagaagatttcagaaaggaaaagagggtattgggaatcaggggtaatacagttattagaagtgagttttacatgtgactctgagcttccagaaagacaaaacaaaaagagaaacataatgaattttagaattctcattttctaataaaaagcaacgtactcctttgttaagaagtacacagcacaggctgggtgcagtggctcatacctgtaatctcagcactttgggaggccaaggctggcagatcactttgagctcaggagttcgagactagcctcaacaacatggcgaaatcccatttctacacgcacacacacccccacactagccgggcatggtggctcatgcctgtagtcccagctactcggggagctgaggctgaagaatccttgggcctgggaagtggaggttgcagtgagcgcagattgtgccactgcactccagtctgggcgacagagtgagaccatttaaaaaaaaaaaaaggccgggcgcgatggttcacgcctgtaatccccagcactttgggaggctgaggttgggggatcactaggtcaggagatcgagaccatcctggctaacacggtgaaaacccgtgtatactaaaaatacaaaaattagccgggcgttgtggcgggcacctgtagtcccagctacttgggaggctgaggcaggagaatggcgtgaacctgggaggcggagcttgcagtgaaccgagatcacgccactgccctccagcctggataacaaagcgagactctgtctaaaaaaaaaaaaaaaaaaaaaaaagaaagaaagaaatacacagcatagaggtctaggatgaattgattgcaggaatgcttgaatacaagtccctttcttgtcctcttatgattgctgaaggtggcacaaatttcatgcatttcttcctaattcagccacacagttccctggctcttgattccaaaattccacaaaatgctttgccaatagccaaatttatccatctgcctgattcattacacagtaagtggaggctctggaaggggctctgggtgccctcatttcctccctggtctaggttctcagttttcttaggtcaatacagggtaccccaaaataggggaaacccagagggattatgttccctttgccttccagcagaaacaatgtgaaagaggcaggaaaagcatattaagatccttgctctaaatatagaccccacaactccttacacttatgtcagttacctaaagccatagattaaagcagataatgaaatcatggggccaccctggctctatccaagacaatggaacagagatggaatttgatggtagtgtaaacacaatgtggctagtatctcccctcccaggaatctcacttctcttagagtgatatcttctagccaccctgaagttcaggcctgattcattccatggcacagattgaagacataattaccatgacaggccagggggagaaaatgtgattgagatattggctaggtggatagcagctcctgggacacct

SEQ ID NO: 307 - DNA, 32744 bp, Homo sapiens
  source 1..32744: mol_type = other DNA
gcggggcccagcggcccgcagggaggcgggagcggcggctgcggcctcagggcctgtgagctggaggcactcgccatggccaagtcgggtggctgcggcgcgggagccggcgtgggcggcggcaacggggcactgacctgggtggtaagtggctggtccccgggacgggcggctgcattgttccgggcccgcggcgggggcggaattccgaacgggcgggggaggggaaagggagggaaatcccgtcccccgaacgggcgctccataggggcctgtgcttgcagaatcctccagcccgctccccgcgccttttctttctttctttctctgtacgtctctggaagtcctgactgccagagcgtaatgtgtacttgaaactttggggggacaaaaccgcgaacgtaacatacagcccccgcttcctctcttttctttttaaccagactcttccggggcagccgaacctgaaatggtggggatggcgataatgcaagtgtgtctgtgtggggcagcattttctccaaatgtagttcaagaaaaccctgggaaaaggggtgtgtgtgtgtgtgtattctaaatgcagctctttctggggctttaatctcaaagaagaatgcattgggatttctacagcaacttgcacttcaatttggaaagcctcattcaatgcgctcaattgagagcgcattggggatgactttcacagcagttaatactgtaggtcgtccctctgtcagggtgagattattaaaagaagtgcttgtctacgtcagcatcgcaggtgtaacggggtgagggctgaatggatgtcctggagaggtgactgaagtgcttagtcctgaagttaaaggatttcgacgctcagttcttgctgggaagtagaagtaactgcagcggaaggaggaagggagactggattcccacgacagatcgataattcgccggcatttcacttgctcagcgtagagttcagaccagggtcatttcctatacagaaaacctaggtatttcggagaaaagtaaaaagtgttacatttttctggacttttgacggtctgttcccccgtccctgttttaaatacctcaagggagctttcatataggcatttttgttacttagttcgttttctctttgtttgggtgaggtttgggtgagttgaatagcaatttgtgctatattgacaactgcttcttataaaaagggtgctactgacagcagcaaaacattttaatcacttatgtttgcgtgccagggtacattgcaaaataacttgccatgctcttattgttgaaattctttgaatgttgtatattactccgattatgtagaatgaaagtatgaagggactagggccaggagagaaaatgtcagatactaagttagtggtccatgtggacttgcagtagagggtatgtgagaggaagaaggaggagatggacacatacatgcaaaataatgactttcagaattaatggcttttacccctgtcactaaaatcagacatcggaaaattgacttagacagccaaatggtattgtaagttctcattcactatttggaagtgttgaggcctgatcggtgtttcctctgaagacctctggttctataatggtaaacattttgctccgtagtggattgttggctttaacatttgatagcagtactttaattaactgttatataattttgtagataattaaatgacaatttatttctttcaagctccataggaaactcattgctaatttagcaaaacttggagcatctcattcaagatagaaaaatccatttgaaactgaaattgacttattgattaaaggaattttcattataaagcagattatggaaaatatgggaaatgcagtaaaataaagagaagtgaagatcacttagtgttttatttatagagtatatcttatggaattagaagtttattaaaaagataatcactcctgtaagtcttctttaagagttgatgcttactctaaggttatatgagcatctttatgtccataatatacatcattgatcatatagactggtttgattttatgggaggcaatatagtgaggtagttatgggctttgacgtcaggctgatgtaggttcagatactgtctctccaacacatttagttggacttttcccaaggaacctaacctttctaagcctgtttttttatctgtcaaataaggttgcattgagaatgaaatgagataacgtgtgtagcacagtgctgggcttaatgatgtttgttattattggtgaacttcaagaaatgcacactcaaataatagattgcagttgcttttacataaaatatcttttagctggggtaaaagcaaattaatttttcctttgcacgagttggggctttattgcagtggtcatctgttttgagaaaggtaacttcgtctgctttattgaagctagtgttatgttgccacctgcttgtggtaacagaaagaaataaaaatagaattagcccctgatttctttcttctgggtgaggagttgtatgccatgtgttgctgatattaactactgttgggatgcatgccagcatgtgttgttaatgtcattgcatgaaaatttgcctttcaatatctgaaactacaaagccaagtggttttaggactggcattaacttattttaataattcatttggtttgtgtttgatttgtaggagtatctcaaccagaattttttataattaaaaaaagtgaaaaatataaacatggcaaagctattttgatttaaaatgtatagcagttacaaaggcttctcttaaggcagcagggtttcttgaattaattctttgtagagctttgattagtagatagtaatagtctggttcattctgtcagtcttgtatcataagtgattgtaacaaagacatttgtggaaatactagaatacagttatatgacttaatctttttcccaacaatattctaacttggtagattaaaaaaaatttttaatggaaaatgttaagcatctcaaaaagtggtaaccagagtagtataacaagcttccctctatttagccttaagcttcaataattatcaacctgccgggtgcggtggctcacgcctgtaatcccagaactttgggaggccaaggcaggcggatcacctgaggtcaggagttcatgaccagcctgaccaacatggagaaaccccatctctactaaaaatacaaaattagctggggtggtggcgcatgcttgtaatcccagctactcgggaggctgaggcaggagaatcgcttgaaccttggaggcggaggttgcggtgagccgagatcacgccattgcactccagcctgggcatcaagagtgaaactccgtctcaaaaaaaaaaaaaaaaaaatcaacctaagaccacccactttatcccttctcattcttttgaagcagagcaaatcctagaattttatcactttctctgtaaatatttcagtatttatctctaacagtaaagtctctttttgaaaaactgtataaccacaaataacattgtagttttctcaaaagtcacattttttgaaatatataacatatttttggagtgtgaatatctctaattaaacatgactatgtatttaaatattgtttaaagatttattttaagaaccttgctttagtggtttactgttgcgagtctaaattgctgagccagactttcataaactatgtgccctttccaatgaaatttatttattatagtctccatagttagatttatctcttcactgtcccctacacaagttaggcttgtttttgtcactttgtctttacatatttgccttccatctggaattactttttcacttctctttactagtctaaatcttaactgttcttcagggctagctcagagccttgtcacattattattttccagttgatactcatctttttctttcattgaatgtttgttactctcatgaatcataaaacagaagtctttattttttatgtaactttcatgcatgataactttgccttaatattacaaatttctgaagttagagagcatgtattttccttgtttatgtccttcagagtgttaaacaaagaactggatacgtaatccagtctcagttatttaaaaattggataattgacatgctgacttcctaaaaagtcttctgtcattagtaggacaagagtttaagtagcagtgttttttagatacattctcaagtacatgatatagcagtatttaggcacgtttttaataaacttaatttttctgaatcgaagtatgttcacctgtaatcccaggtttgttggttaggtggtggcaacaattgcattttactgagtacactttaaaaaataaacttcttgaatttttaaaagtattaacacgtatagaaccccattttaacgaaaagttgaagtagctatagttattcctatttgcagagaaggaaacgggtttagagattaggtaacaaattcttaggcacatggttaaggcacaggtggaatttaaaccagactcagtgttcttaacatttacacagccttcaactttaaaaacattgaaagacaaaacaactcatcttttatactctgataagacagaataaggagacatctgggatatacctgtctttttctactaaccttttactttcatacaaaaagctaaggagtatatttccttttcagaatatgtgtacttagtatagcataatgctaagagtatgggctgtgaaatcagatcatctagtttcataattcacctttgtcaagtactagttttgttagctttgggaaaacacttatcccaaccttagttatctcatctgtacaaagggaattataacagtgtctatttcatggagatactatataagaattaattaagattatcgtagtgcttggcacatagtagctcccagatgggttcacacatacattctcccttcttttttaatccagtgataagtattttcattccctttattatagagaaagcctattttcatagcagaagtctaagcatttgttactgtcttaagtatctcttatctcttccttgcccctttgtttagaagggtatttctgaaggagcatagacaggggacagtttgttgctttttgcttcattaatggtgggtagataacatggcctctccatttacatataggtgaaatatggttagaatgaacatcatgggatggcagccttgagggagaaaagagagaggagacattataaaaggttggtgttaagtctgaggggattgtacagaagaaggtaaaagaaggggctcgttgctaggctgccagcccccacttccactcttgttggcctggtgatggtgagctttctgtgttgattatgtgaatgagtggctcagttcttttttagtaccaactggcaaaccatctcctttaccctgtttgtcagcaattcattctccctcagaaaaacaaactgggtgcttctgccaaattgctatatttcaggtgacaattctgtccattgaagaatcttttgttttgttttgcagaatgatcttggtgtatagtcgttctgaaaaataggaagttttactggaatgttttccattttcttctgaagactgagaaatgttcttgaaaaagatcaaatcttggattagtattaaatctgtttttttattaggcattagcaatattgcaaaagtgccataagataggttaatatttaaaatatatagtctatatagttattttggtatttttgttataattttaaattttccctaaatgctttgtttaatttggcagctgacttgaaattcagaaaaagtcaatgatgttatcatcatatttataaatgaaaaagaatataattaaaacaacttttagatatgtgtaggaaatttaatatggtgattattttacacttttattgtcttcatgataatgaaaatgtagccttgattttttagattccaatttaattggatgctggcattgtttattactatcagtagtttggtaatttgttcacataaattaaggcagggaaataaattacaaataaacttaacaagttttcaatcgttagtctcaacgcaaatttattcaaaatgcttttggtaaataataataataattattattatatattttttgagatggaatctcgctctgttgttgcccaggttggggtgcagtggcgctgtctcgactcactgcaagctctgcctcccgggttcttggcgattctcctgcctcagcctcctgagtagctgggactacaggcgcccgccaccatgcccagctaattttttttttttttttttgagacggagtctcgctctgtcgcccaggctggagtgcagtggcgggatctcggctcactgcaagctccgcctcccgggttcacgccattctcctgcctcagcctcccaagtagctgggactacaggcgcccgccactacgcccggctaattttttgtatttttagtagagacggggtttcaccgttttagccgggatggtctcgatctcctgacctgatgatccacctgcctcagccttccaaagtgctgggattacaggcgtcagccaccgcgcccagccggtgaattattatttttaaaggcatgttgttaatttttattcaatgtggagtactgtgagcaattgctatagaacatgatatcttattactgtgaacatataagaataaaaagaggtaaaatcaaaagactcttctgggtctaaagtgagtataattctgttagcctgcatgtgtcagatatacatcactctcttttatgatctgtaaagttgaggtgcttttataaacatgcagataggagtttgctagtttgtggttgttcaaggcaatttgctgttctcttttctgaatattgtcagcaagagtgttaaaattgaagagctacccagggtgacattttttttaagagatagagatagtgatgataacagcaagggagaaggtgcagaataggtttctcatttagcttctctcttctaaggccaaaggtggtttgtattaaatatgcatacctgttctagggatgggatcatcatattaactgggtaagttgccctctctccccttaccccagattttgatttttagtgacctggacattgctcaggggacaactttctgctgacaaacaggagttgaaagagactattatttcaggtttctgttacaaaaacatataaaagtctcaggggagaacctcctgtgtttgccactagtgagccagtgagcaatgtaaattaccatttgttgagaatgggaacgtaaaagacaaattggattctagtgttaatttctactttctactctgccaaggctgccaatcttatttgtgtattttgattttgtttttgcatagcctctagtgagaaagttggggttgcagaagtaataaataggtgtaaacattgcctctaggaaaagaaaccttcagttttattctagcttaattatgttttcacatacttgggttaataagcctttaacatatttctttatgcattcattgtagaaatttagaaaaggtgtagaaaagataaaagtggcatgtatttctactctatagataatttttattgatattctgttgggcatatttcacattttttcctatgcatgcatatattatgcataatttttttctgacaaaaatgggctcatgttttatatatactcctttgtaatgcccactaaacagtgccattttgataaactactaatttaaacatacttgattatctttactaatataaattttctataaaaactagagcaataaaagattaacaccaattatttttagtatagtaattatagacttatttactcattgaaacgtccaagtttaagggtttatattaaggatttttgtttgttttttatctatttatttatttatttatttttgtgatggaggcttgctatcacccaggctggtctcaaattcctgggctcaggggattgatcctccggtctcagactccagagtagctgggacgacaggcctatggcaccatgccctaggttttataagttgtttgatattataattggcagttgatttgaaatatctgcaaatgacttccattgtattctataaataatgtgtatcccttaaggcttttcctgactttaaatagaatggtatatctttttctttcctcaatagttgtcatatgatatttagaaaaaagtgtattgtcacacattcatcacacttattttacagtatttctatgttcttcctagagaaaattacaaataatattagacaaagtcatctacatttcacatgttcaattttttttgttgtaaaaaaatacaacattaaatttactgtcttagccattaagtgtagagttcggtagtgttaaatatatttacattgttaagcaacagatctctagaagtatttcattttcccaaactgaaactatatctactaaacactaattccctctccccccagcccttggttaaccacctttctactttctgtttctatgattttgattactgtggatactttatatgattgtaatcatacagtatttgtcctttgtgactggcttattttgtttagcataatatccttgaggttcatccatgttatagcacatgacaagatttccatgttttttgaggctgcataatactccattgtatctatatacgcattttaaaaatccattcatacaccagtgaacatttgggttgcctcgccttttggctattatgaataataccgtgatgaacatgggtgtgcaaatatctctttgagattttgctttgaattcttttggatatatacccaaaagtgggattgctggatcatatagtaattctatttttaattttttgaggaacctccacactatttccataatggctgtagcatttttctagcattttatattctcaccaacagtgtagaaatgttccagtttctccacatccttaccaacagttattttctgatggctgtcttaataggtgtgaggtgatatcttattgtggttttgattttcatttctcttattagtaatgttgattatcttttcatatgctgttgaccatttgcatatcttatttggagaattgtctattgaaatcctttatccatttgaatggggttattttgttattgtcgagttatagaagctccttatctattttggatattaaccatttgatggtttacagatattttctccattccatacgctgccttttcactctgtcagttgttttctttggtgcacagaaattcttaagtttggtgtcctgtttgtctatttttgcttttgttgcctgtgattttggtgccatatccatgaaatcattgccaaatccagtgtctcaaaggttttcctttatgtttccttctaggagtttcagagttttaggtattacttttaggtctttaatctatgttaatttttgtatgtggcatgagagtccaacttcattcttttgcttgttatccagttttcccagcaccatttgttgaagagactgtcctttccccactgtgtagtcttggcattcttgtgaaaaatcatttggccttttatgtaagggtttatttctgtgctctctcttctgtctgtatgccagtgccacactgttttagatttctgttgttctgtagtaaaatcaggttttgaaatcaggaggtgtgaggcctttagctttattcttctgattaaagactgatttagctctatgggtcctcttgagattccatatgaattttagatttttttttgtatttctgcaaaaaataccattgggattttggtaggaatggcattgaatctgtagatcactttggatagtttggacattttaacaatattttaagcttttaaatccatgagaatggaatgcccttccatttattggtatctttttttcatttcttttaacaatgttttgtattttgacattattctcacctctttggttaagtttactctgtggtagtttatcctttttgatgctatagtaaatgggattgttttcataatttccttttttgattggtcatggttactgcatgaaaacataaccaatttttgtatcctgcaacttgctgaaatcatttattagttgtaatagtttttctgtggaatcttttgggttatctactataagattatgccatttgtgagcataattctacttcttttccaatttctatgccttttatttccttttcttgtcttaattgctctgactaggacttctaatactatcttgaatattgataatattgggcatccttgccttgttcctcctgatcttagaggaaaagtttttagtctttcaccagtatatgtgctgttagctgttggctttgtgtgtattgcttttattatattgaggtgttttctttctatttctagtttgttatgtgtttttatcaggaaagtgtgttgaattttgtcaaatgctttttgcacatcaattgagatgataatgtgttttttgcccttcattttgttaatatagtgtagtacaatgatttgttttcatatttggaaacatccttgcatttcaagtataaatcccatttgcttattgtgtgtaatccttttaatgtgctgttgggtcaggcatggtggctcctgcctgtaatcccagcactttgggaggccaatgcaggagaatcgcttgcggccaggagtttaagaccatcctggacaatatggtaaaaccttgtctctagaagaaattttaaaattagccaggtgtggaggcacacagttgtagtactagctacttggggcaggggttgtggggtattaaggaggagggtgggtgtgctgaggtgggaggatcacttgagcctgggaggttgaggctgcagtgagccattgtcatgccactgcactccagtgtgggcaacaaaatgagaccctctcttaaaaaaaaaaagtgctattgaattgagtttgccagtatttttggggggattttttgcatcagtctttatcacgggtattgttctgtagtcctcttgttctgtcttctagtttttgtatcagagaaatgctggcttcatagaatgattctggaagtgttccctgcccctcattttttggtaagagtttgaagagttaattcttctttgattatttggtagaattttcaagtgaagccatctggtactgggcttttctttgttgggaagtttttgattactgtttcatcttcttatttgttatagggctgttgagattttttattcatgattcagtcttggtagattatatgtttggaatgtattcatttcttctaggttatctaatctgttgccatatgtgtggtcatgtaagtcttttataatctttatttctgtgacatcaattataatgtcccctttcgtttctaattttagttatttgattatctcttttttttcttatgtaatctagctaacgatttgtcagttttgttaattttttcaaaaaacaaactcttggtttcattgattttttttcctcattgtttttctattctctattttatttatctttgttttaatctttatttcccttcattaatttggtttagtttctcttttcctagttctttgaaagggtctaaagttaggttgttaattcgagatctttactgattgttaatgttaggtgtaatactgttttagctgcattacataaatattgctctattgtgttttggttttcatttgtctcctgatattttctaaattcgcttgtgatttcatctctcacccattggttatatgagagtgagttgtttaacttccacttatttgtggattttactgttttccttctactattgatttctagtttaattccatttttgatggaaaatataccttatatgattatagtcttcttaagtttgttaagacttgttttgtcacgtaacatgtggtctttgttggagaatgttccaagtgcaattgaaaagaatgtgtattctcctgttgttgattggagtgttctgagtatgtctgttaggtccaattggtctatagtgttgttcaagttctttgtgtctttattgatcttctgtgtggttgttctatccataactgaaagtgggctagtgaagtctcctactattattgtgttggtctctctctcccttcacttctgtcagtgtttgctcataaatttgggaactgtaatgttagatgcatatcttactggtgaattgacccttttatcatataatgtcctactctgtctcttgtgacagtttttatcttaaactctatgttgtctgatgtaagtacggccactctcttcagattccagttttctggaatatctttttccatccttttatttgtagcctttgtgcatctttggatctgaagcagatgtcttgtaaacaacctgtagttggatcttatttttttattccattggccaatctatgtcttttatttgggcacttaatctttttttttttttttgagacacaatctccctctgttgtccaggctgaagtacagtggcacaatcttggctcactgcaacctctgcctcaggttcaagtgattcttctgcctcagcctcccgagtagctgggattacaggtggctgccaccatgcctggctaatttttgtatttttagtagagatggcgttttaccatattggccatgctggtctcttaactcctgacctcaagtgatctgcccaccttggtctcccaaagtgctggaattacagatgtgagccaccgctcctggcccaatttatatttaaagtaattattgacatggactcactattgccattttgattatttttttatatgtcttatagcttttttgtccatctttcttcccttgctgccttcttttgtgtttcattgattttttttttttttagtgacatgttttgattttcttctaatttctctttgtgtatattctacagatattttccttgactttaccttgccattacataacatatcttcaggtgataaaaataaattttaaattagtaacttcaatgccatatgaaaactcttccttttttcacctctgccctcccctgctttgtttttgatgatactttacctctttttatattgtgtatattttaacacagatttagaattattttttatgctttaaaaaattctatactatatttaagtgatctgtattactgtattacaatactagaagatgccatatttgtctgtatacaaatagtcttcaaaaagttcatggaaaatgtgtattatgagaaaactatgcatggatttcaaaattttttggtatcaaaataaacttgtactaacttgttataacgtgtctgaacaaaatctagtttgcggtactaagaaggataagacatcatttggaaaagagcccctgtcagagcaatatgaattatgctaaaattgaagcaagaacaaacatcaagtttatgaagaagcttaggtgaaagaatggtgaaatcattgatttacaatatgtttacagggccaatgcctcaaataaatgagcagtttacaaatggataacttcttttaagaagagatgagatgatgttaaagatgaagcctgcagcagcagaccattacatcaatttgtcaggaaaagattaatcatgttcatgcccttatttaagaggaccaatgattaatagcagaaacaatagctaacaccatagatgtctcagtcggttcagcttccacaattctatatgaaaaattaaagattcacagactttccattcaatgagtgccaaaaccattgtgcctagatcagctgcagacaagagcaaagcttttaatggaaattttaaacaaatgggatcaagatactgacacatttcttcaaataattgtagcaggaaatgaaacagggctttaccagcataatcctgaagacaaagcacaatcaaagcaatggctactaagaggtggaagtggtccaatcaaagcgaaagcagacaggtcaagagcaaaggtcttggcaacagttttttaggatgctcaaggcattttgcttgttgactttatgaagggccaaagaacgataacatctgcttattataagagtgttttgagaaagttaggtaaagttttagcagaaaaatccccaggaaagcttcaccagagtctttctccatcatgacagtactcctgctcattcctttcatcaaacaagagcaattttatgagagttttgatgataaataattaggcatccatcttataatcctgattttgctccttctgactttttttgtttactaatcttaaatctttaaaaggcacctaattttttcagttgataatgtaaaaagactgcattggcatggttaaattcccaagacccttggttcttcagagttgagctaaatggctgatatcatcacttataaaagtgtcttgacctttatggagcttttgttgagaaataaaatttatattttttatttttatcttttgattccatttttccaagaactttttggagtctccttggactttaccagggagttatgtatttttgtgttactgtgttgctattttttatccttttgctttaagggactccctttatcatttcttgttgggcaaacctagtggtgatgaactgtcccagtgtttgtttatctaagaaagtattaatttctacttcatttttgaagggcacttttgctggatacaatgttcttggttggcagtgttttttttttttttctttcagtacttcagatatattcttccaatcccttctatcttgcaaggtttctgctgagaaattggctagtaatctaacagaagctcctttgtaattgatgattcacttttctgttgctgcttttaagattctctctttgtctatgacttttgacagtataattatgatgtgtcttggtgtagttttctttagatttatccttggagttctttgagcttctttaatttgtatatgcatttatgtcctcagatttggaaagttttcagctattatttcttcaaataggctctttctccatttctccctttcttctcctttgaggcttacataatgtatatgttgttctgatagatagtggcccataagttctttaagctctttttatgtttattcattcctttgcctttttgctcctttcccttggcaattttgaaagtcctgtcttcaaatttgctgatttaaaaaaattctgcctgctcaagtctactgttacatccctctagtgtattttcaattcatttactgtatgcttcagttccagaaataatgtttgctacttcatcatagtttttatctttgttgattttttccttttgtttatgcattgttacaccgagtttttgtttgttcatctgtactcatttatttcattaagcatccttatggcagttaatttgaattctttgtatgacaatatatttccatttctttaggctcaatttgtggtgatttatttattatttttttgagacaggctcttgctctgtcacccaggctggagtacagttgtgtgcagatggctcactgcagcctcgaccttctgggctcaggcaatcctcccgtctcagcctcccaagtagctgggactacaagtgtgcactaccacacctggctaatttttttttgttttgttttgctagagataagatttggccatgttgcacagactggttttgagctctgggctcaagggatctgcctgcctcagcctcccaaagtgctgggattacaggtgtgagccactgcgcctggctgcaatttagttttttacattgaatcggctgtatttccctgtttctttgtattgttattttctgttagggctttggcatttgaaggcttagctaactctctggtctttgcggtctggtttcatactgggaagactttcttcatccagttagtctagctagagaatcctgagacctcacaaatcttttatggggatgcatcctctttgggtttgtaatttcttaattgaagaggtttgcctctgtccatctgtctgctccctctggtgtgtctttgtctgctttacttgtggcgtctcgtgctgtagtaaactacagtactggagctccaccttgtgtctgtttctgatactgcagggtctgatgctaaaccaaagcactttgcttttgttttcaatggccctcaacctggcaccctgttcaatgtcagtacttagattcagtcaagaagtttctagggtagcactgccctcagctgttccattggaggtatattccttttctgctcctccccagggagaaggtggaagttgttgttgtcttgtttgtttttctcaatcttgccttgctggggcagataggagggaggacatgagctttgatgctattttatgctcacctggggtgctggaacttatcacaaaggcagttggattgtttgttattgttgaatccttgtcttcatggggaaagaaaggcctggggtttcttgttttgccatctggctgaccacactcaaatgttacctgttttttttagacattatcttagcaagaatggtaagtctttgaacttgataggaatttggtgggttcaagctttcaaacttttttttgtaatatatccatttgggaagaggtgcagggaggaagaggtggtgattataagtaaggaagtgtggaaaaagttgtaaattcttgaagaaagcatgaggtaaggttttactcctgtttttttttttttatccctgtgtgccctttagttcagtttagttcatacaaattagatagacatgagcctctggttgagtctaatcttgaaaatattttctttgtgatggggttggttttagaagagtagcctggaatacgaaagcttttatttgtatggttatcatgtgtcttcaacctttatgtcaataattgcagacttagaatagcagttctaagttaatggtaaaatgttacctactttcgattccatagcatctatcttctttgagtactttcttagagtgtgattttaatgattatgatctttgttctaactattttgaggcttcattaaaaaataaattatgattttattgttagaatcgtttctataaattaacgtcactgcgcctggcccttaaatgtaaatttgtttttatcaatcaactatttcttcataaaaagcaaagaatacgattagaaatttgaagactatctggtattttaaaaataaagttcatctttctggccggctagttcatcgtctaacttttgcagaagtggaatgtgaatgtgaaaactttgtgaaacagaattattttcttttatccaaagctacttttaattgtctttgagcagtgttaatggaaaaacttataaatgtaggaatgtataagaatatagtttaaaatctagtaaaatgagttatttttaatacttttattttgaaatattattaaatctttaattgtatataaaacttactgcattgtgaaattataattaacgtttgagtttcctgaggatatattaaattcttatcttcgtttagacttttcagaggtcatgtattttgatttttaaacatacttaatgatacagtttttaaaaataaaaactttaaagcggaattgaaattgcatactgcttgtttaaatgcacaaaatctctgtatctcctattatctgtattctgtttctttaatttctactaaaatttgaaggcctctgaagatattttaattctcattgtgtcttttgagttattttttgattctgaaaagataggccatcacaatatctttttagtgggatgtcatatttgtcagcattaaggaatcccagaaggagagaagtatattctctgctgctcttaagaagacaaggaaatttgtagaccttggaaatttgatttgacatcctcatctgctgtaggaatgtttagaattaagatcaccaacctgtgcctccttgaaactggtagagaaactgggatcagtattgggacacccagagctgatatgtgaggaattattggcatgatctacaaatgtgtgaaatttgaggattttataagccatttcagtcatatcagtgtttattaactacataggttaatattttgtgtaggtcatttttgtttatactgtagtcttcagtagcttaatggtgggaagcttacatctggaagcttttggggctcctgcacctagccaggttcagtcattgtgattctgtaacttcaccagaactcaaatttcttgggaggttttgaggaccacaaaaattaacttgagtccaggtgtggtggctcacacctgtaatgctagcactttgggaggccaaggcaggctgatcacctgaggtcagaagttcgagaccagcctggccaacatggtgaaaccttgtctctactaaaaatacaaaaaaaaaaaaaaaattacctgggcatagtggtgcgcacctgtagtcccagctactcaggaggctgaggcaggagaatcacttgaaactgggaggtggaggctgcagtgagccaagatcacaccattgcactctagcctgggtgacagagcaagactctgtctcaaaaacaaaacaaacaaacaaacttgatatcttacagaattgggaaatgtttgtatttttggattgctggagactgctctagtgattctggtgactatacccacgttttgggctcagtcaaaactacaggttcatgttgtataataagagccagacggtcagtaaatagacctgtgttttctttagatttaaaaaatcagtctgaaagataattttgccattaaaaaagaaaacccatgtcgtgtgtccatactcattgtctaccccttggtaggttatttaaatttgattttttggttaattttagactctttttgatcagaacaatgctgcaaaaaaagaagagtcagaaactgccaacaaaaatgattcttcaaagaagttgtctgttgagagagtgtatcagaagaagacacaacttgaacacattcttcttcgtcctgatacatatattgggtcagtggagccattgacgcaggtaattattgctaaaattgattgaaattaggagatgtgcatctatatttactttttaatatgttgataaaattattgtaattacttgctttggaaatttgtaatttcatctgtcatagtcaaagtagggtgaaagatctagaagtagaaatgtatttacttctttttggggattaaaaaccgtcagaagaggctgagcgcagtggctcacacctgtaatcccagcactttgggaggccgaggcgggtggatcacaaggtcaggagatcgaaaccatcctggctaacatggtgaaactctgtctctaataaaaatacaaaaaaatacaaaaaaaaaaattttctgggtgtggtggcgggcgcctgtagtcccagctactcaggagcctgagacaggagaatgacagtgaacctgggaggcggagcttgcagtgagccgagatcacgccactgcactccagcctgggcgacagggcgagactccatctcaaaacaaaaaacaaaaatcagaaaaatgaagtatagagtaaaatggtgccatacgaactttttatgtaagtcttccccacccgccatctcccatcaccccctgatgcccccccaccccgtgtctcgctctgtcgcccaggctggagtgtagtagtgtgatcttggctcggtgcaacctctgcctcctgggttcaaacgattctcctgcctcagccttccaagtagctgggattacaggcatgcgccaccacgcctggctaatttttgtgttgttagtagagacagtgttttgccatgttggccaggctggtcttgaactcctgacctcaggtgatccatccaccttggccccccagagtgctaggattacaggcgtgagccactgcgcccaggcttgtaagtctttaagttcatattgtcattaatgttaatggtagtaccttgcagaatttgtacatatacactgactattgtttactgcttactaggaacttggcttacatatattatctcatttgatcctaaccattttgggaagtaggtactgttatctctatagatgaagaaagggaagcttacataaatttaagtaacttgttcatatctctcaactagtaagaactgggattcaaagtagatctctctgactccaaagtcttgctttgttcgtattattttactctgctccctgtattataaaaaaaaaaaaaagcattaattttccattatttatgaaaagtaatgtttttattttttcaactatttaatactgtttctaataattattgatgtcttacattaaaactgactttataataatacaaacttgatacaaaatgaacaatttctcaattttgaggttaatttaatatgaatagtgaagttgactattactgaagttgtatatgtttttctactttgcagatctaagtattcatatagtgtaaatgacaggatgtggattatactatgaaaaattgatattaaggatttattgagtaaaattttttttgaatttttcaatgcagttcatgtgggtgtatgatgaagatgtaggaatgaattgcagggaggttacctttgtgccaggtttatacaagatctttgatgaaattttgggtgagtacttgcttaggatttaatgcatgtttctattaatatcatcatagtgtccttttatatataaagccagacttaaccagtataaatttgaaaggtgtatctctggcttttatccttctgaatataaatgatcttcagaaaatttataccatgatctgtaatgttttcatatctctgtttcatctttgtttcattttcttcatctatgaaatcaatgtgttatatttgtaatcccatagttggtctgtactcctctatgtgtagtcatctgggatatgctagcatcacagttacctggagtcatcttgaatatggagatgacagggactgattttgcagattcgttgagttggtgggatatgtaaatatgtttttcaccaacaaatcagatatttctgttgggcagccaagtgtaataaccattgctgtaaatgatctctgtcctctccaaatcacatgattaattaaattatgtgaatgcctagttgactgctagggaatgcttgtactttggaaatattttaaccaaggacactctagaaattctcttgctctcccacctcatcagtgcaacttgaggtttcttagtgcagttgtatgggtctcagaacttcttctgttggtatttggtgaagagataagagattaaaactgtgttgcattttatacctttactcttgcctccatattataattttactgttttaagtttattgcaagtgtttgtcaggagcatatttcttctatgattgtgttcaaatttccttgaagcagtggttaatgaatgcaaaaatatttatattgtcagctatagtgcctaggatacagaattttgatttctaagggtgttaaagactttttctttgtttgtaactgaaaatgaactggtttctattcaatatgcctataaagtcactagtttattgaaagtgatcaatagaatgcaattgcttgttaccaagagaaaatataattaaacaaaagtttttacttttagacctggatttgggtgttgtaaaatgcaggtgtttgttcttacttaatatgttttgattaatatgtatcactaaaacatttcctcctctttttttgtggtggaaaacataacagtaatttggtgtgataatacaatttaggaatattatttggaaaataagattttatatgagaagttaatagtaattattttcattaactattaccatatgtagatgtttatattaagcagtgatgcacatacagttgtgtccatgtatttatttatataattttgtatattactcattgaggtgtttaattttgtagttaatgctgctgacaataaacagagggataagaacatgacttgtattaaagtttctattgatccgtaagtatatttaaagtttaattttttatgctaagttttattcagatagtccccaatttatgagtactcctcaaataatgtatatgggtagtactcttttaaagtttccctgttgtttgagactttgttatttttgcctcttttctgtgtcatttattgtcttttcttccaaagaacttccctatcggggctcttggagaccatttttctttgatgctgtgtatgctatttcagctgctagggtaatcaccctatcttttcttacccttacttttgggactcaaggctaagggctattgttagtgtgattccagttatattatactttaagtttacttttcatgactggtgtttggagttttccattatttatgacataatttaatagattaggtactgttgttgtaaccagttgtttagctaattatattactgtggtgatttttattatttttttgcatagaatgaagatgtataaaaaatagtagcattaaatcagaaacatagctgttaaatttatcctgtttttaccagcatgccttttgtaaaatattacattcatcctttgtaatttcattagtaatttagcatgattttaagatttttctctagtaaacataaaaatctaataattcaggtatagtcttactagtaataatctaatttcagttaagattagtagtataataaaactataatttgtatttggttataccatgaagttaactatattttatatgaaaatgttaccatataactgtgctgtcgagattatttatttttttctccatttttttttaaatttggattatttctataatgaatgcattcttgagaagttatataaggcatacaagacataagttacaacttatacagaagtttaagatggtttcaaggacattttggctgttaagattccttttccttatttaggcaattgtcagttaaaaaccatatctcccttcatttattatgttttaggagagtaaggagtaatagacactgaatgtttgatatctttgaatttttttcaaaattgaacaactctaattaaaactaagaaagaaaggaccttccttaaatacactcttgatgaacatagttgcaattgtttagttcttttatgtggttctggccatattagtccaaagattttagccacattaatgcaataagattgaatttaagaaatagtgtatagcatgccatcataacaaagtgataaagaagtgagctaagccaggtgcggcagctcacgcctgtattcctggcactttgggaggctgagtcaggcagatcccttgagcccaggagctcgagaccagtctgggcaacatggtgaaaacctgtctctacaaaaaacaaacaaacaaacaaacaaaaacaccaaaattatctgggcatggtggcggcatgtgcttgtagtcccagctactcaggaggctgaggcgggaggattgcttgagcctgggaggtcaggctgcagtgagccatgattgtgccactgtactctagcctgggcgacagagcgagaccccatctcaaaaaaaaaaaaaaaaaaaaaaagacaacgaagaagtgagctataagacaactctgtagactggataagggctcttggtttattttacttatcagttcattacagattttgtagaaagagtaattcaacataattctagtaattctagtgcctttatcacttcattttatactctgtttttaatcagcaaacatttttgtgtaggcagaagagggagggaaaattataactaagtttatttgcttcttaatgtcaatgaggtatcaatttttttttcatatcccccacctcattttaactgcttctgctagaaaattattttatttcaatataaacaaaaatccttagctattccaagaagaaaaggtgatggtagtatattttttcacccctcctttcttgtttcttttgttgtttacaaatcattgatgaaaaaattgagtcttgatcttgcctttaattgaatttcatatactcctaaaattggcagtaggcaagcattttgtgagaagttgctgatttgtatattgtatttctgagttttaactataacattttgtctcttgtgaattttgtcccatagtcattttttaccacatatactatagaattagtattattttgattaaaataaatgttatttcagaggtgcaatttttgcttcagtaagatttctaatttaagaagtcattttaaagctaaatttaaatgagaaaaagagctgttgcactgttgatccagttgatccagttttctctgctgtccatttttgtatcctttgagttgcattctttttaacatttttgtatagcagatttttatttttgtacatttgtgcacataaacttcttgtgtggaggagaggttaaattttaatagctaatggacaaagtatataggatatatagtacaacctagctcttattctttcttttcctccatagtattctgtgatgtagggataaaatttaaggaaaaggtcatggttgtaaagccttgagaacagattaaatacaagggatgccatgcagaatttggacagttcttccagaagttagagaacttagagcaacttcttacaagggagcttaacacttattaaataatacaacataacagtattgaaacaatttatttgtggatgtctatctgattaaaaacaaatgtggaggctgggcgcggtggctcacgcctgtaatcccagcactttgggaggccaaggcgggtggattatgaggtcaggagttcgagaccagcctggccaacatggtgaaaccccgtgtctcctaaaaatacaaaaattagccagtcgtggtggcgtgcttctgtaatcccagctacttgggaggctgaggcaggagaattgctggaacccaggaggcagaggttgagtgagctgagatcgtgtcattgcactccagcctggatgacagagcgagactctatctcaaacaaaaacaaaaacaaacgtggaaagcatattaaccagagttgaaaatattcctctagcttaagtgttctttatttagagttgaaattttaaaactgtagctttcaaaaaatattgcatactcatgctaaattatatatgtagacatttctttttttaacaaacggaatcatagtatatatactattttatgtctttccctttattcaacatattatagacagccttccttattaacttacatagatccacttaattttttaaaactactcgcaagtattttattatgttgatgtgtcacaatttatttaacctcttgccaactgataagcattggatatttagattttcaatttttttcagcctaattatttttgaaactttatttgtaaactattaaatgcagtattcttattcctaatttttattgaagattatcagtggagcaaagttataaaattctgaataattgtttagagattacagaaataaataccagatctgagaaatgatacagattgaaattttataagagaggtgagtttgatagccagttccaatttcatactcatatggacttagagaatgttaaggatgccaaacgttgatttttttttttgaaattgtgatgaagataattaacttacagaatgcctattttaattacagtaccatgtgctaaacatgatgaaaccttttttaaaggttttctcatgagtatgttgccttttttgtcatcctgagatgtttaagatctgtaattttccattccttgccttcatttccttcataatccttctctattagttacgactcagggaaagaaatgtttgtcctcagcgagtattttcttgagagatgaatcagtgccttccaattgataatgactagtatcttataaccattaaggtttattctagattactttttaatgaattaatttatctttactattttaagctctaaattctgcttttttttttttttttttttttttttttttttttttttacagtgaatctaacattataagcatttggaataatgggaaaggcattccagtagtagaacacaaggtagagaaagtttatgttcctgctttaatttttggacagcttttaacatccagtaactatgatgatgatgagaaaaaagttacaggtaaagtctgaatggaattttggttgaaaaatactgttttcttaatataaaatgtataacttactaaggaaattgtgcagttttggtgtgagaaaatcattgtcagaattaatatttataaactatcatgtataaatattgtcttggtaatagtttaacagtgacatttaaaaaccttaagactgatagtacattgactttatgttagaactgctggaagtttaacttggctgacagtttgagttttgatttagataggactggtatgatgtctatgtatataaatttgttattacatagcactgtgtcttttggtattaagttacttttaaactgttttccttgagaaggtcaggattgaaaatctagactctgtaaatagagttgaaagtgctttgaccaaaaccatatattttcatacttatttatgttgcccaaataggttgataggttttttgttttgttttgttttgctttttaaaccaacgctccgggaaatgatatagattaaaattttgtaatagagaagcaagtttgagagaaagttcagatttcatactcacagagatttgctgggtcgtgaaagatacaaagcttaatgcttttgaaattgtaaagactgtggtaaatgtacaaaatacccattttaattacactactatatatactaaatcttaattgtatttttctttaaatggaagaaaatctaaatatactctggaatcttcaattggtgattggtaatgcagttagtggaacagttttgcaacagccttgccgtatggtggtaaattaacgaagttcctttaaaatcatttttactaaaccttttacatttaatttttcttacaggtggtcgtaatggttatggtgcaaaactttgtaatattttcagtacaaagtttacagtagaaacagcttgcaaagaatacaaacacagttttaagcaggtatgctagaaacacatctatttctttttttaaaataacgttttattatcttgccgagatagtagaaccttgggtaaattgcagtgatgcctgtataacttcattttttttttccaaagcattatccaagtcaaatcatcagagtaaagagacatcagaatgcctgggagatttaatataagcctattcctctatcattcctttcaaacaaagtgctttatttaacagactttatttaacttagttaagtattagtgaaaatgtcctgaacctcgcagactcatgtacatgcaaccacttagtgtgtttgaaaaattcctcaatgaatcatcaaatttatatttcaaaattttattttattcttgaaggtctatgaaaatgatttgaaattttatataagctaaaataatttttattttaaattttctttattgctctccagcaaccccgttgttgaagtaagctaaaataattttctcaggaaaagcatcatgcatgtttatttttgtaaaagtctatatagtcacgttgaagaatttgagagattttgttggcagtttataaagttgtacagtttagtttatttttaacatgagattattatcacagtaatacagttgcctcaggaggattggttctgggatgccctttctataccaaaaatcagaggaggatcaagtcccttatataaaatggggtagtatttgcatataacctatacacatcctcccatgtactttaaatcaactctagattacttataatatgtaatacagtataaatgccatgtgaacagttatgctgtattttaaaaatttgtattttttcccaaatatttttaagctgcagttggtcgaatctgcaaatgtagaacctgtggctacccaagggctgactgtatttactatttttttttgtctgtaatattatcaaggatttgtttggtttgttgtgaagttgtaaaattgatatagtttgataaatgaatgaatttaatgagtgtagtctttatatattatgagatatggaagcattatagaaatatttgaatttttttcttttaaagacatggatgaataatatgatgaagacttctgaagccaaaattaaacattttgatggtgaagattacacatgcataacattccaaccagatctgtccaaatttaagatggaaaaacttgacaaggatattgtggccctcatgactagaagggcatatgatttggctggttcgtgtagaggggtcaaggtcatgtttaatggaaagaaattgcctgtaagtgtcctgtaaaatagttttaatactatgttattttatagagagaatattgttgggtcttccttttttaaagctcatctggtagtctcttttactggtgtgttcagatgattcacatttaaagtgattattgatacatttggccattatttcttcaaataatgcttctgtcttgttctttcctttccttcttggttatatatatgttacattatttgatactgtctgcagttcttgcatgctttgtctattttattcactctacttccactttttgtattggtttaatttctatcccctctcttcaagtttagtcatttgcagtctctgcatcaagtttcctgaagagcctgtcaaagacattcctcatgccttctatgttttttgtttttaacatttccatttgattatttcttatagtttacatgtctttgctgaagttgcatattgtctacattttccattagatactttaacatactaattaattgtagttatttaaaatactttatctgatacatgttacaaaatctgtgagatacttactctgtttctgataatcgctttatcttttcagattgtttttttcttgtcttttggcatgccctgtaagttgtggaaaaccagatttgttttgtagatatcgaggtaaataagcattagtgtgggacttaggttatatttacccaggagatgggctgtgtttgaagtttgtttttgctgtagttattagtgttgaggtttgttgttgccgtgaataccagagacttccagattctttcttgtttttgtctttccccttggcttaggcccttctttttgagctgcccctcagaggtgatctgtctcttgcagctcttccagctgaaacccactgttgttaatggaagcttggtagcatgatggtagattttgggggagatgttctctaatgtctcattacatcccagtctttggagtgcatggtgaacctgtatctcaggggtttgacctttataagtttatgcctctcctccataggtaaagactttttttctgccctctattctctttccccagctgcagcaggtttccaccagtgttctcagcctgtgtccttgaggtttcctgccctgcagaataagcctttttttggtttttttttttttttttttggtaagggagatagatctgggttgatttcccagtgactactgtttctgtctcccagctagcaccatgggagtgcagaggggaaacctctagattctcactggtcttccctgtgagaatttggtgggttttctgaaagaaaaacctgcaagagtatgaatgaatgaacttatgactatagtccctagaagctttatgcattcaaactagtatacactcttccagtagcaattagtcaaaatttctagtttaaagttcctactagcttattaaatatctgccccaggtaagcaaaagcttaggttttgtggtctcctacagacacttatgtctctccagacttcaggatggccagctctcctgtgatctcagttcttcagtgggttcatgaaaaacccattaatttgttgtctgatcacccgttttcttacaaggatggaagctttttttcctgctagttcattatctgtctgaactgaaactggaagtctaccttatcattttaaaaatagaaatttctgaaatattttataacaatttacctgtcccttcacatcctctttttgtcaagtacacatagaaatgaatttcttttttaaaggtcaagggttaaggaatagatctgggaaatgccactaaggtttggatcggtgcacttagaactgttgtaagtgagaggaaatgaaagtatacgtactgaaggtgattcacctatttgagctgccagtgtaagatttttaattgtttttgttttttaaattaataggtaaatggatttcgcagttatgtagatctttatgtgaaagacaaattggatgaaactggggtggccctgaaagttattcatgagcttgcaaatgaaagatgggatgtttgtctcacattgagtgaaaaaggattccagcaaatcagctttgtaaatagtattgcaactacaaaagtaagtaagcaaattatttgtttccaagtcagtggtagaacagtacttcaataaaaactacaaaacaaataacaatatccacaacccccaaaaaacccaaatctgtttttgttaaataagaattgacttatgaaaacaaaaacctattttctatgaaattgctgtattaaaatttatttaaacaattattgagaaataaatttatatgactagtgtttgtagttgaacatatttatattttatgaaatttagaataacaaattcctttttctgtaacttttagccccaccttccccaacctctggggagaggagagggggctggtgactgagttaaaaatcaattatggctatgtgataaagctctgtaaaaactcctgaacaatggagttcacagaactcctaggttggtgaatacatttgaggtgccaagagggtggcatgtctgggtaaggcatggagctttgtgtaccctttcccctgtactatgccctatgcatctcttccatttggctattattgctggatcctatataaaaaacttgtaaatgaagtaaagtgtgttcttgagttctgtgacctgttccagcaaattatcattcctgaggagtgggtcataggttcgttagaagtacaggaggcctaggacttgtaactggcatctgaagtgtggggagtcctgtgggattgagcccttaaccaaccctaaatacttgtgctaactccaggtagttagtatcaaaattgaattacattgttgaacatccatttggtgtctggagaatcagagaattggttgctggtgttgaaagcacctgagaattggtgttagaattgaagtgaggaaagcaaacaaacaaacaaacaaaaaaaacacagcggttggtttattggctctgtagccaaaatgtcttatttttttaaaatctcaactctcgttctgagactctattactcttttagaaaatagggtttataatacagataaagtattttgctactttaacaatacaggatttcagatttcatatatttttttttctttagggtggacggcacgtggattatgtggtagatcaagttgttggtaaactgattgaagtagttaagaaaaagaacaaagctggtgtatcagtgaaaccatttcaagtaagggatgtgttatatattgtacatgatgcatacatatgcattatatatatactgaattactaaatatcagctctgatattgacttttttgggtatgttttcaacaggtaaaaaaccatatatgggtttttattaattgccttattgaaaatccaacttttgattctcagactaaggaaaacatgactctgcagcccaaaagttttgggtctaaatgccagctgtcagaaaaattttttaaagcagtgagtaaaacttgtattttttttattgttgttattaagagttgattaggtagttttcttgatttactttatttgtgattagtttctttcatcgtattaactgtgggtataagcatgcttgcactacaaactaatatgcttaatttgataactttaaagggtagactttaatgtttcctaaaacaattgttttgccaagaactaaagtagggaattatgtaactaattgcatttttagctttgtattgaccattgtaaaggtcagatttcccctaacagatgtccagatccttatgcaactctttcatcttttctactctcatttcaacttgatctactgattcttatctttatacatgtttaaaaattgtggtaacatgtataacaaaatgtactattttctacatgttcttaaattgctttgctttgcacataatttttttaggctaccttaacttctctaaaataaggtgagagcacaaataaataatggagatgaatcaatcacagcctctcctctttggaattttggtggggaaatgctctataactgccctagaactaatgtatttctcaaattccaaaaagtagattatcagaaacaaaaacaaaagttgttttttaggttctaacttaaggcctgtagaaatagtacttttggatctaatcttaatgaattctgagtacaaattatgctatattaatgctttcccaaatttctgtcctcataacaattgtttccttgatgaagtgatttgattttaaattttatactttttcattttaggtgcactaagtttaaatttgacaacacagt

SEQ ID NO: 308 - DNA, 32744 bp, Homo sapiens
  source 1..32744: mol_type = other DNA
ttgtgacaggcggaggggccagttcctgtcgggccggaggcggagtcagaggttgcttgagctccgcccggactccagggggctcctccccctgctcctttcggctgggcgggcggcgggctagagagggaatgtcattgcttctcagagccgtggtgccgcctccgtctgctgcttctttcctggcgccctcgtcccgtcggctttcgccgccgccgccgcagctgcactggggatacggatggctagtggggcgccggggccatctgggttgagagagcggcgattgcggccgctgctgaggcggagactccccgccgccgcttcctccacccccagtccgccggcctcgcggcgctgagggcgggagcgcgcagagctcttccctcctcctttttcttcctcctcctcctcctcctccgggtccccgcccagcacccctcgcaccaggcggcggcggcggaggaggagagctagacccgccgccggggcacaacatggcggagccctcggccccggagagcaagcacaagtcgtccctcaactcgtccccgtggagtggcctcatggccctgggaaacagccggcacggccaccacgggcccggggcccagtgcgcgcacaaggcggcgggcggcgcggcgccgccgaagccggccccggcggggctgtccggggggctgtcgcagccggctgggtggcagtcgcttctctccttcaccatcctcttcctggcctggcttgccggcttcagctcgcgcctcttcgccgtcatccgcttcgaaagcatcatccacgagttcgacccgtggtaagtgcctcgccgcccctcccccgcccgtggcccgcggggaaccgggacccgctcctccgcccgccgcagctctcctcgacttggccccgcgccgccgcggagccccgctcgcgtcctggctgaggccggcgcggatcccggagctccgggcgcgccccctgcccgtgggcgaagtttgccccgtgcagcctgaggcggggcgtcggggtccaggagcgaaaccttgattctcggccgggctagtgtgaagactgccaggagtgtggatgcagccgccgggagtgtgggtgcagccgccgggagtgtgggtgcagtccctcgcagcccgctttggtcgctgagtccggacccgccacgccaggaggcggcaggtagctcctccgcggactgtcggtcgattccccgccctcctcgcccgctgctttcgcgttctttcatatttgcgggcgcgtttttgctagttcagacggaatcggccaggggggctgccctgttgccgctggaggtgggtccagatgtgccggaaccccggctgctcacccttgcagttttacgcttttactgtttctttttatgctctcatgatacgagaagggaaaaggagagtgaatggcgtgttggagggaaggaaataatacccctgaaagtgatctgaaagctagctactcttatttatttatcattaggtattttaaagagtggctttttttcagagctcttaagtgcactcagcaccttactgtttcactatcgtcttgggttgctttttagaacaagatccttaccctgttagccactgtcacccttagtgtgttatgcacagtatctgaaagcattgcattagttcctttattggtctgcaggaaggtttgtggataagagcaaacagtaccacggtgatgggagtcctagattgtaataccgaagttgcacatggtgtaagggactgacctgaatgttttaggaaattaccccactcttaacaacactagctaacttagacactacattggtctgtgaattatctagatggaaagattgctttaacttttttttcgcaacttgcccaacccgagttaggatttttccccctgagttaggattttcccctctgagagtatgccttttaaactagtgttatcttattgacctgtcaaccttgagttaatcttacttcctcacagttagacctaattaaatttcaggatatttgtttcatcatttgagattcaaagagagagagtcttttttgagagttactaactatatagataataagtgttcgggtggaggggggcagtaacttacctgtatagtaatataccagatttaagttctgcattatggagagaaaaattggtactgcaacatctattgaacaccagaggggcccactcatggacaattcaatttagatcagttaattactgtgacagtcttccatgaaatgttttcattccattttagaagttttgattttgttttctaacactagtttttttaaaaaataacctttttgttaacgtgcaatcacagaagaaaatatgttagtgtagactatttatgagcctaagaatacctgtgaaggcttattgacacaatattattaggtggtcttgttttgaaatacttaagcaagttagataaaaatgaaattggaaccagaaaatgaaaactagtatttactggacaatatgaaaagagaaagttctcttttcagattaaaatagcagaaatgcatggttgaccaaacatttcaggtaacaaaattgtgaatatttccatagtaacatttttacaaatggaaggctaacgactgtttaatagtaactctggggctgaaattaaagattgcagaaaaattcactactgaatgatgagattttggtcatttttccttaagattagaaatctgcatcaagtcagccaaagatccccactaaaattgagtaatgcaataatgaaaaggctcaacaagtaaagtggctaatatttttattttttattttttatttttattatttttttttttttagtgtagctaagtattaaaagttttctttttccagcttcagtagtgtggttggagggcataattctttttcatgcacatgaaaatatgttttggtcgggcgcggtggctcacgcctgtaatcccagcacttcggaaagccgaggcaggtggatcacctgaggtcaggagttcgagaccagcctggccaacatggtgaaaccccctctctactaaaaatacaaaaattagccgggagtggtgtcgggcgcctgtaatccagctacttgggaggctgaggcaggagaatctctcgaacccgggaggcgaaggttgcagtgagccgagatcgcgccactgcactccagcctgggcaacaaagagcgaaactccgactcaaaaaagaaaatatgttttgcttcattttttatatatatgaaaacgcatttctgacacattatcatttagctaaatttgtaccatttgaaagtatacatctctgttttaaagagctacttaatttaggtattctgcatatagttttaatgttgacatttcttaattaaatgtttatattcataatgttagataatcttgcttagtagtaaggagatttgtataataatggactgtctcctgtgccttaccgtgaatggagatttgtcagtatgaatctaatataatgtctaattcaggtgacttaatgagagaatcaggtttcagacaaaaaaaataccttgttcttgtttttttttcatgtcttttgaagatctcacgtagttaggcatctcattcattcttatctgattcttacagtcattctttttgaaaaggttaaaaggagggggatgtgtagattgcctgccattattactttgggcttttaaagcttttcggggcttttaaatctagttttcttctatagctactaatagtcgcaacactttaactggtctgtagctgaacactctagtgtttctagtttgggagttgctcagatcaccatcatatcatatagcaatggcacagacctttaataatatttaaatgttactctcaggctgtgcatccacaaaccgatttattctggcctgctcataccttccctgacctctttttccatatctctatcaatggtttcatttctgcaagtcgttttagtgaagggtttactttctctgtgagctatttctttaaattttacagtagttcttaaattgtgtaaaagactcaagttagctgctgaaagtgacgtcacagagttatacttgttttttaaatttgtcacccaagttatttatcttaccagttgtcataaggggtgatgtgtgatttatttattgaagtacactgcacttttttaacatttagcaacatttttggtaacaatttgacttcactttagtaattcctcccttatcagctgagttgaacagataggaggaagcagtttgaaaatatattgtctgtacttgccaaacgtttggttaatcagccactttaacagcacttaactatacctttttatctggaacaaaatgtgttttctacatatttttattgtaagagataatacttttactttatattagccagataccttctccatatccattatcttgttcaattgtggtagcctttcccatagaagcaatgaagttccctatgtgagagctcttttttccctgccttagcaggttataaagtgggttctccctagagagaattctctgagccttaggttttggctgtagttagcaaaaatgcagcagacgcctttttgctgggcagaaagttgcaagttagagttggaacttagaatgcaatttttccgaagaaactatggtataaattggttaattagtacagatgtgttttcaaaggaatgataaacctttggaacataagctgttagaagttggggactacttcctgtactttgaggtctccatgttttccttcactttgcagatgacaaaaagaggctgttgacctcagttctgaagaagacaaattggtagccaaaccagttttagaacacaaacgtccccaaatcttaaaaagtcactttgtgggatcattagcatcagcagtccagctgcacttcagaccaggtatcactgttactgattgcattgacaattaaattgtatgaatttatgataagattggtgctactcccatttcggttgagtgtgatggcttccataagtagtaatcatagatttcatgatgtataggccctacggtagttagggtctgtcatgaatgcccttgggacttttccttccccctttatggttttcatatcgtaaaggttaacttgggtaggactgcatgccccttactgccatgagtagtttgcataaagacaacattggttataaacattagaagctcaatataaggatttacatcataatctctgacccagttgttaatgaatatgggctaacttaactagcccttctgtacctaatcaatttttatactctctataagttttgagtgtttgagaaaatgttaacatttatctttattgttatatcttagtattcgtctgtgcacacgtgctctccgaaatgaaggatggaaaggttaatattattctcaagtgaccaaatcatgtttttcccctcaatttgtttacttttaaaacttaatgatcttagggagtgaaaatactgcagttaacttgaattataaagaccccacaattcaacagacctattgctaaactattataaaaattttcaaatgcacaagaaagttgaattttatagtgaacactcatatactctaaccacctagattctacaattaatattttgctttagcatatcttcctatccattactacttttaaatcctgcttgtagacagacattgttactatgatatgaagaatgccatctttgttccccaacaccatgataaagaggatttatttctacatagtgtttgttttctatattatttgaacatatgtatatacatgctgtttcagtatcctcagagtgaagttaggatcagattccatcattccaggttttggttagcaacttacctgagtgcattgtaaatcagtgcattagccccacatctgttaaatgacttgagtttgctgaatctggtgtctcagaagaaactctaaagtggttagatggatattgatgttgatgttggttttgttaggtgtaatttatgtgaaactcctaaattccttgaattattagaaggcttttataggtcagcctgttgtctctgccatctttcatccagaggtaatggtttagctttagtgtgattgcaacagtgacttctgtaaatccctgcaataaataggaaaaaagaaaaacatttccaaatagtataggacccactgatatactatatgggccaaattaatactgttgaaaggggaaaacctgtaaatggttaacctgctactctgtcttcaaccgtctatctacctgattctggtggatgctttttgtatttaaaccagtaactcttctgagaaggcttctgttgtcctcttcttacctacttctgaccatgagtaatttctgggaatttagaaattgatagaaagtggaatactgtagggttttttgtttgtttttaaagtcgaatatattaggaggtgaggattagcgttgggggagataggatcagttgcccagaggctcccatatttaggtaaatgtatgttaatctgcatttgtaggcttgccaggaaatctaaccattatttagaattttatgtctttggaaaaatacttccatagtttcagatgaaaaacatctaaacatgttttggaatataatgtgtacataaattagtgaatgcctctttatgttgttcaaggttgtactatttgtagacaaacaaatctctaaacaattgtgactgttggcactaattgaccactctcaaccatgtctatttcttttctttctgtggaatttaatgttgcaagataactttaatatatgttctaaatgatagtagatgcttagtttttacagtgttttacaatccagtgacatcttagaattgaggagatgaggtaacatcttttatttccatagacaaaagataattcaattcagtatttcccacaagaattgaaggatacagatctgccagattccaaagtctgttcctcttaccacaccctctgcctccagggccagcttaaataaaagtgtcctctgtttaatttatgttttttattcaggtgccccaacttaagtcttaaaatactggtctatcagaatacctcttcacaatccgggctgtagctaactaagcttactagttggataatagctgattactttgattgttttgatggagcgaagagatgagttgatggttaagacttttaaccttcaattactatgggattttcggaaactctgaagagagtagctgaatgagaggaaaagatgatcaaatccaactgaatattgttcttatttagatttattttgtctataaaaagttcataataatgagattggaagtcttaagccatgccagttaagggaattgggagatggagagctgaactttcagagtagactcagaattctataacccacaggatttttagtgtatgtgttggccccctgtttctattttctaagaagctaaggaccagaaggataatactttttctaaggtgatacaattatagcttggctagattcttttccattttctttgcacctatgtttgctgtagaagggaatattttgagaagtcgtttgaaattgttacttcagaagatgaggggaagttactttctaccacttagtttaaatttacaatatcgtaaatgttgacaattcaggcttagatttggaaacaaatagagcttttgtgtgaagcttgactcatttggaattatttaaaaaaattgtgtgtactggttgtctgtaatctccataaattagcagtataaattttaaaactttattcttttttaccttgtttgctcattcctattaaaagggaaatgttactgcatgaagacatgtaaaggaattttgtttatattagtaaagtgttaaagtattaatgattagttgataaccaagttgataatattttcttttggggttttcttttcttttttgtttcatgccttacagatttattagctgttctcaagtaaagacttttctccccagtatggtattcttttctttggtgatatctagctatccctgcaacctataaaatccttcaaatgcattgttttaaactttaaatattggtgctttgtttcactttctgtcccctgcctccccgccccacaatagatagataatgttgtagcgtataagatatacatatatatacaaatactaatgttgaaggtaaaattttatgttgttgcccatactgttaaaaaaattaaaatgtagtgtgatttttcaaaattctagtatatccacagcttaaattattgtttgttgctgaccaaatttatctttaggagaacacaggccataaggagttggagaaaaggatcataactggaaactcacttgtgaccaccatgcctaccacacgtttattatttgatgcctattcttaaaataccagtaacacctgtagactatacccagtttaagaaggtttattattaaagtaaattattatacatcttatttatgtaacccacatcagaaatggagtacagaactatgggaggcagcactcttgtacagttatattctttgaaaataagtcttaaatgtttctataaacaagagcaaagaaatgagttctgcaaaggatttcattagaggagaaaagataattcagtttcagtttttaaagcaattttcttttatgatgaagtatgacgcatcctgaaaaatataaatctaaagtatagtgaacacccatgtgactattacccagatcaagatcattgccactaccttagacgacctggtgtgtttctcaatcccttccaccccctgactttatagtgatgacatccttcctttttctcataggtggtaaactctgtgtgcattgctaaacaatacaatttagttttgcctatttttaaacttcagataaatggaattgtggcttttgtgtctttttttttctttttttgtttttttttttttttggctgagcattttctttaagattcatccttgttggtcaaaggattgttgacaatatgtacgtaagtaataaagttcagcaataatttttttgtttgtttgtttgttttagatggagtttctctctgttgcccgggctggattgcagtggcgcgatctcagctcactgcaagctccacctcttgggttcatgtcattctcctgcctcagccttctgagtagctgggactacaggcgcccgcgaccatgcccggctaattttttgtgtttttagcagagacgaggtttcaccgtgttagccaggatggtctcgaactcctgacctcgtgatgcaccctcctcggcctcccaaagtgctgggattacaggcgtgagccaccacgcccggcatttcagcaataatttggctaaccaggtgtcttattcacctgacggggttgcctgttcttttatagcgggaggtgcctctaggaaagagaaagggaaggtatttttcttttcacttgagatttaaaaaaattatctcaaggctgaacccttgaggtggagtcatccttgactagagtaactttgacaactttgttttaaggtactaattgtccagagatttaatttttctacagaaaccaaaaatacaagaaagtgggtgggagagaagagagagacatcgtctttaaggagacaaatgataatcagataaatgcaaaatgactggttttaaactatggctttttgtcaactattaaagtattgtatattaaaattggcataaagaaggcattggttgcttgatacttcttgaaagcaggaaagagaatactggaactggaggtctgagctgaggaatttaggaaaaccctgggcatggactgtttgctgtattgatatatttgtagagattgtcaatcctggttttgaggtattttgttgtttatttgtgtagatgtagcaattttgcatatattgcatttctgtcatagttaattctttgttgaagaaaaatttaaatctaggactgtctttcttcaaactctgtttagtcagccagtatttctacagaattcaaacttaatatttaaaccaagtgtcttagggtgggtatacgtactgtatcccatcttcacaaaatcccatgtgtacctgccagagagtaatataaatggctcaaattaggctctatttggatgatggtccaactgagtgatttaagctatttttaacgcctctagtgtatttcttgtagaattcctcaaatggagattcttttctgagatatattgactgttaagaaaaattccaggctggctgggtgtggtggctcacgcctgtaaccccagcactttgggttacacgagggtggatcatgaggtcaggagttcaagactagcctggccaacatggtgaaaccctgtctctactaaactacaaaaattagctgggcatggtggtaggcacctgtaatcccagctgctcgagaggctggggcaggagaattgtttgagcccgggtggcagaggttgcagtgagccgagattgcgccactgcactccagactgggcaacagagtgagactccatctcacaaaaaaaaaaaaaaaaagagaaagaaataaattccaggcctacttctctcagaaatcacaattgatcatctgtgtcttacgtgagaggtctaggtacaggttttattaatacaaaacaaactaaattttacttaggactgtttatttggctaactaggccagagccattttgaagattttaacacctgtgcatgtaaaaacactcaaggagacttaagttatttgttctttgccaaagttggtaaggtactgttatgattatttaaattttggtgctcatttttcctctaatgaatataataataacttactactattattgtagggaggcaaaagattctttaaggcaagaacatttttctaatctttctagaatatcctacacagtattaggaacatagtgagtgcacagtgaatattaagacagatcctttatctttaatggtaaccacattttatgttttggtcataatagtaatagtacagtaagtctctgttgtgcaatactttgaaattttggatttgactgtgatgtcagtaagatcacatgtgcagtgaacatcataatcccagtttcaatacacatgtcatattattctttatagaagaagggaagagttgatgaagaaaagggataatgcttatggaagaaatggtatatgtgagcatcatgacagccatcaacaattgggagatgaatggctggatggataacttaggaagaactttgaggaagattttagtttcttgagtatttcttccaagtacaagtaactcttacagaggtctgtctccagtgttaactcactagttagggaacattgaataagagaagacagaccagttaatatacaaaaaccatatgagttatgaaagttttattatttttcaaatgagaaatgaaaaaagacagatgacagcaatagaagtaaaattcacaagatgccattttaattgaacttgagaaatatattctgatacgaaggaatagtaagaattgaaattatcattgcatacataggcattagttagaatatactaaattcatgcacatgatgaatttgggtggggttggattaatgattcatttggtttcatggctcttgatttaactttatgattatagttaattaatatgcaaattaagcaacactttaggaaaccatcacagctctgactgatctcatttaaactttcccataagaggttaaaggatactaaataaaaatactcattagggataaaataagttgcttgtcttcattaaagtgtctttgcaatggaaatagctttgttcttgtctaattactggagaggatcattgaatattgtagatattgtgggttaaataaaccagataaagtctttattttcttttattatgcattgaatcctgacaaaatggtcagctctttagttatagaatcattccatgtaataatggcagtattcctgtgaatcctaaaacagtatgctgtaatgatctcacaagatgtttttgcttttaaaaatgtgtgctgttttaaaaacaaatctttgtccatcagtgtgcctttaaaaaaatctattacagtgagcagggtttgttgaagacattgacacttaaagcatttgcacggggcgcggtggcttatgcctataatcccagcacttgggaggccgagataggcggatcatgaggtcaagagttccagactagccagtttgagaccagcctggccaacatgatgaaaccctatctctactagaaatacaaaaattagacgggctgaggcaggagaattgcttaaacccaggaggcagaggttgcagtgagccgagattgcaccaccgcactccagcctgggtgacagagcaagactctgtctcagggagcggggggggaacattgcatatgctcttaatttttaaaatttaataaccttgttccatataagtttaattgcaatcccaagatgatttttactctagaccatcgctaaagaaggcttttattttaatatgctaagcagctttatggcatttgaaggaacaggataatgaaactgtgaagtagatgaaataaatctaatcttaaaactgtaaaggccagtcataagtcatgagtttgaggagcaactaaaatctttttaaataaggatttttttctaaagttgttaaaatgaatcagtcacttcattagaaaggaagatcttttcacctgtttaaatactttattttggctgttaaaataatttactgcatttcaatgaagtgtcaaatagaaacagctgttatatgaaaggttttccttttggaataatcattctggacatttgaaaagagtatgtaacattaagtgatgttataactgtgtaagaatcacaacataatatacagttataaataaattttaaataaattgaagtatatttaacatacaacttgcatatataatgggctgtcatattctatatataattataaaacttaatgataaatacttgtgaacctcctagccaaccacaaaaccagaacattaccaattttacatctggctgtgtttcttctttagcctgtccccttagtttcccccttagcactaggcaacattatgctgaattttgtttaacgtttccattgctatcttttaataaaactctcatatgtatatatctgtaaaccaagcttgtccaccctgcagcccagagcggctttgaatgtggctcaacacaaatttgtaaactttcttaaaacattaggagtggttttttttttttttttttaagctcatcagctatcgttagtgtattttatgtgtggcctaaggcaattcttcttccactgtggcccagggaagccgaaagattggacacccctgctgtgaaaacaatatattgctaatttttgctttgtttggagcttaaaaaatggtattagcttatttatcctcctctttgactttcatttatacatctgttagttgacagacatttgaatatccagttttttttctattgtgaaacatgctactatgaacattaaaactgttttctgatgcatatgtgtggatgtttgctggggtatatacctgggagtgggattttgtcaaaatatgcttcagttatttatgaaaatataccactccaaaacttagtgacaaaacagcattttattatttcacaattttgtgggttgagtggggagtccttcagcttcatgtgtcagctgaggtgctgagatgattgtagtcacctggaggctcaataggctgtagtcagctgggactagaatgtttgggatgcctggacagctgagagtcatctggaatcttgttccattgggacctcagctggggcttttggctcctccatgtgactgcttagtctgcctcagcattgcagcggggttctgagaaagaacatttcaaagggggagaaagctgccaggtcaactaagggttaagcttggaatagacacaagtaacttcagctatattttgttgttctcaaaatacacacagacctagctcaatgttgagaggagatgcatatacaggtaggggcagaattgtttaaggtcatctttggaaacacttaccacaatgtgtttatcatttttatctcccgtaaaatatctgttcatgtctctcccaaagttttagactgggttgtttagtctcactaatttagtaggaggttatatgtatatgtattttgcatcctaagtctgggttaaatttgttgcagatatcttattccagtttgtgcctaattggtccttaaagcaatcctattagatattttattgcccccattttacagatgagagagtactgcttagtatgttaaaaggaaaggccttgaagtcagcctccagggtgacatttttgttacaaagaatagcatttgcaaaggtgtacaattatgaatcagcatgatgctttgctcaacctacctgttgtaccccttcccctccaaataattgaggcttggaagaatttacaagtatttttatttacttataaatttttatgtaactgtgacttttgctatgagtggactgaggacgtttgatgtgagaggacttgcctggagtgacagagtaggcagtaagttcagccccaagttctttctagtcttatctgccctccttattcctcaattttttttccctaaattattcgtttggatcaaccaggttctgccagcatattcaaaatccatcttaaatgtagtggcgaaatattttgcaaaattataatagaagccagagatttataattaatattcaaatgtttgcattatatactttaaaaagaacattgcaggtcgggtgcggtggctcacacctgtcatttccacactttgggaggatcacttgaggtcaggagttcgagaccagtctggccaatatggtgaaaccccgtctctactaaaaatacaaaaaatcagccgggcatggtggtgcatgcctgtaatcccagctactcgagaggctgagtcacaataattgcatgaaccctggaggcggaagttgcagtgagctgagatcgtgccactgcactccaacctgcatgacagaacgagagtccatctcagaagaacgctgtaggcacgcatcaagtacaactcagttggtttaaactgaaatgccacagaacaattctgaattccaaaatgcaaagctttggataaaacagcctgaacaagtacaaaaagacaataaatttgtagacacttcttcccaaccttcaaattaggaagatttgttctgtgtaaaagtatagtttctgatccttaaaattctatgtgttgaaggcacctcagcatatctctgcagtgtaaaagcagtgcttcaggcagcatgacttattttcatgtcacctcagatttcttggatctaatattcaaagacagagtggaaataataatacttagtggaaggattcttggacatgtaatgaaatgcagagcatcttgagacttttgaccaagtaatgtttggtcatttaccttcctgtttggttggaacaggagtggtgattccagccattgcatgattgagcctcatttgtttttattctttcctgccccgaattcttccattttaagtgtcttaaagaggtagttattcttgcctaagaagtaaactaaagtataacatatttgctataataatgctgatataatgttactgtgataaagtataagtgtcaagtagtttggcaaaaagatttcaccaggttgagcatagtaacacagggaaaatgagccatttaaaacagggaaaaaaaatgtttctgtgaaaccggggagaaaaaaacagccatttttttccctgttttacaaatgactcatttgtaaaatagggaacaaaatgagcccatttaaaatttaataaatgtatttttaacatttgtattctcaaaataaattttaaaatagagtataccaaacatgctattctctgaggagtttaatgcatgttattattttacagaaatttaagttattttaaatatgttaaggatggtaaagcttccctatagttcagtattgaccacctctcctcaacctgtctctaaaggtaggagaaaactgatttattctccttgtattctcttctttctctgctccgtcattagtttgctgatattttctgttcggaaagggggtgaagaaccttcccccctttgagggagataagttttggtttccctgtaatatggaacaaacttcatacctggcgagcacaaagaaattattattttgccaaagtatgttctgcagaccacatattccagaaattacacttctaagcaaaataatctttgataatttgaatttgggaaaaaaactgcttactacattctttgatactgatatgcaatacacattaccatgttacagtcttaagaagttgttcagttaactgttaattttatttaatctggtatttaccgtatttaatttatgaatcactgtaagattttaatttttttttaattaatgttccatgcaattcatggaaaagactgatgtagatgttttatttgatagatgaggagcctgaggcctaaggctaagtaactttaccaaagtcgtagagataataaaactaggactgactttcttcagtgttttaaatctttttatttgtttatttgaattactgcattaggaacaagtatatccacattaggaacatactttttttttcaaatgggacagttgagtatctgctcattgatagcatcccccctgattctcctgatttgtcttggtgactaagttgagtattataccactaacttctatgatagttaagttctcaggcctgtatacattgcttattttgagtgattgttttattttagtttaccttgtgctgttgctttccaccgagactgtcctcagaaagttggtcattttgcttatgagtttattagttgtccaaccactttggctctttcatcacaccaacttgtgggccatgggatattattactatggataatgcttgttagttatacattttatatttatagtatatgactatgggtctgacttaaacgtgtattatgtatttctatatctaataattgttagaaatcctctttatatagtataatgcataatcatatgtctaatttagataatatctagtaacaataaagaaatgtaaatataacatgtttacatataatatttattggagatttgtttctataatatatgaatagttatgccggacttaaatatatgttatacacgttgtgcgtgcgttatataaagagaaagaacacttgtgcccatcccttctgcctacattatttagatttccatctctattgggcttagctgagcaaagtgtcaccggatagttttaattgatcaaatatactattttgtatgtgatcttagatttttttttcagatttttttagtgccattaaaatgctctaacagcctcttattttgttgtaattttttttgttgtcagttgctttttcttttttccaattagtttagtaaatgtcctttataaatcagaatagaccctcctttttcaaatggatactgataaaaattgacagctgtcactgccagttaaggcagaaattaagagatggtactaaaataggaatcctgttttcagttaatgtgtgtttaaaagttttgccctgtgtgttcttttttgatttgcacatgcatctgactttaaattggaagatgcagagtagctctaaggagtcttcaagacatttttgcagcctttaaacaacctttggttttctctctgtgttgctcaaagtagagagacaggtactttgttatctgaagcttatgacatgctctctgcttcaatcaaaatgaccacccatcagttgcaagagcagagagagaggtttgtgagagtagtctgagatccagttgcaactgtacagtgtcacatttatggtggtatgacatttgtgagtctttcccttcagagttaacctagtaaaaaaagttattctcatatatcattagtaatccttatgaatttctatcattgttttcctgctgttacttaaacactgataggaatttatgtaatcatattaggcttgagcataactctctcatgagtttccatattttaagttataaaattggctatgtttaatgtgattatctagacagtgctcgtgtgtatcacttggtgagattgaatttaggctgtttttttcgttctattgaagggggattttttttttccatgtgttacttttaatagagttcatcagtctggcatccttttgtttttgatcctgccactagatggcaggagcaataaaaggtagattgaaatgccaactttagttggccttagctgctttgtactttaccttggttgttctctgtccctattagtgctgaattttgggtatatatgaagtgttgcaaatagtggtacttagtcctataagaaagatctggtaccttatatagcctgagagggcctactaatagggtaaaggagaaagaatagaataatccttgaggtgttctaacactttgtcttttgccttttacttttctatttttcttctccctttgttgaattgtactcctttcctttatttcctgattgtggtttttgggtgttttttgtttgtttgtttgtttgtttgtttggtttttgatagggtcttgttctgtcacccacagtggagtgcagtggtgtcatctcggctcactacaacctccgcctcccaggctcaaatgatcctcccaccttagcctctcaagtagctggcactacatgcgcatgccaccacgcctggctaattttgaaaaatttctggtagagacaggttttgccatgttgcccaggctggtcttgaactcctgggctcaagtgatccacccaccttggcctctcagagtgctgggattacctgcatgagccactgtgcctggcctctttcctgattcttttatgcttacgttagcatccataattggtcatttctgttggtggtactagtcgctttctcatttaccgttcccacgaatacatgttaacttggccagttttggtagtcgtatgtgtaacaacaaactgttataggtggctttgtaaatctttacagaaagggttattttcaagagagcctgttaattgatagtctttgaagaacagagtgatagacagagtctagggtgatgggatgttgcttccgtgattatgtgacgttgtgtaaaactttgtcttaccagtagacttgcaccagagactccttgctggcattataagataagcagccctgttagggaagcctatgtggcaaggaactactaacagcctctatgatgtttccaccaacagccaggaagaaaccagggcccctcagtcctataacctcaaggaagtgaattctgctagaagcctgagtgagcttggaagcagattatttccctaatttagcctccacataagaacccaaccctggtgacatcctgatgtcaaccttgtgcgaccctaaacagaagatccagctaaactgtgcctagattcctgacccatgaagctatgatagaattagtatatgttggtttaagccactgagtttgtttaaaattgctgtataagcaataggaaactaatacaaatacccttcgtaaacctttctttccatctctgaatgttactacctaacttctctctgatctcatgtaatcaaaaaatattgattgaatacctcttacttgccagggactatggctacagtagtgtgaacccaaatagacatgattctagtttagtgagggagttagacttgaaccagtaagaatgaccaatgctgtcaaggaacatgatacaatgagagcttataatagggagataaactaaacacattgtctttttaggaatccttatttgacttttaaaaacttatacttactacattgctttcttacctttttttttaaagcatatttctgccatcacaaaacttgttctatctttattttctgttagcattatgaaaactacctatgtgtattttttaacccttacgagtgttctttcctctctcaagaacacttctcctcttttcctgcctttttgctcaataattcatccaggtttaagttagatgtcagttgtagaagccatccacgagtcctttggacagtaagctttgtgaggacaggtccgtcctgtttgctagtatctttagcacccagtgtgatacataagataggctcttaaaaccaaataaggccgggcacggtggctcacgcctgtaatcccagcactttgggaggccgagacgggcggatcacgaggtcaggagatcgagaccatcctggctaacacggtgaaaccccgtctctactaaaaatacaaaaattagccgggcatggtggcgcgtgcctgtagtcccagctacacgggaggctgaggcaggagaatggcgtgaacccgggaggcggagcttgcagtgagtcgagatcgcgccactgcactccagcctgggcgacagagcgaaactccgtctcaaaaaaaaaaaaaaaaaaccaaataaaacttgatagggaggaactggaactcctgtacattgctgatgggagtgtaaatggtaactattttggagaactgtttagtatttcttaaatacgtgtctactatataactttggagtggaattgctaagtattcacccaaagaagtgaaaacctgtgtccttaaaaaaggcttttacaagaatgcttgttcatattttataagaatgaatgtacagccttattatttcctcccccggaaacaacccaaatgcccttcagaaggggaatggattgtagtatgcattaaatggaatactactcagcagtaaaaaagaataaactgttggtatatgaatatatctcaaaaacatgttaaatgaaagaagcctgattcacctttttaaaaagtagaattacgattattccatttatctgaaatccgagaacaaacataatgaatctatggtgaaagaagtcaaagtatgcttggaaagaagtgcctaaaggtgcatgtgggaactttcatcatgagggtgatgttatgcatacagttgtcaaacctcatctaatgaaacatgtcaattggtgtattttaaagcatctaaattatactttagattttaaaaatgaaaaaaaatgagcgaagaaggtatcctttagtaccccctgggttctctgcttaattatattttcttgttgcctcttcctcctgtgagattgtcagctctgtgaggtcagggaccaagtttgcctgtggttcttagaattgtgtacttgtatgcagaatgcccaagtttattggccctgaagtgaatagttatttgagatctataatctattcatagattatatccatattttatggctgcatttttaagaaaaatatttgcattattacagaatcttacattcagtgtttttctttatgtagcttctagctttttctgttctaggattcacaaaagacatctgtttaagtgttggtagagtagtcttgctccaactacaattttgccaaccacagtttgagatagcacagtgctatatttgtaaaccaaagtttaaaaatcagattttaagaaacaaattgtggtttattttattctccttaaaaaaatgaaaactcaatattaatcttgttttcttgtgaatcccttcctgccagttcttaactttttgagccaatggaaaaaatgagccttggtcatttaatctttttgatcaaaagcccttaaacaccagagtaatttgaaaaagaaccaggtggttacatagctttttgtctaactagtactatctctcgttgttgttgtttgtttttgttttgctgttttgttttccctgatgaaaataatactaaattttaaatgatttaatggccgtgtcaaaaacttgaaagataagtgtgtagatagtctgaatttcccaaaaccgcgtcagcagctccaaggtgtaatttctctgaaactttaagaaggtaactcagagcagatttttcagtgctggtgagttttaatttattcatcaagtagatggctttttattgtgatttatgttggaggtcttctaaaaaataattttgaaattctgcaaaacttttatgcactcttttctggtaagagaatccatattttcatcagattcttacagaccctcacccagaaagattaaaaaccctgcctttacctctattttctctaagatttttattttgccagctgctggttttgccaactttaagaaacataacagccctaaagtcaacaagaatttattctatagtgattgtttacctatattgaccatcagtatgtatttgatatgtttgttgggtctgttttcttcatgattgtttttactctctttttgaccttcttgggtgcagaactggatcataattactggattccactgactggcctctctgcctctgtgttccaaaccattccagacatataagaatgatgaaaaagaaatattcccatcagcatacctggtttttgttttgcaacctctggttagaatatacttgttctcaattatagtaccaattttgtggggaatatatatccttcttggcaagatgtttaggaatgccaaaatctaaaactgtgtggctgcatgcatatcctgtcacctgctcacttactctgtgctgcctctatttcaaatcctcttgttattcttgaggtggttcctagctataaaaacctatgaaaagataaaaataacatgattcttgcaaaaaattgttaggataagctttatatttaaagaaaattcatgagtctgcattttgatatctgtattctattttaagaacactgttagatgttgatacacttaatcaaaacttaatttgattaaggaaatagcgtttctttctttttctccttgatagttctgttactcctgcttctctgttttggccctgattgctgggaaactaagtcacattacacatttgaatcataggcccttattacttaaatatttgtgtgttttatccaatctcaacttatttatacttgtcttgttctttagtctttttacattatctttgttttattatgtatttttgtggaaccagaaaagtgataaactaggacacccttaaaggtctcagaatcttaaacattagttaacatcactttattttattgatatataatattttacatatttaatggtgtacatatcatattttgtagcatacatagaatgtgtaatgatccagtcaagttatttaggggtatccatcttgagtatttattatttctacgtgttgggaacatttcaagttctctcttttagctactttgaaatacatagtaaattgttgctagctatggtcaccctactctgctatacaacattagaatttatgccttgtatctaacagtatttttgtacccattgaccaatctctcttcatctctgcttctctcctatccaccatactttgcctagcctctggtatctgtctacctcactgagatcaactttttttttttttccgttcccacgaatgagtgagaactgtgaaatttgtctttcagtgtctggcttattttacttaacataatgactccagttccatccatgttgctgcagatgacatacttttattctttttatggccaaataatattccattgtgcttatataccacacttcctttattcatttgtctgttgatggactcctaggttgattctgcatcttcgctgttgtgaatagtgctgtagtaaacgtgtgaacgcacgtgtccctttgatgtactaatttcttctcctttggataaatacccagtagtggggttgctggattatatggtagttctatttttagtttttggagaaatctccacactcttttccaagtggccatataatttatgttcccaaagcaatgtataagagttctgttttctctgcacccttgtcagcatttgttattgtctttttcaataatagccattctaacttgggtaagatgatacctaattgtgatttttatttgcatttctctgatgattagtgacgttgaacattttttcatatgcttcttggccatttgtatgtcttcttttgagaaatatctgttcatgtcctttgcttattaatgtgatgatgatgatgatttactgttgtgtgagttctttctaggttctgcatattagtcccttgttgaatgaatagtttacagtatattctgtctttcagtaggttgtgtcttcactctgttgattatttcctttgctgtgcagagttttttggtttaatacagtgccatttgtctctttttgtttttgttttctgtgcatttaaggtcttagcataaaatctttgccttgaccattatcctaaagtggttttttattgttttcttctacttttatagtttgggatcttatgtttaagcctttaatccatcttgagttaattttgcataaagggagagagatagaggtccagtttcatttttctacatatcgatatccaattttcccagcaccatgtattgaagactatgtcctttccccagtgttcgttcttgaagccttcgttgaaaatcagttggctgtaaatatgtggatttacttttggattctctgttctgtgccattggtctgtgtctttttatactaaaaccatgctgtttgggttactgtagtcttataaaatcaggtagtttggcctccagctttgttctttttgctcatggttgctttggctattctcactcttccttggttctttattaatttcaggactgttttttctatttctgtaacaaatgacattggtattttgatagggcttgtgttcaatctgtatgtatactgctttgggcagtatgctcattttaacaatactaatatttccgatccatgggcatgggatgtctttccatttgtttgtgtccctttaattcttttatcattgttgcgtagttttccttatagagatctttcacttcctttgttaaatttatttctaggtatatatatttttatttttatttgtttatttatttttttgagacggagtcttgctctgttgcccaggctggagtgcagtggcgcagtctcggctcactgcaagctccgcctcccgggttcacaccattgtcctgcctcggcctcccgagtagctgggaccacaggcgcccgccaccatgcctggctaatttttcacatttttagtagagacagggtttcactgttagctaggatggtcttgatctcctgacctcgtgatccgcccgcctcagcctcccaaagtgttgggattacaggcgtgagccactgtattttttatatctattgtaaatgggattgctttcctgatttctttctcagctagtttgtcattgacatataaaaatgaatcagtacatgatttttatatgtcgatttcgtatcctgcaactttactgaatttgcttattagctctaagagttttttggcagagtcttttggtttttccaaatataagatcaggtgatatgcaaagtgggacagtttagctttctctttttcaatttggatgccttttacttttgtcctcttacctgattgctctggctaggatatccagtagtatgttgaataggaatggtgaaagtagatatccttgttttctagttctttgtggaaaggctttcaacttttcttaattcagcatgatgttagctctgggtttgtcatatatggcgtttattattttgaggtgtgttttatgcatagtctgagagcttttatcatgaagggatcttgcaaattcaagattaagttcaaaattaaaaaatcaaatgttttctccttattgagatgatcatagggtttttgtcttcattttcttgaagtgatgtatcatatttattgatttgtgtctgtcgaatcatccttgcttccctggtataaacccatttcatcatggtgtattatctttttgatgtactgttggattttgttgagaaattttgcatctgtgttcatcaaggatattggcttttagccagttgtagtatccttgtctagttttggtatctgggtaatgcctcatagaaaaagttaaggagaattccctccccttcagttgtttggaatagtttgaggagaatagatgtgtgtttttccttgaaagtttggtaaaatttgacagtgaagccatcaattcctggacattttttgttgggagaacttctattactaattctgtatcattactcatttattggtctgttcaggttttttttttttttaatttattcttgattcaatcttgataggttatgcttatccagaaatttatcagtttcctgtaggttctctagatagttgttcgtagtagtctctgatgatcttttgtatttctgtggtactaatttgtagtgtctttgttttcatttctgattatagttgggtctttctcttttttcttggttagtctaggaagtgccttattggtttttttttttttaaatcttttcaaaagaaccaactttttgtttttgtttcattgattcttggggtgtgtgtgtgtgtgtgtgtgtgtgtgtgtgtgtgtgtgtgtgttgtctctttcatttagttctgctctgattttcatgatttctttgcttctgatttggggtttggtttgttcttttctagctccttgaggtgcattattagattgcttatttggagtctttgtatttttttttttatgtaggtgttgtttattgctataaacttagcatggtttttgctgtttcttataggtttgggtatgtcatgtttagatttttgtttgttccaagaaattttttttattttctcctttaaaattttttccttcacccagtggccatttgggagcatgttgtttaagttccatgtatttgtacagttttcaaggttcctcttgttattgatttctcattttattttgttgtggtctgagaagatacttgatattgtttcttttttaattcgttaagacttgttttgtgttctattgtatggtctatcctggagaatgtttcttgtgctaatcagaataatgtgtattctgtagctgttgaatgaaatgttcatgtcaagtacattttgtctaatgtgcagtttaaatccagtgtttctttggtaactttgtctacatgatctatctgatggtgagagtggattgttaaaagtccccaactattattgtattggaatatatctcttccattaaatctagtaatatttgctttatatatctgggtgttccagtgttgggtgcgtatatgtttagaattgttatttcttctagttgaatccacttatcattatataattaccttctttgtctctttttactgttttttgacttaaagcctgctttatctaagtgtaggtactcgtgctcacttttggtttccatttgcattgaatatctgaatttatttccctttactttcagtctatatgtgtcttcacaggtgagataagtttcttgtaggcagcatatagttgggtcttttatttttttaattcattcagccagtgtatatcttttaagtggaaagtttaatccatttacattcaggattattattaatatgtgggggtttattcctgtcattttattaattgatttctggttattttgttctgttctttctctcataatttatctttgtggtttggtggttttctgtagtagtggtaacatttgagtcttttctttgtgtgtgtgttgctttgccagtggtttttatatttttgtgtgttttcatggtagtagatattgtcctttcacttccagattaagtactcccttgagcatttcttgtaggctagtgtagtgattatgaatttccttagcttttgcttgtctggaaaatattttatttctccttcatttatgaaggataatttgctggatatagtatcattagcaatttttttttctttcagcactttcaatacattatccctttctttcctggcctataagtttctgctaagaaatcttttattagtcttatgggggtttctttataagtgactagactcttttctcttgctgtttgtggaattctctccttatgtttgacttttgacagtttgactgtaatgtattgtggatagaacattttgcattgtatctgtttgcagatttctgagccttgtgtctctggatgtccaaatctcttgctagacttgggaagttttcatctattattttgttacataggcttttaaaatcttttgttttctcttcaccttctaggacactgaaaattttaatatttgttcactttctgttgtcttttatgaagactttgttcatgtttttaaaatttatttctttatttttgtctgactaggttatttcaaaagacttgtctaagttctgagagttttcttctgccccatctagtctgtcattgaaggtttcatatatattttttatttcattcaatgaattcttatgttctagaatttctgtttggttcttttttatgatatctacctcttgagtaaatttctcattcatatcctgaattgtttttctgatttctttatattgtttttcagaattctcttgtatcctactgagtttttttagaataaataatttgagttctttttctgggattttgtgaatttctttttttttcaaaattttttattttttaaaaaaattttatgggtacatgataagtatgtatatttatgggatacgtgagatattttgatatagacttacaatgtgaaataagcacatcatggagaatggggtatctgtcccctcaagcatttatcatttaagttacaaacaatccaattacattcttttttttaaaatatacagttaggttattattgaccatagtcaccctattgtgctatcaaataggtcttattcattcgtgctggaatttttttgtgtgtgcccatttaaccatccccacctccccaccaaacccccaactactcttcccagcccctgttaaccatctttctactccctgtgtccatgagtttgttgtgaatttatttttttgattgggatctgttgctggataattactgtgttcttttggaggtgtatcatattttcttttttatgtttcctgtgtttttactttggtatctgcacatctggtgtaatggcattttttgacattgcttttgttggagagaattttttcctgaagatatatgtatggtgttggttggatatggcactttggtattgattctgtgtgtgtgtggtagtgtgtagtctccatatgattttctttttttctgtaaacagcattagtgtgtctgtgatttccccaggggcttaagatgtggttgttagtggaggctgtggtgaagttttgatggggtcagggataccaggtgtaacagtcttttggacccagtggtggcagcagtgaactgagcatcccctcagtgttttggcccgagggcagcttatgccagtgacagcgttcgtgcatccaggctgattttaggcctccaggtggcctgcttaggtgctgggattccagtggtgggtcatgcaggggagggcagcttctcgagcccctgggcagcaggtgtagcatgggtgattgcagtagcagcggtggacaactccctggaacctaagtgtctgtgctggtattgtggtggctgcaatgagttgtgtgggctggtccccagacctgcaggtgatgcatgagtatgggtcctagctctgctggtagtggcaggttaagtgggcctgacctcagaccctgggagtagtgttcaggtgtcactggtggtggacttagtgaggtgatcaccagagatcatccacaccttggattgtgtgtttgggtacttgctttggtgggggtatggagctagctgggtggaccggctggcagtggtaggcaagggaggggtgatccccagtttgtgggtggaatgctcaggaggggccagcagcaactgcattgcaaccctgctctactagggaaggtggggttgctttccttcagagtagctgtaggctggcaacttgggggcggggcatgggtttcctgccttggctctgcagcagcctgcagccctcaagtggctgtaagcaatggaatttgtccttagcgcaggtaaaaattcacagtcgccctctgctggggtgggcagtatcgctgccttgtagtggccctggcagcaggatgcagtttaatggggcctgtgttctcaaaatggcaccatgttgtagctgcttaggttcgagtgattcgtgggatccagcatgagctgtctctctggagcagtgctttcgcgtggacttcaggcagctccctgttagtcttgggacctgagagggtcaaggagctctcctgtggctaggattttaggagtcctagtggttccagtgggaatgtagaccttagggggtctctcaccctttttctgcattataagccactccagcctcctacctgatcccagccgaacaggcttgtttccctctttttccttgcttttgatgcttcccatcactactctcttgaatttcattgttctctctcaggtgatcttttttactcgctattgtggttcctctccatagatgagacaagtaccagatacatctagtcaactatcttcagcattgatttttattggttttgattgcttatctaaactagtagagcaaattattttagtatgcatggtgagtgcctttaacattcagtcatttaacaaatatttattgtgtgataactatgtgccagacacagtactaagcatttgggatatatacaaggatctttgttgtgatggagcttatttttcagataggcaagcaaacaagtaaataaaaagatcaagataattttagttagtgataaaggctattaaaaaagtaatatgctaactagtgtttgatgtgtttgtagaccatggctatggggccactactgtagattgagaagtgaaagaaggcctttctgagataatatttgaactaaaatcagaatgacaaggaattagggccctgcaaagatctgggttaagagcattcctcttagcagataaaaagttgatatgttgaaggaacagatataatgcccctgtggccaggatagagttagaaaagtggtgtgaatagtgttaggatagagccagaacaagtgctgaaattggtaattgtggaaattagacccttattcagacgttttttttgagatggagtcttgctctgtcacccaggctggagtgtagtgggcgcgatcttggctcactgcaacctccacctcccgggttcaagcaattcttctgcctcagcctcccgagtagctgactgcagcaggtgttttccgtttctgtatacaatactaaatggttctgtgagtgactgttgatgaaagacttcagaggccagaacatgaaccgggacccaaacagcattgaatatcaagtatacgggagtattccctgaatgaaaatttaattaaaccagttacactattttagtgccctctatctgaatagtatatttctatataaaaaaaatagtttaccttagtaaagtgggaatgtttaaacatttcacatcatttacaacctcacactggcactaaatcactttgctcgggcgacagttgtgtaaaaatgctttaaaattgggtcatatataaaatagttcagaggagctttaacacatattttattaactttactatatataccaggcaccgtccttggtgctaggagttggaagattgattccttcatatttgcccagaggcaaaatgatgtgaaatagacccctggctttgctgctttgacttgtctaaccttgagtaagagcaggttacttaacctctttgtgcttccatcttctcatctgtaaatagggaatgacaataatatacatctcaataagttgtcataaagatcaaattattaataacaaaggtatttaaggcataataaccactcataaaatgttaacaatttattgattttgttgttttcattattctcttaggctgggggtttcttttctcaaggaccttccaatccagtggaggagacaaatctgtaaatcaatgctatttcgtatattagattggaaaaggtagaatgcaaggtgcaaagttcatcagggttacgtataaaggaaggattgccaataaaaagtaaaatgagattttttaatttcagtgaaagaagagaaacaatcatactttaaattcctgggggattagaaagtacctgatgaccagaaagaggaagagattccgaaccaattgttaaactttaaatcccataaataatttattcaaatcaaaataccaatatataataattatggtgataataatggaagttctgtatctcttggaagatgttgcaaataatggacaatagaaacaataggcttaaccttttaacatgcctgcctgtcttctttccttccttgcattctctcattctttctttttcatgagaaattggtactttgctttctctcagattagttgttgatccatgtataacgtgtattacaaagatgaactggcctttttagaccaaatagaaattcctgtttcttgtttttatatctcagagttgtaaaagcaggaaggaaaaattatgtgag

SEQ ID NO: 309 - DNA, 26053 bp, Homo sapiens
  source 1..26053: mol_type = other DNA
cacagaagctgctcagggactatccatggcctccccgtggccaacttgagtctgctctgcagctttaggcccgacttggaaggcccatgggctgcaggtgagtgggggccaggggagcctaggggcctgagcacagctgggaagcccaagtctgtggtttccctgggggtgagtgtctaaatacctgggccgtgctatggggcagacaagacatgcccgcatggagacacatctgtggacctggtgttatgacagcagggggcttgtaaccatgaggccagcagggacagaaagcccatacctctagctccttgggagccttaggagtgctccctggttgggacagagcctgctggccccaggtgcccccatcgcccctcccttcaccttcctgagaggcaagaaagccaggcagccatgcttctgctgcaagggaagggggctacccagccagctgccatgggagcctccagcgactcagctgggtgtcagggggtgtttatgagcagccgaaatggctgtaaaagtggcacctcgcttcacttatggcctagccatcccctcccctactgggctcttgcctcaaaaagtttccagaggggcctagaagccgagagaggtctggggttgagggctgggtggaggcacaacctggggtcagagttcagccaggggctagaaatcagactgggataagaactcagcctgaggctggggctcatgatggagatagagctcagtctgggatcagggctaagcttggatgcagcctgactttggggctagtgttgggatgaagcactggggaaatataaggactcagaaatagatgtgagccattagtcccagagaacccctggtctggccaaggggttttctgagggaggaaggccaggctgcattgctcagacagctgagcctcttgccttgcttgttggtgtctgatgcccaccctggccccagggtctgtgtaccttggccagagccctactcacggtgggatggctgcagcagaggcctgtcagcctggggctgccacaccagcaggggtggggccagagtctggcccctactgcagttctgagatccagtgaccaccctggctcctcctcctaggccccagcctggggattagagacagggactcactcctactccccacccccagccaggccttttcaaaccccattgaaactaacactgacctgacactaaccagaaactgactctgagcccctggggcgtgcttgtcaaaaagggcaagctgactctgccaggtgcttgggtgctaccagttaatgtgtgacacccccaccctcatggtagcactttaaccagaggcccgagggtgagagagatgatctgtggccccacccacagctgtggaatgtccagcaggggactctggggtgaggcacatgagttatggcaggaggaatgcccttaagggacccagcacccatcagattcctctctgcagccctctccacagcccaccctcatcctcccaagtacaagtagtatgtttccaaatctcaagttttccctggtgtcagatctgaaaagaactcctcccctcagcctctagttttatctctcagtccttccaatccctccattaatgttcttttctcatcaccaagggggaaagcagggtggaagatcagtggtcacagaaccataaaacttagagacacttagaaacagaggcataggccaggtgcggtggttcatgcctgtaatcccagcactttgggaggccgaggcaggaggactgcttgagcccaagagttggagaccagtctaggcaacaaagtgagacctcgtctctacaaaaaaaaaattttttaattacccaggtgtggtagctcatgcctgtggtgccagctacatgagaggctgaggtgagaggattgcttgagcccaggaggtcaaggctgctgtgagccatgaccgtgccactgcactccagcctgggtgacacagcaagaccctgtctggggaaaaaaaaaatgctgcgtgtggtggctcacgcttgtaatctcaacactttgggaggccgagacaggatcacttgaggccaggagtttgaaaccagcctggccaacatggagaaaccccatctccactacaaatgcaaaaattagccaggcgtggtggtgcacaactataatgccagctactcaggaggctgaggccagagaattgcttgaacccgggaggtggaggttgcagtcagccgagatcgcaccactgcactccagcctggccaacagccctgtctcaaaaaagaaaagaaacagaggcataataaagctgagaccattaaaatataacactgaagaaccacaagtgttctttaggtgcccattctggcacctgggcctccgtcccaaggaggctacataccataggaggcagccctgaaatcacaacctccctccccagtaacggaggatgtgggcacacaaggagggaggggagtgtcctttacaccaggcagaagagtatgatcctggcagaggaagcagcaaggacaaaggcaggagagtggatgtgtgaagaagaccaggagtctagcagacagttcctgttagggagagtcatttttggaggaaactgtctcaaatagcacagcccttgaacaccagaaaaagaaatgagggcagtgggcacagagaagggaggcagccatagaaatgcatggggagggccaaggctggtggttcatacctgtaatcccagcactttgggaggctgaggcaggtggatcacttgaggtcaggggttcgtgaccagcctggtcaacatggtgaaaccccgtctctaccaagaaatgcaaaaattagccaggttggtggtacacacctgtagtcccagctacttgggagaatcacttgagcctgggaagcggaggttgcagtgagcagagatcatgccactggactccagcctgggtgacaaagtgagactttgtcttgaagaagaagaagaaggagaaggagaagaaagaagaagaaagtagcagcagaagaaatacatggggaatgcacctgggagtgcagtctggaagctggatgggcttgagccagcagaagggtggctgcagctggatcctaggccttaggacttgggcttgacagatttgcactgagggttggagggcaggtttgcaggctccgaggagctcaatatccacaggctgagtcttgagagcccctggagcccatgggccaggatgcccaccctcgtggaaactaaacagtaaagttaacattgcccttgaatcagctggccaacctctccattttgcagatgaggaaactgaggtccagacagccgaagagtggtagtgtccaggacacacaactggtaagcgggcaagcacaggctgttgcttagcccagactcatttcccagggcctcatgcattcgcttcctccgcgatccttaaagccctgcgctccaggcatccccagcccctccctctgcctcagtttccccacttggtaccgggaggtggtaggtttggggtcgaagggcccctcctcttagagctccagcgtgccctccccagccaaacacagaaatcccgccccgttcagccccaacccccgcggactcctccttgccttcccctaagtcgagggtcccaggcggcccggtccgagccggccgatagcttttgggagtgggggtgggaacgggggagggaggtgaagcctgagagtgggtgtctggattgagccccaggtctggcagcctcgagcctccggggttggggctgggcaagctggagaggcccggccagcagctgaatgggtcgagactcggagacccggacccgaagagacgctgggcagggagggagcgggatgtgtggctgcagacctgggcgggggtcggggctggcctagggccgagaggaacgacaggcctgggatgggactgagggcaggggacgaggcgagggtggggctggacgtgggggagggcggcagcagccaagccgggctcggggctggcagccgagcggcctccccagggaccccgacccggcccgaacgggagcccagtggactgacagcgtcgcggccgggggcgcgcgggggtaccgggcagcctcctcaggggattcgcccatgatgaaagagggctcgcttctcggctcagggtctctattcgccagcgggggccggatgatcaagggaaaaaaaatttaaaagcccgtgctttccagaagagaatgaagcggcggcggcgtcccgggttccctgctcgggtctcgatgttacagctgcccccgccccgtctccccagcactcacatcccgccgccgtaagactccgggcctcggcctctagcgcaatgtcccggggcggggggcggaaggctcctctcggcctctccacactcccgcgtcggcggctgcggagggggtgggggcgggagaggcccgggagggcgcgggggagggaagaggcgcccggccggggagaaggggagcggcagacgccgaggcgagggatgcgcgcggcgggcggtggctccgagcggcggccgggcggggggcgctggaggccaggccggccagcggggggtatcccgagagctccatgaagtccccccggggccgcggacggggcgctggcttggggaggctgtcgggggggccccgacatccatggcaaggcgggggccgcggcggcgcgctcggagtaagtcggggctggggacccgcgccgaggggaagtggccggagtcggggaggagcgactccgggcctggccggagcagccaggctgctctgtctcggtgtcagtcggcggcgcctcctcggaacccgggggagtcgccagccccgcgccgctcggctcggtggcttttttggaaacttgcaaatgttttcgtagagagaaaagggggagggagggagcgagggagtgaccgaaacggagcttggggccgctggaagaactgaggccaaggccgggggagctagagacggactgacagacaggcagaccgacagagcgtcggggccgctgcgcgcccgagccgcacaggcgcaagcggggctctggccaaggatggggaaggggtgcgggaggcggctgccgagggtctgggatctcaggaggccgaacggccgggggctggcggccggaacacctaagggctcagtgtggctgcaaagttgagatcgcaccccctaactgcacgccccgcgcggctcagaacgcgccccctgcccggccctgactccctacgccgaaagtcgcggagctaaaaataacagtcctgcgcgccccccgcagaccgcgaccccgacccctcccccgccccctccccccactgggcgtggggcgaagccacagctcccatttccccaaaagaaaaaaaaagaaagaaagaaagaaagaaagaaagaaaaggcggcgcgggaggggggcggggggcgggccgggggcggggggcccggccatatggatgtgatttcttcgctccgaggcagacgggccgctccgcagcgctcggcgcccgcccgccgcccgcccggcctccggctctccctccctccctcctgtccctccctccctccctcctttgcgctgctcgctcgctcgctcgctcgctcgccctcagcgcatgggccccgcgccgggccccggggcctcgggccgccgggacgccggggtcccataggccggggcgtgggcggggcggccagcctgacgcagctctgcaccccctaccaccaccagggccggcggcggcggctgccccgagggacgcggccctaggcggtggcgatggggaccgcccggatcgcacccggcctggcgctcctgctctgctgccccgtgctcagctccgcgtacgcgctggtgagtcccccgccgccaacactccgggacaggctgcgggcttaccctagggtccgcgggataggtctaaggcacgcagtcttgagttcccccagtagttcgaactttgggtgagagtcccctctgatccaggatcctgggtgcctgctgtctctgggatgtctggactgtgggttccagctgcctgaagcctccctatttctgaagcctcgtttggggtcccaaatctggcaatttgtggttgagttttcaccatcctctgcttctgtgagcaccatggctgtttctccctggaagatgacagtgtgacccaacagaaggctgggctttggccctgctgcgtactcccacagactttgctttggggacctctgttttctgcaagttttgttgcagtcccggacacagggaatgtaggtctgaggtcagaatcatccaggcagggggtaggatttaggggccccctccagccctcacacacacacatgcacacgtctggcttcacccagggtagaagctgtttccccaaggaggtgggtgtggtgtggcatggagaagggatggagttccctgaaggagactgacctcacagtgcacccctgtaggagaagcacagcatatcctgtggggaagtgaggagacccctggaaagactgtcactccctgagagtgacctaaaagcagaatggtagggaaggctagagggagaggagagacagagacaaagccgggtggggaggagagatccccccagctggaggggtggacagactaagaacagcaaaaaaaatagggagacaggcaaaggcagaaagctggagacacagagtgggcagcacctcctcctcctgggccagggtctggggcccacttgctgggaagggggctgtcccagcccctcagtcctattccacagcaaccccatcccctgggacgagcccgttcctggggaggctgtctgcctgtgcgcctaacttcaaagcctcttctccctgctccccagtgggggtatctgcctgctagagagcagggcagtcaggcagcctcctcctcctgaccagcagcagctccctacacggggcagagctccaggcagttccaatgagcctgggattcctccacctttgcatgatgcctgtgtaagcctgggctgtccttctccgtgcctcagttgccccatctgtaaaagagagggcctggaagaaacatctgcctgagaatcccatcatcagaggctctcccttcctctgaggtcctcagcacttcccacttacctgtgcctacaccctcacaattctggccccagcaaaggctccccaccaaagacagccccatacaaggccttgtggatggggaaactgaggttcagaggagctcaacaccctctgcagagacactccaagtactgacgaatgccaggggatagaactaccaccaaccccacccccggagtttggtgtgtgacggcctgaggggtagacagggtgatgggtgtgggtgtcctgagagtaagtctatgtgtcagagcagggttctgtgggactctgggcatggtgttcatctgggtctgtgtgattgtgagtgtctgagtccctgtgtgagttcacgtgtctgaagttgtggtgcatgacttggaggcgcagttgtgtgtgtttgtgtgtgcctttgtgagcgcctgtgcacccgggcctgttgttttcttatgtgtatttcataaatgcttctgtagggctttctacttgccattgttctaagcaattcacgtacattagctagtctaatcctcccaaccaccctcagaggaaggttattgtccccatttttaactggcccgaatcacacaaccacaatgaccattatttatctcatgccaagccctgtgcctctatgtgtgtgtggagtatgggtacccagagccccactgctctccagggaagctgagatatatgcagagaatcttcctggctttgccctggcccatgtctgagagtagaaggacagatgccagtgttcagtctgcccaggaccttgttggggcatgtgagttcactggacactccctggcttcggggccagaagattgggactgaagggcgggggcagcctactcacccatccaatatcctatgggccccctggactcatctggggccagcaagaagctggcagcctgccagctccctctcctgagcccagagggctactgcccccctttagatctgcacctatgcccctcaagcccaccaaccttatctcatggccggtcaccaaacctgtatgctacctgcccagctggtcccaagaccaggctcacatctccagtgacctcacatttggggggccaaagagcattccatctggaggacactggttgtggccagactcagctggtccatcttctgctgtacaggaaacagttacctgggagcctggagtctggggcggggtggagtttggaggaagtgatagacccacagattgtgagtaggaggcaaaggggcactcttgtccttgaggatgcgtcctcctaaggacccccccagcatgtacacatgtggaggagaaactgcaacaagagaagctggagctcagcatggggcaggccttgagtgtgaagatgtgaccactgggtaggactcacaagagactgtggtgtggactcacaggctgggagtgtgtgggaccttttccagcctgctccaggggcagcttggccatgttgcttgcttgctttttttcttgagacagagtctcactctgtcgcccaggctggagtgcagtagtgcgatctcggctcactgcaagctctgcctcccgggttcacgccgttctcctgcctcagcctcctcagtagctgggattacaggcgcccgccaccatgcccagctaattttttgtatttttagtagagatggagtttcaccgtgttagccaggatggtctcgatctcctgacctcgtgatccgcccgcctcggcctcccaaagtgctgggattacaggcgtgagccaccacgcccggccggttgcttgcttttaaagacaggaagaagccaacatgtacagaacagtggctgtccccagattctgagctagaaactgtcacagattgttttcttatttcatccattcacccagtgatttctacgctaaagggccctgagagtcacacagtgagtctgtggcacagcaggatttgaacccagatctttagacctttgcactgaattccttcctcaaaagcagcacgagatttgctgctggcaggagatcctcatgtctcactctgggttttctctttcttttttcttttttaaaaattaaatcatggccgagtgcagtggctcacacctgtaatcctaacactttgggaggccgggcagatcacctgaggccaggagttcgagaccagcctggccaacatggtgaaacccccatctctactaagaatacaaaaattagccacgcgtggtggtacgtgcctgtaatcccagcttattggaaggctgaggcaggagaatcgcttgaacccaggaggcagaggttgcagtgaaccgagatcacgctgctgcactccaccctgggcgacagaggctctgtaaaaaagaaaaaaaaaattaaatccttctgttattttgttaatttttaacttcacaactgatatatgaatatgttcttataaaagagtcaaacaagtctgtaatcccagatacttgagaggctgaggagggagaattgcttgagcccagaagttcaaggctgcaatgagctacgatcatgccacttcactccagcctgggtgacagagtgagcccctgtctctgaaaaaaaaaaaaaaaaaaaaagagagagagtcaatcaataaaaattaaacagaagccctccttgatcactcccaagccccagttcccttctagggaaaaccatttttagcagtttgggtagaggggcgttctccttcctctttctgtgtgtttccaaatggtacctctttgtgtacatatcaagtagataattttgtcattttctatttgtctggttgtttttaaataaatggcatcggtttctagatagggctctgccacatacatattttgacgtaaatgtgtgtcttagagatcttcatttcagtaaatatgaatctatatttttaaatgctgcatagtattccaaaacctgggactcattaagtagtccataggaatgtacatttagatcatttctgcataatttgtgtgtgtgtctatatgtgcgtgattccagatggtggcagggaagctccttgaaatgccctctagtgtccccatgtgactatttcctagtaggatatttctagattttgtcattgctgggcctgagaatatacatattttttattttaatagcatggccaaattgccctctaaaaagcttgtgctgctttgtacttatacaacaccaagaccaaccaggagggcctctctgcccacacccactgtctcataggatgttaagaggattctttgtgtttcacctttgcttggataggtgaaaatggtgtctcttgtcattttaatttgctgattaccagtgacttctgggctttacagtgagagcttgctcggggccattaaccatcattctatgggttatttgtctttttcgtattgatttgttgaagctttttatatcacctgctcttaaacacattcacctcagctcttgaaacggcttatggacagagcagcaggagggtgccgagccctccgaggaactggggttttcttcggaatgttttaatgaggcgtcaagtagcctccctcagattcctgttgtgggccttctggggacactccctggtccagccaccacatcaggaaggcagctatttcagaaggagagtcctcaggaaaaagaaaaggtggggcgagggttttgcagacctctgaaattgtctgcaaaatacggtgtgattgggagaagggcgcaaacttttgctcaggtttgcagaaacatcagagaccttcaaacccttaaaagccccaactctggggccagtcttatgcccgaggtgagacctagtgggatcccattctgctgagcaggcgatggcttagattaggccatactgttcttctgggccttgattcctcaacccaagtagggcctgcttatgaagatccaccaggtcgtagcagccaactccgctatcccaggctgcatcccactgcctgccccgaaggcggccacgctggctggccaggatgagaggcgtcacagtgcctcttcccccccagcccctcccagccccaaacacaggcagcctgttcaggaaagcctggcgaaggggaggaaaagtcagcacttgtcagcggtggcggggcaggacgaggagcctgctcaggccagccggacagagagagggcagcaggggtgggggagcagtcccagccagctggcacgggagacatccaggggtgccagcatgggtcccagtagtagaacctggaggagggctgtaggaaggccaggaggtcatgaaggggtctcctgttagccagggttttctccttctggctgtgctggaggcatcaacggcctggttcccaacaccagagcccaactgtcctctacccagttacagctggggacaagccgccatcactggcatcaccggcacctttatgtctacacacctctgctcctaaatcggcttcggggaggctgccttaggggatctgcaaagggagacttgcttaatgtagcagctaaaatccaggattatggaaagatgataccgtggctggtgccagggtacccgtgtggctgggcacttcctcctctctttcccttcttccaaggctgctgcttcagtgtcaagcagatcttagctccatccctggccctcctctttctgtgactcttggcctcagtgtccctgtctgtaaaatggggatgtggtagaaggtgcaggaggcatgggttttaaagctccttgctgaccatggggaggatgtgctacagtggagggtattgaagccaagcaccatgatggctgggttgggggagtcaagtcagccctaatcaggaccataggaggagtgttggggggatatgggacagctggtgcagggctgggtggcctgtaagtggtgggtatggactaagtgacccctggccacagcccagccccagtccctcagtcctcacccctgagacccaagatctgcagatccgctggatctaaggggacgcaagcctgagtcctctgcaccctggcgctgagccaagaagacaggaactcctcaagggagagagggttggaggggcggggagaagggagtagcagacagggggcatgccaggctgagaagagatacagctgtcagcatttccccttcatccccaggagataaggcctcctcagtcagggcagaggcagaggagggggtcctttttcctcctaagctcaagcttggggcctctggcagtaaccttgaatcctaatgtaagtccagagtggatccagaaatgcaaggagccattgggatactcttccatcccaaaagcttgccaggaacaccttatctagcaggtcctcctgtagtccctgcccccagtccaccctggggccccatctcccatctgcccctcactgtcacctgctggactcagccatctacccagataatctcccccagccaccttgggtccctggcctggctgggagcacccatgtcaccaggcagcaggggtgcacatggcggggatgtgacttgctgctgctgctgctgctcacagtatcaacaatagcaaccagcttttcctgagcttcacccctgcacaggcttgttgtgaagtacttcatttaatcttcacagcagcttttttttttttttttttttttttgagatggagtttcgctcttgttgcccaggctagagtgcaatggcgcgatctcggctcactggaacctccgctcccaggtttgagcgattctgctgcctcggcctcccgagtagctgggattacaggcgcaccaccacacccagctaattttgtatttttcagtagagacaaggtttctccatgttggtcaggctggtctcgaactcctgacctcaggtgatccacctggtttggcctcccaaagtgctgggattactggtgttagccaccgtgccgggccaacaacagccctattattaccctgattttacaggaaaactgaggcacacgggttaagcaactttctcagacacgaagctagtcaagggtggaggtgggattcacattgtggggctggtggcagaatctccttgaagaggagggcacagctggagggaggagtgaacaggagtgggggcattccaggcacggagctgtgagctaacgtttggaggggtagcgcacttggtgtggggttgtcctcctcttcttgggaaagtgcttccttaactttaacatgagttattcttgttgcaatggctgtgctaacagataaataggtcctaaagttcagggaggccagaggtggggccaccacccctatggatgaatgaaggagtgtgggagtcatgcgtgctggaagcacatatctttccctctcctgaacatcccaactccagaaaaaggggtgtgcctcctcctggccatggagaaggtgaagccaacagctggaggtagaggctgagccaattccttgagccagtgaggggtgtgttggtcagctttcggtggtcaggctgcccaatggccactcagttttcaacccatgactgcctgcctgcagtctaggccatcaggggtgacccccagtcatatcagtaggctggtctgtctgttgggaggcccagggagtcagcaagtctctaaggatgtgtgggagcctccgtcagtcactccagagctctccatcagctggagaaaatacagcacaatgggtttgtcttgagaggggtggaggtggcagaagaagaaggatagtggggagggggtaagacaacaagatggcaaaggcagtgtagatggtagttgttgggcaggtggcagtattgctgatggtgctaatgttgccttggtgatgctggaggtggtggcagtggtgctggtgctggtgatgtaccagttgtgatggtgcagatggtggtgatggtggttatatggatggttacagtagtgctcatggtggtaacggtgatgccagtggtggtggtggtagtactgggagggactggtgatgctggtgttggtgttagtgacagtaatgatggttattgatggaggtactagcagcaacgatggaaatggtagttaatgggtgctgtaaatggagtgaggtggacagggatcagccccctcaccagcatggatcccccatgtcagaggcacagggagagcttcaggttagtcttggaggcccctggatcctggcaagtccaacttgtcctcccttaagccatcccatcattctgtgtctacctctgccccagccagctcagccatagctggggaagcaaagagactaggatagaggagcttaggccagccgccagcacgtgaggatctgctccagcccttcctggggtccatagtaccagcggagatctcagggtccacctcagcccccagagacaccagaagcacgggccacccacagacgcaaaggctaaggagctgccgcctcactcacagacgcacacacgccgccctatgcccagaaatacatgtgcacgtgcatgctcacaaacacgtccggctcgcgtcccatactgacaggctggacagtctccatgtgagaacgcgcacggacgggcacacacaagtgcacgcgccggccactcgagaatgcgctgccactcgcgcgcgcacgcacagggacgcgcacgcggctccgctaagtggaaccagcagaacccaaggccggccgagccaattggagactccttggccctggaagccctcgctgctgccgccaagagacgcggtcaattaacttctccctgcagccaggctctctgacccggcctgcccgcccctctcgccggtgcccgccccatgcccgacccgccttcttcctcccctgcctcctctgggtcctcccgcccttcacagccatgctcggactgcagggccccggccccgccttggcgcgtctgaaggatgcagctctgccgcggagctgaggagacgtagccttctggggtagggatggagggggtcgtctcaggggacatacccctgcccaggggtctgaggaaacacgaccctgaattaagagggatggggctgagggcttcacagccccgccctggggaggtttcagagaccgccttaacctctgcgggtcacattcacgggaatggctgggctaggcacaccaggctgctcccaagtcagaggacagaggctgagacccctcagcagccacctgctctgggtgagcctccacccgcatgatatttcatttcctttcttataatgaggccagtgagtcccggtgggtggcagccagggcccagggtgtgcaggttggagggaagggaaaggacattccaggcagagaacagcaggagtgagggcctgagtgtcatcagaactccgagtctggatggagggagctcccagataagcagtggaatgagagggactcccacccccagccagcaccagagtgcccagcccaacccaggccgcatgccaacagttcctccatcctctctttctctctcttgggattgtaaggaggggaggcattgaggcactcaccgttcactggggacagcattgactggggagctgggccaagatggaaactggtgactcccaagaccccccagggtgccaggacttgaaggactccaggctgggtttgtctccccacagttcaccactccttatccaccccctgcccccgactcatgtccccagcaggcagccaggatcctgtgtggatccatcctgggacattccattccagtcccatgtacccctggggaaaggactggacagagaatatcagtgactgcagcctacagggttactggcgggcaggcaggagagagcccctgctttttcccttcgatcaggcaggccctacccctcagagccacagcttcccatctgtaaggtgtgagctccatagagcagattccccacatgcaggggaaatcccaccttccctctagagtcagggccttttgaaagggggtagtccctctgggaaattgggatgtctctgggacctgctgctgcgccggaaagtcctgcctgtggtctgaccttcggcttggcaggtggatgcagatgacgtcatgactaaagaggaacagatcttcctgctgcaccgtgctcaggcccagtgcgaaaaacggctcaaggaggtcctgcagaggccaggtgggggtcaaaggaagagggtctggggatgaggtcaggtgagggaggggccagtcaagggcgggacccaggatacagagccaggtgaaggctctctgtgggggcggacttaggtaaagggggccaggccaaagtgagaaccaaagtggggtgcgtggtgcaagagtggagtcagcaggctcgggcatccatggcttgtcctaagtctcgagctcaggtccctgtgttgcccacaaccagcactcagactgatagctgtcgggttaatctcatcaactgaagaggcccagaccccaactgactgaaggagaggagccgcttcctcccctgacaagcccttagggttctgcaggggttgaggctggtgatcgcccagaacacaagcacacaatgacaaacacactctgtggcacacagattttgctcacactcacagagactcacatggtctctgcagtcacagccccaccgatgccagccccaacagtggctcccagtcacatcgagatctggggggtcagatgggccccctcattctgggtcctgaacccagcccctcttcttaattgtgaaagcctggaggagcctctctttgcccctcatcatccaccatggagcctctcgcttcctactgtaccccaccctgctacccacatccccacactgaggcccgagggtggaggcaggaaaatgagcacagtcattctcatcccagtccaggctgcttggactcagcttcccatcattgccacagacccgacatgtaaggaccaggggggcctagcttgggcggtggctgaaggaatacaagtcagaaaatgaggaagactttgtggctaggaagaaagacctctccagcctgggcaacatagtgagaccccatctctaaaaaaaaaatttaaaaattagcgaggtatggtggtgcacacctgtagtcccagctataggggaggctaaggtgggaggatcacttgagcacaggaatttgaggctgcagtaatttgtgatcatgtcactgcactccaggctgggcgatagagggagaccttgtctcaaaaaaaaaaacaaaaaaaacaaacaaacaaaaaaaaaaaacgtccagcatctctccaatgagaagagaggccaggctccatctcagattaggcatctcaacggccactgtggaagctgtgaaccacatacttgaggatccagggcaggggatggggtggtcttctctgtccactcttgactgtaccaccttgctcttgtcttctcaccaccagcttctttacctgcacagcactcaggccagacttaattttcgctatgtaacctgtccattgacatcacccactctgtctgctttcaccgtgcgccccctggtggggccttcactgctgcgtggccttggcccccacccactcctgactcctgggtgggaggataccacctctgctctgtcttgcccagtttagtgctcaccccactagctgatcctgcactcccattccaaccctgggggacaatctccacctcctcttattacttcacctggcaagcactttacactttgttaaacacctcctcacccatcgtctcagatctcccaacagcctaggtgtcaccagggcaggagacaacccccccattgtacaaagggggagtctgaggccaaagagtaccctgggtctcctgttgtagcacagctgacagccatcattaccaccctggtttctccagccagcataatggaatcagacaagggatggacatctgcgtccacatcagggaagcccaggaaagataaggcatctgggaagctctaccctgagtctgaggaggacaaggaggcacccactggcagcaggtaccgaggtacgtctctgcttccatgcatccagctggcatgggcttggatccacccacccccattgcactgtccctctgatgtgagctcatgcttcttggctcttatagaaagtaaaaggctgcagccacatccccaggcaaggggctgggagaagacagagtgtagtgggaaggaaggggagctagatggctcaggcctcagaaagagatgaacagagaactctccagcaccacaccaagagtggacccagggctacggtcccacccatggagagaaagagagatgacagagaaccctgggggacagagaggcagggagagatacacaaagacagacagatagtgacagagaaagacggggagaggcatggagacagagatcaacagaggcagggagagacagtcacagagatagaggggaccaggaggcacacactgaagtctgggctcagtgtgtcagaggaggtacatggggacacatagtggatagggccacagaaatagagaaggagaggagggcagtggcagagggtggggccagaggcagtgggacaaggaggggagaagagaagggagggaagcagatgaggaaaggcagacagagcccaggctttggccacagggccggtttcagccggccgggtgggcagcagattccagatgggccacatctgggaggctgtggtcaccctgtggctccctggggaccagagggaattgtgggcctggctgggtggggctgggaatatggcgcccaggacagagagcctttcaccaagccagggcgggtccagccatcaaggcagccttccagggtggctggagagtcctgtggttggagccctacagagggagagaagggggctgcaagctgggagtggaatgtggaagatacagaggctggggaccctccaaggtcacttagcctccctgcagtgaggctggggctccaaagtgggatgtcaccctactttgaatcccaccattagcacttagatttggggaatcgatctcccccagcagtggccgtgggagtctcacagcaggtactcagggcaggcattgagtggtggtagaagcatgggccaatgtggttaatcccaacttcccaatgaggaaatggaaatagaaagacttgggacacctgcgtgaggtcagcagctccttggagtccagctggcactagaaaccagacctcctgcctcctgtccatgatcccaggggaaggggcacacagggagcctcccagctgagggagagttagtctgggtacttgcccttcttcagagacacctggaaggtggttccaagagcagagagaaaggcgagaggcctggcctggggctgagcacttgaagaggacagggccctgtgttgtatgacctcagcaagttgcctacctctcttggcctctgtcagcccatctggaaaatggggccagtgccagtacctgtatcgcagaggccatagtaaattctatgaggtgggtacagcccacagaaatacattttctccagagtgctccaaagcctgaattttcctgcttggggcacacctgtccctgcaggaaccaacaaccactgatgggccgggtgcagtggctcatgcctgtaatcccagcactttgggaggccgaggcaggcagatcacctgaggtcaggagtttgagaccagcctgaccaacatggagaaaccccatctctactaaaaatacaaaattagccaggcatggtggcgcatgcctgtaatcccagctactcgggaggctgaggcaggagaatcgcttgaacctgggaggcggaggttgcagtgagctgagatcacgccattgccctccagcctgagcaacaaaagcgaaactccgtctcaaaaaaacaaaacaaaacaaaaacaaaaacaaacaaaccacagatgtattcatccttctgggtcactaatcatggccttgactctcccttggtatcccctaccctgtctgtctctgggcacagggcgcccctgtctgccggaatgggaccacatcctgtgctggccgctgggggcaccaggtgaggtggtggctgtgccctgtccggactacatttatgacttcaatcacaaaggtgaggcctgctggaaggggtggggattacaaggaggctgagacttggagctaggggttcagtgcctcgagacctccctgccggccctgacctcccatggacctgcaggccatgcctaccgacgctgtgaccgcaatggcagctgggagctggtgcctgggcacaacaggacgtgggccaactacagcgagtgtgtcaaatttctcaccaatgagactcgtgaacgggtgcgagcctttctcctccccaacctgaccaggataaattcactcccaccccacgggtgacccctgacccagccctgacccctgaccttgactcctccagcaaccttaccctggcctcttgctcttaccctgatgctctccctgggtcccagggctctgactgtgtctccccccgccccgcacaggaggtgtttgaccgcctgggcatgatttacaccgtgggctactccgtgtccctggcgtccctcaccgtagctgtgctcatcctggcctactttaggtgggcggggcggggcgagaggcggcgggacatggtggagggggggcggtggccgaggtctgatgcgaccccctccctgcacccatcacccccggcgggtgtccctacctacggcgcacaacccagcttcctgtccacccaccgcgcgtccccgtgcccccacccacggtcatgtcgcgcgccccgcaggcggctgcactgcacgcgcaactacatccacatgcacctgttcctgtccttcatgctgcgcgccgtgagcatcttcgtcaaggacgctgtgctctactctggcgccacgcttgatgaggctgagcgcctcaccgaggaggagctgcgcgccatcgcccaggcgcccccgccgcctgccaccgccgctgccggctacgtgagtacccctctgcccgcccgctcccggtgccgccactggcctcgtggggccccgccccgccccgctccagcccggccctcgccctgcccgcctcctgccagcgccactggcttcagccactcaaacccgtcttatagggtccctcgcaaccctcagctctgccgccgaccctgctgccaagggctccgagtgtcccacacgccccgcgctgccatcaaggctcctacctcaacccagtaccctctagccactctacctcttcactttgcctcctgcccctgacaccgcatccccctgagagagccccccaaacgaagcctgccccttcctggcctgtttggccggcaccacttgtcctctcctgccgccccagccccccagcccagccctgacttcccggaggcaggccctgccctctgactaacaccagctggtctcttaggcgggctgcagggtggctgtgaccttcttcctttacttcctggccaccaactactactggattctggtggaggggctgtacctgcacagcctcatcttcatggccttcttctcagagaagaagtacctgtggggcttcacagtcttcggctggggtacgcgggcacagcgggtagcgaggtgccggcaggggtgggaccgtgggtgacagggagagggcagcccctggggggaggcgcccacacagcacatcccgccccaagtggaacagcaggagagaggcctgccgcccttctgtgatcctgaccctattccaggctcaggaaacagcagggcttggccagggatcaggttcacctgaggttagattcacctgaattgaggctcggcccaggagagggaaaggaggaaccatcaggccaagattcagctcaggatcagagtaggatactgggtcagaggtcagcctggggctggaattgggatccgggaccctccctctaccctgagccccatggactaggccagcatctattaccccaccagtccccttgctgggatggggcgcggggctgcccacaccattgccagcctcagcaggcctgcggggtccatggcccagagccgtgggcccagcacctcagcatcacctgagcttcacagcacctctgcagaatgggttgctggagctgcgcactcctcccagccccccacaggctctgggatccagttaccgataattgtccattattgttggcagctgcagagcttggctgggctccgggacaactggccagactgcagaggggtgggccgggtggctggagccctctctgcactcagcacccagaggcccacaggtcaacagccaccgcctccctgcccctcgacatacatcctgaccctgacctcaccatgacaagccccagagttggggagacctgggcccagtcccaggaacagatgcaggctctggggctaggaggtgtcctagtggactggcgacatgcagattgggagtgcatagaatcctggggcacaggaatgtcacagctctttttcttaccgtaaagccaggtcataccctatccctccaagggtgtaccaggcctagagtcaagttggtggtatgtggtcggggaggacctggggctcccttcccagaggcacagctcacccaaatataccatgtgccccttgagctggcgcaggccaggacatactgacacaccgaggtctccctgtggcctctgcttgggacaaaacctctcaccccatccagtctcatccacgagggctaggacctttcaaaccaggttgtggggggtgctgtgctggggcaaaaaaaaatgcggaaaataggctgtctccccatgggagctgcaagtccaaagcagtgccctctgcagagggagtggacagggcatggatcagttagtgataccttattattatattatgccttgtaccccatatatgtgcatatgacatggagccaagatgagggcagaggctgagctgggttttgagggctggagccccaaggggaagctgttagggcaccacatggcagagtgtggctctgtcaccaagtggaccaagtgcccagtgtcaggggttcagggcaatggtggggtaagctgggggtcatcgaggatgaggggggaatgaccttgtggacagcagccacagtcctgcacactgtccccctctgtgcccacaggtctgcccgctgtcttcgtggctgtgtgggtcagtgtcagagctaccctggccaacaccgggtaggtccaggtggagaaggggcccaggcaagaagcacccctgggtcccttttcttccaggaagcatgtgagagggcctcctgtaccctggcctcaaacggcccagcctcaggagttctcagtccagcctcaagccaggagcaccctcagggtcacaggaggctacttccaaagaggcctgtgagggaggcctcaggcctggccacacccagcacccctgccctgtgtcctcaacagctaatgtcagaccagaccaaatctgggtctctgtgggcagtcttaggatgggaacaggagggatgggagctaatgcctcaacctcccccaggtgctgggacttgagctccgggaacaaaaagtggatcatccaggtgcccatcctggcctccattgtggtgagcaggggtgggctgctggccacaggggtgggtgggatgtgcgcctgcgtcccctggaaccagcccctgacagggacctaggaggcttccctggaccccagtgtcagagctacagaggccggaggaccagctgatccacactccagcccagaaaggaaaaccaagggctcaaggagccacccagagatgcagtgacagagcagagcctatggccgtggctgccaggccttgccccgccccactagggtgcagcctccagacgcagccccctcactcccacagctcaacttcatcctcttcatcaatatcgtccgggtgctcgccaccaagctgcgggagaccaacgccggccggtgtgacacacggcagcagtaccggtgagcccaccatgcctgccatgccctggctcctcaggggtccctgagtcctggtaccatgtaccccaggaaagacagtggccccatgaatgatcctggggcaagggaaaggacccagcgtctgactccctggctgtcctcacccacctggcctgcccagcagtgatgggaggccctagggcaccccaaagccagcctgcccacttgtaccaggccctgcactagagctggagtctgtgagtgtgcaacgaacttgaacctctcctcaaagagttggttgcagggggtctgaggaacaggtaggcggtgagtggccccgggaaggctgcagctcagctgaaacctgaggagcggactgtgggatagtgaggttcgaccgtggaggggagtgcttgccagctgagggctccacaggtgcgaagggcccagggacagggggactgtcatttgaagtccgctccgggacaccgctgagaaccaacgggccctattagcacttagccaggacagcagccatgcaggtgaactgggttgtcctcccatggtgactggagccctgggcccctttgagcttccggagcctggggctcgcagggtggggggtggcacaatgcttgttgaaggggaagtggcttggccctgacctacctgccccgctggcccaggaagctgctcaaatccacgctggtgctcatgcccctctttggcgtccactacattgtcttcatggccacaccatacaccgaggtctcagggacgctctggcaagtccagatgcactatgagatgctcttcaactccttccaggtgcgcagtgctggcccgggcctggctgagggtgggaggggttccgggggcaggcctgattcgagacacccctcttcacagggattttttgtcgcaatcatatactgtttctgcaatggcgaggtaagcaggagacagtgttggcatagggcagggtggggcagataccccagaggcttcctcaaggctcatttctccattcttccaccctgttatttctttgttcctccaagaacacccctgaggacattctgaaagcagagaagtctttccagatgatgcaggttcaggatgtgctaggatgtggggactcttcagtcactggcatagccaagtgtcttcccagccccatggttcaattatctgtgacccagattggaggactcagccacctttggggcaatttgagccttgtagattctgggtgtgtcggctgcctgtagccaaacaccctgttgtgaggatgggatttcacttggccttggagtttcccaggagtcccctattcccattttcattccgtgctgggtgtccaggggccgggatggggcatcgctggggttgggagacacacctgactgccgcacccttactgccccaaggtacaagctgagatcaagaaatcttggagccgctggacactggcactggacttcaagcgaaaggcacgcagcgggagcagcagctatagctacggccccatggtgtcccacacaagtgtgaccaatgtcggcccccgtgtgggactcggcctgcccctcagcccccgcctactgcccactgccaccaccaacggccaccctcagctgcctggccatgccaagccagggaccccagccctggagaccctcgagaccacaccacctgccatggctgctcccaaggacgatgggttcctcaacggctcctgctcaggcctggacgaggaggcctctgggcctgagcggccacctgccctgctacaggaagagtgggagacagtcatgtgaccaggcgctgggggctggacctgctgacatagtggatggacagatggaccaaaagatgggtggttgaatgatttcccactcagggctggggccaagaggaaaaacagggaaaaaaagaaaaaaaaaagaaaaaggaaaaggaa

SEQ ID NO: 310 - DNA, 9770 bp, Homo sapiens
  source 1..9770: mol_type = other DNA
gagcgcagctggcctcacccggtcccggcgccgccttccggagcgtagcggcctctagctcgagcagcaggagcagcccgcaccggacaacttgcgagccatggggctggcggatgcgtcggggtgagttcagcgcacattcccggtggccccgcgcgagcgcctcgctggagcaggcattctccgcttgcgacgcctcgctggagcaggcattctccgcttgcgacgcctcggtttacctctgctgattttctgcaggcggctgcccctctgcagcaaggggtgggggcgggagccggcgcgaccccagtcccttgggctgtgcggaaagccgctggtgtgacgcccgagggccatcccgggccacagggaggcagctgcgtgcggaggagcccggccaggagatgtgccggcgggggtgcgtggggcacgggagtccctggcagcggcccgtggactagctgctttcagctgagtcccgagtccacccagctccactgatcccggagtgagcgctccggcctttctggccccagttgccttcctacagggaggggccaatgatcaaggctccgccctccaaacgcgggtcccaagttgtcgggggagggagccctttaagaagacctgagtgactcacgtaggaaaggagagggggctctacgatctccttgagatagcggtcccaagagtctctgaggatcttccttgcacccactccacactcctccaacagtacagccaggttagaggcgcttcccaggtgagttcctgtccctcaaatgggatcctctccccaggtcagggcttttcctagatcagaactttcctgactggtgaaagcttccccaacaggctagagttttcccccaggtaagatccttctgtgagatctattcccaggtgacagcttttccccattccacgtgggagcctcgcccgaggtcagagctttctctatgggagagtaccccccaggtgagaaccctctccctctaggtcttttcttcccatgtgagatctttctctgacttcaagtaggtgcctctgggcagagggaagattccccctgtatcagaacttgccaggctgataaagattccctggtaggtcagagatccctctaggtgagattccccttgaaagcttctattcccaggtgagctctttcccccacttcaagtgggtacttccctttccatgtgggagcctctccctctaggtgagagattgccactccaagagcaagctccttctcaggtgagagccagtccttggcttccccataacaggcctgagccgtctacaacctggaccctggggctggaggcccaggggcaagcttggctccaacactttccttcccttagaggggagggtctcatctgaggcctgaggcttgggaaaggagttgcttgaggagctggacccctggtttgctggaccccttccctgagtgtgctctcagccagcagtgggctcccggggcagctggaggaggacctggggactggagagggactgggtgggggagggagcagcctgggacctggactggtagaacactcagcactgggctgccacatctcggctggaggtatagctagtgctcatcctgcagtccctacttgggggactttgtcctagaaagaggctttctcaccagccaaagttcaggtactgcccctgtctgagtttggacatgtggcccacagatgccagctgggggctggaatactgtaccttgatcttagggcctggaaaaatcaggtaggtaactctctggtcctaggtggaggtgtaggggaggttgggccagggatgccttcactgtgtctctctggtcttgccaccccagaccgagggacacacaggcactgctgtctgcaacacaagcaatggacctgcggaggcgagactaccacatggaacggccgctgctgaaccaggagcatttggaggagctggggcgctggggctcagcacctaggacccaccagtggcggacctggttgcagtaaggccaagattggggcctgggggcgctggcggggcccaggtagcccctgttcctgacacctacccctcatatcatgtccctaggtgctcccgtgctcgggcctatgcccttctgctccaacacctcccggttttggtctggttaccccggtatcctgtgcgtgactggctcctgggtgacctgttatccggcctgagtgtggccatcatgcagcttccgcagggtgagccaccttcagtgcgtcggcctggaaaccctgtggtctgtgatgcccaaaactggggccatgacctctaccttggaactatggcacctaacccagggctgggattcccttatcgtttcaagatctgctctccaggcctgcactgctaccattctacccctaggcttggcctacgccctcctggctggattgccccccgtgtttggcctctatagctccttctaccctgtcttcatctacttcctgtttggcacttcccggcacatctccgtgggtaagtggaggcaggcctagccttccaggaggatgcccacatccatcatggagggcagggtgagggggcactgagcagggcaggagcggctggggaagagggcagcattggtgctgcatccctgggctagcccacgagtcatccccaggcaggactagacccctgactgtaggaccacagaggcaggtgacctcaaagccctggctccaggaagatgagagtgggtgaggcagcccaaggggcctggaacttggcagaggcctgagcagcctaaggccagccctgaccccttccctactccacagagagcctctgtgtcccgggaccagtagacacaggtgggacagggtagatgagacagggccagcatttctagccatgcttaagggcctgtgagctcagggtttactcctggcctggccaaacctgaaccgccagcactgtccctgttcatgcagccataatctgagtacatttatccagaactggaagtctcctggcctctctcttaagaccagggctccagggcagggcagtgtcctctcctcttcagacctgccccgtgccgtccttacagggacctttgctgtcatgtctgtgatggtgggcagtgtgacagaatccctggccccgcaggccttgaacgactccatgatcaatgagacagccagagatgctgcccgggtacaggtggcctccacactcagtgtcctggttggcctcttccaggtgtggaacagtcaggagtatgtgccccccaccaccacttctgctcccgccactgtcctgtctgtactcccctgagtgtctgaccatcgtcgtcctcctcttgccgtctactcatccccctcccatcccacttgccctgcgctcctcattagcaaccccaggacccctgcctctcctgactgcccctggccgccccacaggtggggctgggcctgatccacttcggcttcgtggtcacctacctgtcagaacctcttgtccgaggctataccacagctgcagctgtgcaggtcttcgtctcacagctcaagtatgtgtttggcctccatctgagcagccactctgggccactgtccctcatctatgtgagtgagggtagggggagggaggggtaggtgtgccccatggccttgagtgctagctgtgacctggcctctcctcagacagtgctggaggtctgctggaagctgccccagagcaaggttggcaccgtggtcactgcagctgtggctggggtggtgctcgtggtggtgaagctgttgaatgacaagctgcagcagcagctgcccatgccgatacccggggagctgctcacggttcgagggccagggagtggagggcaggggagaagggcaggtcaggctgggtccttgccacgtgggcagcctcctgtatttgagggccagctggaggggggctgggagggttcttgggtattgtggggggcacagcagaaagcccctatgttggtttcttcctgcccctgacagcatctccccatagccgaaatggtgttgcctgtctctcaccctacgtgactttttcccaccctcgaagaaggttttgcccagtatctccctcctcacctcacagtggtttatgtgtccccctgaccatggtgccagcacctgcctccctgactctgtcctctcccacagctcatcggggccacaggcatctcctatggcatgggtctaaagcacagatttgaggtagatgtcgtgggcaacatccctgcagggtgagctctggcctccatcaggtcagggagggttgggcagccaggacaggaccttgctttggcctcacagatacctctcacaggctggtgcccccagtggcccccaacacccagctgttctcaaagctcgtgggcagcgccttcaccatcgctgtggttgggtttgccattgccatctcactggggaagatcttcgccctgaggcacggctaccgggtggacagcaaccaggtctgggtgatgcgggatgtgtaggaggcatccaagtgtatggaggcgccagcaacgggtgggggaggaaccggtgggacacagggagacagcagatgtgctgaggccacgtgggggactgagggtgggagagcaggacgtgtgggacagcatccagtctctgggggccacttggtggggatggagattggggatgcacaggcctagatacagtggaacagtgaccagccacttctaggaagtcttctcacacccgtactgtcccccgtcaggagctggtggccctgggcctcagtaaccttatcggaggcatcttccagtgcttccccgtgagttgctctatgtctcggagcctggtacaggagagcaccgggggcaactcgcaggtgggctttgggtgtgggcatgggtgtgggcatgcacattgctttgcctggggaaggaggtctctcccctgctcactccctccccgaacaggttgctggagccatctcttcccttttcatcctcctcatcattgtcaaacttggggaactcttccatgacctgcccaaggtgagcccccacccagccaggtttcaggtcttggccaggccagggctctcaaatcagccagtctaggttcaggcgaggggtggggacacaaggttaggttctgtttttcaaggctgagatcttcaaggtgagatttggagacaagggtcaggggctgggtgggggtttgtgtctggggtactgcctgagtgcttgggcttagtctggctttgcctcggtgaggagggttgtcagcatcgggtgccctcaatggcccctggtggcactgtccccaccccaggcggtcctggcagccatcatcattgtgaacctgaagggcatgctgaggcagctcagcgacatgcgctccctctggaaggccaatcgggcggatctggtgagtgcactgggagcccagggcagggactgggcagccccatggctcctcgccgccctccaaccgctgccctctgttctcagcttatctggctggtgaccttcacggccaccatcttgctgaacctggaccttggcttggtggttgcggtcatcttctccctgctgctcgtggtggtccggacacagatgtgagtccgccatgttggtcccctcattccagctagtgagagagtaccacagggctccccgcagctttccccacatctctggggacttcaggctccttcggacccctctgttatcccctttttctgccccctcttcgtgcattctctctctccttcacaggccccactactctgtcctggggcaggtgccagacacggatatttacagagatgtggcagagtactcagaggtgagtgtcaggggctgagtgagatggtgtggatggggagacggaggaagaatgagcctttgtggattcgttccacacttggccagggaactgggggctgaggatactttggctttggtctttgggatttcaagggaggagtttaggtctatgaccccctctagaggtatgaagggacagagggagagtggacagagatgggtctggggctggggaggggtctgtcgtggagtcaacagcacaagctccacctgcagagcagccgtgggtcagagagccggaatggcagctccctggggcgccaggttggaagggaggcatttcctgatctgatcagtggggttactaagtcctcagtcatccatttatctcctgagaggtcttgggccaagtgctaggaacataggtggggggctctggaataaaacaaggctgttgcctgcaacatgggcacagtgcaattaggcagtgcggggaggaattaaggggtctgagacatgggagaggatgagggggcagcccagcccttaccatgcatgcctggagcccagcagagacccgggctgtgacccgaatggggtgggagcggggaaggtctgattgatatgacagcctaggaggacctctgtctgggtgcagaaaacagaacacaaggcaggggttggaaacccaagagaaaggttaagagcctgtgaagcctgcctgggtggtggcaggagaggtggggagggagaggcactgtggggggatggggatgacaccgtcgggcttgtggcctaagcccctgggagggcctggactgcagcctggggagcagagggctgggcggtggcaggcactgggcacactagggaaggaaaggcaggagaacaggatgcagccaggagagaggagattcagccaccaccagttctgcctcatccccaggccaaggaagtccggggggtgaaggtcttccgctcctcggccaccgtgtactttgccaatgctgagttctacagtgatgcgctgaagcagagggtgagacggagtccccaggatgggtgtcaggccccagctcccagagagctcaccaacccttctctgatgtttgcctccagtgtggtgtggatgtcgacttcctcatctcccagaagaagaaactgctcaagaagcaggagcagctgaagctgaagcaactgcagaaagaggagaagcttcggaaacaggcagggccccttttgtctggtgacccccatctcctgccccctgttccctgccccagcctttctcctggcccccgactcctccctcgtcctcactcctcatcccttcccctttctccctcatgctcccagggaccctgcttcactcccctagcaggtccgggctctaggcagcattttctctcccatcatctgaaccagtgacagtgagaaccgtcacagtcctcttccctttcacggctgttccaggagcttcagcctggctgctgcaggtcccacagcttctggtcctggcccacccacctgcccagcaccagggggcatcaccaggcctatgtgacatggctgtcatggcagccgggctagctgtttcccattccctgtcttccctggtgtaggctgcctcccccaagggcgcctcagtttccattaatgtcaacaccagccttgaagacatgaggagcaacaacgttgaggactgcaagatgatggtgagactggaggtgggaaaggaggtgacagctgtgagctgcagagatgcaggatccacatgtctcatgaggaatgccatggacccagcagctgtgggctcgagggtgttgcgccgatggcaggaggagtggggaggctgggtcagatattcttcagggagcgtcgtgatatgccacagaatctaggcttagattctcaggcctagatgaagaccttgaatttgtagatcccacaagacttcccccagagtctgctcatgggtagaggaaagggatggggtatatgggagaaaatcaaggggtcaaaggcaggcgtggtggtacgcgcctgtagtcccagctcttcgggaggctaaggcgggaaaatcatttgagcccaggagctcggggctgcagtgcgctctaatggtgcctgtgaataaccactgcattcagcctgggcaatgaagcgagaccccgtctctaaaaaaaaaattgaggggtcaaagaggatgccaaacttaattagagactgagacagggcagggtgccgaggtgtctgcatgcgtttcatgtggatgcccgtgtctattctggcctgctcctgggccccctccccactcagccctggctgatgagaatgggacagggactcccttctcgtgtccctgtgcagcgtcggcccaggaggtagcagagcagtatatgcacatctgggtgtgccctcctgcatgtccccacacatctgtcattcctgtctttgcacacctatgtgactcccgcatgtttgtgtccttatgtgtcccatgcatgctccccatctgaccttgcgtgttctcgcgtgtctgtgtgcggccagtcctgccttcactctctcatgggtggccctggcagcatgtctggctccccagcaggtgagctcaggagataagatggaagatgcaacagccaatggtcaagaagactccaaggccccagatgggtccacactgaaggccctgggcctgcctcagccagacttccacagcctcatcctggacctgggtgccctctcctttgtggacactgtgtgcctcaagagcctgaagaatgtaaggacgggggcaggccaaggcccctcgagcttccacactgaccctgtaatttgccctgagagcactcccagcctctgactccccaaaccctcaaagctccccttctaaactccctccccaagcctgcccgagcccccctctgagtccctgagcctccctctgaggctggcccccttttccgctacagattttccatgacttccgggagattgaggtggaggtgtacatggcggcctgccacagtgagtagggtgggaacagcaggagggacctgggaagagggtaggatacttttggccaaggggttttccaagtagcacaaggaaaaagtctttctctggaactggaggtcagaggtgtcctgggagacaggagtccagggttacaagtgatgtggattcagctgtagcctcaggggtggaggtcaggggtgatgaggtcagggcattctgttggctcccgggagttgagttcctagaggttctgagagtcaggggaggcctacttcttgcccacaggccctgtggtcagccagcttgaggctgggcacttcttcgatgcatccatcaccaagaagcatctctttgcctctgtccatgatgctgtcacctttgccctccaacacccgaggcctgtccccgacagccctgtttcggtgagcctacctctggcctgccaagctcttttttgttaatctattgcttgtccccaccctggccccagctccagggagtctttcctggtggccatggctctgtccccagtgggcccagtgctttctccgctgtctttggataaagctgttctaggggcgggggttggtctgtgtcctttggaaactgactagagcctcccctcctctgcctgctcaggtcaccagactctgaacatgctacatcctgcccaagactgcacctctggaggtgcagggcacccttgagaagcccctcacccctaggccgcctccaggtgctacccaggagtcccctccatgtacacacacacaactcagggaaggaggtcctgggactccaagttcagcgctccaggtctgggacagggcctgcatgcagtcaggctggcagtggcgcggtacagggagggaactggtgcatattttagcctcaggaataaagatttgtctgctca

SEQ ID NO: 311 - DNA, 10708 bp, Homo sapiens
  source 1..10708: mol_type = other DNA
agactccgcccaagcatgcacacacacaggcttgatgctcgctcccgtttctacaggaggttttgacggctggatgctgcagggcatcccctcgcctggaggaggttcacttgtggccaggttcccagcacacccacttgctcactggggccctggggacaccgccacactcgagcccatcctacggcctcaatccttaccagtccccaggccatggactgccacactgtaggtcttcaatcaaggttcagtggagtttcgaatgtacacacaccctgaaagacagcgcggccacctcagaaaacaacgcgcgcccagctggctcccctccgacagggcccacggctactgggtcggcctcctccggaccctgagcacagcctggtatgcgtgcgggctcggaatacggatctgagcagaagaaatgcgagtggagagcggttctgcgcaggaaagaggaattttgttggaaagcctgtcgacgttgctagaaaagaccacagcatctcacgaggggcgtgcgccgggaaaccgggagttgacgggtcagtgcggccagttgccgaggtccgaaccaagcgggcgcagtgaccgtggcccacaaccctgcagcgcacggcccagtcacctggttagcggacgtcggctgccctgcaggcccctcggcctcccccagcgtgggcctggcaccgggaagcgcgggaagggctctttatttgttagaccagtgagtggactggcccgggctctggtcagtgggcagtcagtccgagcccagagaccggggaccaggaccccgggaaaggagagcaccaggactagggggaggagcggaggatctggggtcagaagcatccagaggcgcagggtagggcgggcggacccgggagcggagagggcggcagaggacccgggggcccggggggtacccgtcgcgctccggctgtctcctctcggcgcctcggccgtccggagcctctcagggacggccgctcttaggcccgctgacttccagggctggggccagggaaaggcgccgccatcgccggcgtgacggccgaaggggggcgcagagtcctcccggaccgcgccggagactggctgggggagggggctggggagccctccccgccccgccccgccccgccgggtccggggcctcccgccccccgggccgaggggcgcgcccattggcaggccgggctccgcgcgccgcacccattggccggccgccgtgaggagcacgaggccaccgtggcgggcgcgcagtcggagggcggcgggcggcgggcggcgggctggccgagggcagcgcgggcggcgggcggcgcgcggtgggcatggcgggtgcggggctgcgggcggccgctcggcgctggctgctgtgcggaggccacggcgggccgcgagccgcctcgtcctcgccctcctgccctgggtgcggccccccgggtcccggcgcccactgccccggcgtcccgcgctccgcgcccgcccaggcacccaccagcggcgccgacctcagcgcgcacctatgggctcgctaccaggacatgcggagactggtgcacggtgggtgagccggggcgggacgtgcgccggggtgtcttccgcgtggactgatggacggaccgagccccagggtgccgctcctccggggaaacacccagtggggctcgccagggccccggagcgcaagggccgggcggcttttcgcgagaagctccggccgttcatcccgggggcctctggggcgccccgacgcccgggggcgggcgggaggtttgttccccggctcggtctgcaggagctcggggctcctcgagcggctgccggagtgctgggcccccgccgacttccttcggggtcccgcctgccgtgaagccgcggtggaaacgcccccaaccccttgttctcggccaacccttagttggggcgggagagtgctgtggacaaagccagcgagcggcgccgggcggaacgggctcctagggacggccggaccaaaggggacaccggttggacttcccagacacacctcgatgtcgccctggaggtccggccccctctcagcccgggcagcgaaggctgggagaagccaagtcacccccgccccctggagcccagactagggctgcaaagggcacttaacctccctgtccctgctctctccctctgagaaatggcgtgaggaggctgaggccccttcttggagggggccggctggggcgcactagtgaggccccagagctgagagtgctggacatctgcctgcttgtctccgtgggtctagtggggccctgcttctgcagcagacagatatggtttgggtcgtgaccctatcactgaccagttgggtggtcccccagcaagtctcaccctctctcaagcatgaaacgcagtcctggggcctctctgtcccagggttgggtgatgactggaaccaggccaagcagggcaggagagcttccggaggaacccccaggggtgacgtggcttttgttgtctgataaaacaaagtagccctgtctggaagattctaactggctagacaggggttttcactccggctttgtggggtggcggagaatcacttcttgaccagtaaaggcaggatggtaaaggcccctgaggaatggtcattttgaagccttgggcatctgtccaccctcgaggtcccaggttgagtttgtgtctgtggaggggcggcccagcgttatttaagaagtctttgctctgggcccggagaagaccctcagagtatcctgagaagcctgccttggaggtttcagggaggactacggggatctactggacattgtcctcctgggcctgcctgcatctttggagcctcacagccctctaagctcctcttgtcatacaaggagcaaagtcattcccaccaagatcccatggtgagcaccagcaggagccagcttcacacctctgggcgccgaggtccgctttgggctaatgcccacgggctgagagcagtgcaacaggtccctcagtcccccagcccccacccacctggcctcagtgtggtgacattgggaggctaggctgagaggcagagtgattaatgcaggtggggtgacttgaatggtgatctcaaccccggtgcctgttactgggtggtttggagcaagtgacttcacctccctgagccccagtttcttcctccggacgatgggggaataagtgggactgcctcacaggatgggagtgaggattgaacaagacaagcctctaaggcatccacaagtgtcacggctgctagggagcagttggccctgggacctggcaccatgggcaggtgtgggagctagggctgaggagaaaggagggcaattgctggacatgctgagtgggacacaccctcagctgccccacccccaccccccacccacaccacctatggaagggaacaggcttctgtcgccccagagccaaggttcttctagtctagaaatcaggccaggccaccaggccctgtggctgtttccacatcctgctttgttcctgggaggactgtctgcccctgggcccctgggaacatccttaggggcagaggtgaaggcctggacctaaccaggactctgtgccagcaaggggctgcactgccgagcagaccctcccaggtcttctgcaccaagagtcacagtcacagttggtatccgggaactcagggccatgggaagggcaaggcccagggtcctagtgacacaccagaaccctgggccttgaggggtggctcagaagcagctccctagagcgttgcagtcaactgtctcacttgcatccaagtgaagactcctgtctacacccacagatcttcggagcagccgctctgtgctggcctggggaaccagccacacctgatcccccacccacaccctgaacttggctccaaaggaaaggggtgggaatggagccctgtgtccccagagtgcctctgaggcaagtgctctgggcacggagcacatcagcgagatgtctgcctcttgagtgcagcagctgccaggcacactgtggggcttccctggccctctggcctggcagctcctgctttgtcatcggcactggggttgtggctgagacagggatcccctggagtcttagagctggggcccctgcaaggcaggggtactagatgtaccctgtacatctagtcctgcctgctcccttctccctgcagcccctgcttctggagggacactgggaaattggggacaggatgctcataggctcaggaaacatatcacccatttaatcctgcatatgtgcaggtgcagagtgagattgctgcacagagcagcaccttccatatgacagtcttagtaattctgtaggttggtacaattttttttttctttttaaaaatgttttcacagagacagggtatcgctatatggcttagaccagtcttgaactactgggtttcaagcaatcctctcgcctcagcctcctgagtagcagggactgtaggtgtgtgccaccatgccccacttggtacaattttttgtacccttttagaaactaggaaacaggcccaagaggtgaggtgacattcctgaagtcatagccatgagagggagggcctggtcttgtctggctgacctcattgcatgtggccttcctagcacatctccttccctttcctttcccttccactttctccattgtacacatagggaaaccagggcaggtaacatggggcctctcagccccatctgcctccttgggaccccagagcccatgccacacagtgctctgctcagcaccctgctgtgggcctcaaagccaactgcagcctcctgggagcagccagggacttggggtggccacgaccacatccccagaaggagcaacctggataatggcccagaacctgacatcacgtcctgactgtcgtaattagcaatgttccctggctagagccagcaaatgtcattatatgggcttgcgggcagctgaaatctgattagaggggcctcactctccctgggctgtgggaagtgcacagagctggcagcccgatcggcagaggggctccccctcccactaatgttcctgagccccagtcccagctctgggcaaggtagaaaagtcagcatccatggcctcaaccccctagtctggccatacagagccagcccctctgggttggagtcctcagtgcccacatggtatcctcacacataatcccagggaggctgagagatgaggccagggggcagggcagggcagctgagaggagcagaggaggcgctgaattgtggggggccagacagtggtgttcctgcacgggttttgagcaagtgggaggctttgctttgtagagcatcccaaaagcagctgttctggggctaggcggtgaggagttgagtgactgctgccagggttctagcatggccttgtgtctgatggggcttagtggtgagggcctggagtagtcacgggctcagtatacctggtgggctataggagatagtgtaatgtaggcaggtgtaaccatgaggaggagctccagccaggggctctgccttaccctaactgcgtgaccctgggcaagtgacttctctctgggcctgtttgaccatctccagcactggaataagaggtgccattgtggggcgtttctgaggctcacagggctaggtccccacagagtgctcaggagccatagctgctgcagggatcatcatccccatcactgcctccctgcatctccttcctctagacctcctgccccccgaggtctgcagtctcctgaacccagcagccatctacgccaacaacgagatcagcctgcgtgacgttgaggtctacggctttgactacgactacaccctggcccagtatgcagacgcactgcaccccgagatcttcagtaccgcccgtgacatcctgatcgagcactacaaggtgagacgggggtccttgccaccaacaaacccagggcttggaggctggccagacccaccttggcctaagctcagggctgagtcgtggggctcccctggccctcttgcctggcagctgccctgggcaggtggctggattgaccccctggggtggccacccagccagcaggtctggcagggctattggcttaggcctggcccctttcccccggcagtacccagaagggattcggaagtatgactacaaccccagctttgccatccgtggcctccactatgacattcagaaggtgagtggctggacctgtataggggctccctccttggcctcctcttggtatggtcattacccctccgtcccatccagctggggttctggcatgggctgaaagaggctggcttggggccacggtgaaactgcctcctcaccatccgtcctgcctccctggcgcccccagagccttctgatgaagattgacgccttccactacgtgcagctggggacagcctacaggtcagtcggctctgccccaaccccacccccgccccaccctacactgctgttctggctcaggactaccttggactgatggtatcttgggcctgctcaggggcctccagcctgtgccagacgaggaggtgattgagctgtatgggggtacccagcacatcccactataccagatgagtggcttctatggcaaggtactccataccccagcagccagcctgccccatggacatgtgcccatgtcccaaggcagatttggggccctcgtctccagcactgaaggggttggggtcccaaagggtgtctgagacaatggccccctccccagggtccctccattaagcagttcatggacatcttctcgctaccggagatggctctgctgtcctgtgtggtggactactttctgggccacagcctggagtttgaccaagcacatctctacaaggacgtgacggtgaggatgctgggcctgccctcggatggcaggaaagactaagtccagccacagtgggacagccccacctgggccctgctgtaccctcattgtcctccactgcccccaggacgccatccgagacgtgcatgtgaagggcctcatgtaccagtggatcgagcaggacatgggtaagtgtggacagaagccctgccgtggccggcctgagcaggtggcaggactgaccctcacagactcatctgccccattagagaagtacatcctgagaggggatgagacgtttgctgtcctgagccgcctggtggcccatgggaaacagctgttcctcatcaccaacagtcctttcagcttcgtgtgagtccagcccctgtggatggagggacagcagggccagggctctgggtggggagggcaggcacggagccgccctcagactacttgccacctgaaactcctccacacagagacaaggggatgcggcacatggtgggtcccgattggcgccagctcttcgatgtggtcattgtccaggcagacaagcccagcttcttcactgaccggcgcaagtatgggcatggtgggggttgcagggccagggaaggggaatagaggccccaccccaatgaggggactgaagcaggaggccaacctggcccttgcccactgcccaatgtgcttggggtgagaacacccccttgctggcatgggtccacttgagcaggtgggcctttacggaggagggatgggggttgcccggcccgtggcccagccacagactggaagtcatgccctttacctgcaccccaggcctttcagaaaactcgatgagaagggctcacttcagtgggaccggatcacccgcttggaaaagggcaagatctatcggcaggtaagggccatctggggagagcagcatgtggtgggggcatggggcctagctagggccccaggctgtgcagaggcagcctctgaagaagcagcacagctccttggccctgagcagcctcacacaggcaatggctggcagggagcaggtctgggtggcctcgagagcttgacctctgggtcaagcagcctggctttgaattcctaactccactactcagcagagggagcctggcctggttgcctgacctctgtgccttgcttcccttgtctgcaaaagaggtgtaatactctctactgaagctgtggtataaagctctcagaatggccagtgcgccaggcaccgtggctcatgcctataatcccagcagtttgggaggctgaggctgcaggatagtttgttgagctcaggagtttgagaccagcctggccaacatggcgaaaccccatctctactaaaaatagaaaaaattagcggggcatggtagcatgcacctgtggtcccagctactccagaggctgaggtgggaggatcacttgagcccaggagttcgaggctgtggtgagctgtgatcacaccactgcactttagcctgggcaacaatgcaagaccctgtcttcaaaaaacaagaatggtcagagatcgtgaaatgcctgatgaatggtgtcatttcttggggttgagcactctgctgcagccagaacaagtctggttgggggcagctcactgggtgatctagagaaactcctccttcctacctggctaggaaaatgagagggactggtgttgaggtgggattaggtgtctatgagcaggcagtgattaaggtttagccctggctggaatgcggaaatcctggctgagctgggcttcttcaggctaggggttctaaaggccttggggctggaggagggggaagccagcagctggccaggggagcaatgtggaggtggccaatgcccagcctggcctgcaggaaacacccccaccctctcagccctgcccacttctctgcctcccacccttccgcacccaaactctccacagccctcgggcccaggtgcgtcccttcagctctgagggcgctgctctcccctgccttggcatccagcctcagctaaagagggtcatacacctttgtgagaaacacatgactttcttccctggcagctttcaggcagttctttatgcccagtattctgaagctgctttccactgtgtgttggatcctgcctgtcagtcactaggagtctgtcagtctcctgccctttgagactctttctcttggtctggggcctgcctgggcctctgcccctccacttgaacttagttcagcaattggcttctcccacaccacctgtttcccccagcgcttccacttctgaggcttggaatgcacagactgcttcaagaactgtgcttgctgggtgtcaattattctcgcttttggggtgtggactcctaccctggtggctgctgcctgagcactagtctggtgattcctgctctgggccgctcagtttctgccaccctgtgagcttccccagttacatgtgggcctggctgagtgtctccatctttctctggctccaagatgctggtggccccggtgaggtctgccattggtctgccaggtccctctgcactgaggcaggggaggccagcaaggacttcagggctgcagagccttccctgcagtttctaccttacaaacagggatctaatccctaacctggggtacgtgtgagaccacagggagaaggccctcgaggcatgggcaccatgccaggcctgtagggcaccttcctgcagcaggcagaatccccttcccaagtaggaggggaaagtgacaagaaccagggcccagggagggagcagcaaggccatgggaaagggcagccagcatccggctggatttgggctgcctctggggattcgggagggaggactggtggaggacaaggcacacttggctcagcagcattcccctcctctccctagggaaacctgtttgacttcttacgcttgacggaatggcgtggcccccgcgtgctctacttcggggaccacctctatagtgatctggcggtgagggaggcagggctgggctgcagtgggggagggccaggaaacccccccccccccgcccccagcaactggcgctgagcccagttctgccgccccacccaccaggatctcatgctgcggcacggctggcgcacaggcgccatcatccccgagctggagcgtgagatccgcatcatcaacacggagcagtacatgcactcgctgacgtggcagcaggcgctcacggggctgctggagcgcatgcaggtgtgggccggggtggctgtgggagggccagggcggtagcctcctgggtgcacacacccaatgcacactttgtgtccccagacctatcaggacgcggagtcgaggcaggtgctggctgcctggatgaaagagcggcaggagctgaggtgagcaggtggggccagggcaggagtcccagccaagccaccaccccaggcccaccccttgagcgcatcgtgtctccctcgccaggtgcatcaccaaggccctgttcaatgcgcagttcggcagcatcttccgcaccttccacaaccccacctacttctcaaggcgcctcgtgcgcttctctgacctctacatggcctccctcagctgcctgctcaactaccgcgtggacttcaccttctacccacgccgtacgccgctgcagcacgaggcacccctctggatggaccagctctgcaccggctgcatgaagacccccttccttggtgacatggcccacatccgctgagggcacctttattgtctgggacaggccctcagcccctcctgccccatccacccagacaagcaataaaagtggtctcctccctgtgcatgcttctgctttc

SEQ ID NO: 312 - DNA, 8574 bp, Homo sapiens
  source 1..8574: mol_type = other DNA
cggccgccaagcgatccctgctccgcgcgacactgcgtgcccgcgcacgcagagaggcggtgacgcactttacggcggcagcgtaagtgcgtgacgctcgtcagtggcttcagttcacacgtggcgccagcggaggcaggttgatgtgtttgtgcttccttctacagccaatatgaaaaggcctagtaagtggggtcgggaggcgggcgtggagggacccacgtctggaagttgctgcagccaccacgacgctcttctacggctacggctttgtctctgctggtatgggggtgggagcctacgcgtaggccttggccctatttcctggtagaaccgagagttggaagtccctacggcgatcatgttaaccgcgcgggctcattctgcggaacgaagccgggcagagggtggggaagactaggctagattttcgtaaggaagcagcgtctgagccaggtttgaggcccaatattttctttccgtggccacgtgcagactggcccaggtgagagctgagaatcgcctcccagactcagtgttcctctcctgccttatgattcgtgctgtttgacacgaagtggttgtcgttttgtgtctcatacgctgttgtgtatgatcccattctaatattgtgagggtaagtgcagggaattttgactccattctggatctactgaatttaattctctgggatttgaaagtagcacgtatgtttgcattaggcatttcgcattagacttaacgttaggtttggtagccaataacacaagaaaaggatataactccatagtgcgttaacccagaactaatcatttgggttaacagatttgtgatgtgtttctttgtagagttaaagaaagcaagtaaacgcatgacctgccataagcggtataaaatccaaaaaaaggtaagtgtagtgcttgagagagctgtaccaaacacattgctaaactgattttgccctgttcctttgcgggaaagtctgggttaatgtgatttggttttgggaaatggcattggatagactgaccatgggcacaagctcttaggcatcaggagtgcagctgtgagaaagtgcagtgatttggtgataagtctctaaatttgttcagcatgttaatctctgcatagagagccttctagttacaatttcttgctgttttatacttacatatgcattactttgtaagattccaattaaagctccattttcctaggacattttataggcataactaaattgcagccagattggtttctcacttgaattctgcttaagtataaagatatttttgtaagcagacaaaatctctttattttaataggttcgagaacatcatcgaaaattaagaaaggaggctaaaaagcggggtcacaagaagcctaggaaagacccaggagttccaaacagtgctccctttaaggaggctcttcttagggaagctgagctaaggaaacagagggtaagttatgttagccagaattttcattgagtggtgtagtgtgttatgtgtgatatttttcagagtaaggtaacaacactagtcactggttcacctatttcccttatggctctgacagcttgaagaactaaaacagcagcagaaacttgacaggcagaaggaactagaaaagaaaagaaaacttgaaactaatcctgatattaagccatcaaatgtggaacctatggaaaaggtatgattaggtctctttatgaatgagagatcaggggttttgattttggtttttttgcttgggcctgagtgcagtggcacaatcacaactcactgcaacctggaccacccaggctcaagcagtcttaccacctcagtctccaagtagctgggactacagaagcacaccatcacgcctggctaattttttttagcagacacgggctttcactatattgccaaggctggtctcaagtgatccacccaactcagcctcccgaagtttctggtattacaggtgtgggctgttgtgcctggctgagagatgagttctgatgcagaaataaaagcacatccacaggctgctgagcttcttgggaggaagacaactgagttcagactccatcttacctatttaacaactgcaagggctgctactcagctgtggaaaatggagttagaggttacagttgctctacttctaattttgtgttatttccccctttatcctctaggagtttgggctttgcaaaactgagaacaaagccaagtcgggcaaacagaattcaaagaagctgtactgccaagaacttaaaaaggtatcttagcctaggtcagtgtctgacagtagtaatgaggtttaaaagactcaagtcattttttttttaaccttttaagatgaagggtgcatgtgcaggtttgttatatgggtaaacttgcgtcataggggtttgctgtacagattatttcatcacccaggtattaagcctagtacgacattagttatctttcctgatcctctccctcctcccaccttttcaccaacaaatcatttcgtgactcgactctagcttatgctgtttaatgcctttcctgctatgtttacctgacggaaatagtttctttggttctaaatatttgcacaaaactggttctgcctgtaagcatgatttacaacattaaaaaaaaacgttgacatagtgttgagattgagaaaggtacattggagtaagcagtgtcaggctaaaggtctctaaagtactctgttgaaacctaagtgaaggaggacaacttggtgtagttgctctccagcactcccatccccaacatccattttcccaagctcactcccccatggatagaacctgactgcccctcagcagcttttggcaaggccagaaggacctatcaaactatataattcactatgggaggattcagacagggatatttgcatttttgaaatccatcttgatcagagactgctgagcaagcctatgttttactttcctgtgtgagaaatgatgagggtcaacattcttcataccaaagtgaagacatgagatccaactctgagctcaccctgttgctaaatggataatgccagtactctcttgtggaaggtattaccagaacaagggatgtagttctgatcattttctccttgataatgtagttctggtcattttttccttgataggtgattgaagcctccgatgttgtcctagaggtgttggatgccagagatcctcttggttgcagatgtcctcaggtagaagaggccattgtccagagtggacagaaaaagctggtacttatattaaataaatcaggtgagtaaagagggtaccctttgtcttctgtgtacatgggtgaggtacgaggaaacagtctgatagtcactgaagactgattagatccaactctgatctcagcaaagccagagtacgtgcactttgccagagacagtgctaggcagtggggagccaggtgacttttacaactgactcaactggtttctactattcttttgccattcagtatttaccatcttttaaataaagagtgtaagctgctatacccagcttattgtgtagtatatttcatctaggaagtgatgacagtgtgacaaattccccacacctacacaatgtcgggtattagttcaagagtgaaataaattggaacgtatgtgacaaaatatttaaatgaaatgcataattatgcatctgagtttgagcagcaggaaaaagaaaacccagaacagagaattacaaagcagaaaatgggaatgagatctaaaattgttgttggggttaagaaacaattggctgcttgggaggctgaagtgggcacatcacttgaggccaggagttcgagaaaagcctggccaacacggcgaaaccccatctctactaaaatacaaatattagccgggcatgatgatgggcacttgtagtcccagctactcggaaggctgaggcaggagaattgcttgaacccgggaggcggaggttgcagtgagccgatactgtgccactgcactccagcctgggcaacaacacttcgtctcaaaaatgaagaaacaattggctgctagctaaaggtaaattctggaaacatagctctagggttagtagggttgtaatccagacgttgagtctgtcctgaagttttcaagtgagcaatacaaggggaattgaaatagagaagtgcagatgctgagctctgttaagatacgggcagtatggtaggggagcttaccctgccctgattttctagttaaatccttttgaaaggactgggaaaatgtaaaccagagtaaaatctatagttgccagattttgcaaatgcatctcaacaaaatagccacattggagcaaatgtctttttctttttttctttttgagatggaggcttgctgtgtcacccaggctggagtgcagtggcgccatctcagctcactgcaagctccacctcccgggttcacgccgttctcctgcctcagcctcccgagtagctgggactacaggtgcccaccaccacgcccagctaatttttttgtatttttagtagagacggggttttatcgtgttagccaggatggtcttgatctcctgaactcgtgatccgcctgtctcggcctcccaaagtgctgggattacaggcgtgagccaccgtgcctggccgcaaatgtcttatttctaattgctatcagatctggtaccaaaggagaatttggagagctggctaaattatttgaagaaagaattgccaacagtggtgttcagagcctcaacaaaaccaaaggataaagggaagataaccaaggtatcctttattagtggtaagaaatgtgattctttcagattttggttgaaatatgatgagtgtacaaaatcttgatttaagtgaatgaaaaattacaagatccaactctgatttcagccagagatcatctgaaaggcaatgtagttatcttaagagctgggctctggagcctgattgcttggggtttgttgaaatttatcaggtaagttgccagaataattcaactatttggaattttagcgtgtgaaggcaaagaagaatgctgctccattcagaagtgaagtctgctttgggaaagagggcctttggaaacttcttggaggttttcaggaaacttgcagcaaagccattcgggttggagtaattggtgagtttcagttcattactttttactttttaagtgttgaaatagttaagaagtttagccagctctccaagtgcccaagcagcagtgtatggagttgttgtcaagtaaaaggctcactcaaatactagcttcttgcttataccttactgaaagcacataaccacacacaatttaaagaaaaaaacttacacaactgctgccagattcaggttttttgttgggactgattactgtaggaagctggtttctaaaagttcttggtttgtttgaatttatagtattttcctgcctttgcattacttgtgcaagaaatgaagaaactaaaattggtcttagtattgaagtgaagacactgagatccaactctgatcttgccctaaacatcagggaaatggaaaattaggcagtgaaaatttcataagtgccaacatataatgctttttatatctggatttcccatttatttgtaggtttcccaaatgtggggaaaagcagcattatcaatagcttaaaacaagaacagatgtgtaatgttggtgtatccatggggcttacaaggtaaatggaggtgtccataattgtaatattatagtgacacactattttattttggttatctcaaggaaggtgattttttttttttttttttttgagacagtttcactcttgttcccaggctggagggcaatggcgcaatctcggctcactgcaacctccacctctcaggttcaagtgattctcctgcctcagcctccagagtagctgggattacaggcatgtgcccccacgcccggctaattttgtatttttaatagagacgggtttctccatgttggttaggctggtctcaaactcctgacttcagctgatctgcccgcctcggcctcccaaagtgctggggttacaggccaagccaccgcgcccggcctatttttattttttaaagcttttggtgaaagcagagatttaagccagtgctagaactgattggagtgggacagctgcccacaatttagtttgaaagacaagttcagcagatagattgagagagaggaaagctccctcagaggaagtgatgtttgaacctggccttgagaaattaatagaaatttgccagatagaagtctgccaccacacctggctagtttttgtatttttaatagagatggggtttcactgttggccaggctagcctcaaactcctggccttaagtcatccacccgcctaggcctcacaaagtgttgggattacacttgtgttgggtggcatgagccactgtgcctggccaacttttagattttttttttttgggagatggagtctgtctcccaggctggagtacagtggtgctatcttggctcactgcaacctcagcctcctgagtagctgggatcaaaggcacccggctaatttttgtatttttagtagagacagggctttcatcatgttggccaggctggtctcaaactcctgacctcaggtgatccacccacctcggcctcccaaagtgctgggattacaggcgtgagccaccgcgcccagccagaaggtggcatatttatagcaaaggaaatagcatgtgttttggttgatgtaaatatataagctataacatgtagtgttctctttagaacagtcgggtatgctgttacagttttagataaatgtgaagcaaatgatgataaactggatctgactgactgtgctgagtctgttcaatccaaccctgagcttcatgttctgtctcttaacctccaaatagaccaatgcccccatcaattccatcgctcttctttcaggagcatgcaagttgtccccttggacaaacagatcacaatcatagatagtccgagcttcatcgtatctccacttaattcctcctctgcgcttgctctgcgaagtccagcaagtattgaagtagtaaaaccgatggaggctgccagtgccatcctttcccaggctgatgctcgacaggtaaaaggaccccttctcatgagctccttggagccatcttctttcatcataagcattttgagtagaaaaatcttggaagtgttttaaagtactggcatgtcagatgaaggacagctcctttgtttggttttttttttaaggtagtactgaaatatactgtcccaggctacaggaattctctggaattttttactgtgcttgctcagagaagaggtatgcaccaaaaaggtggaatcccaaatgttgaaggtgctgccaaactgctgtggtctgagtggacagggtaagctttcttttctgttggcattttggtgaccactagaataaaccttcttttgacacatcttatttttaatatcagtgcctcattagcttactattgccatccccctacatcttggactcctcctccatattttaatgagagtattgtggtagacatgaaaagcggcttcaatctggaagaactggaaaagaacaatgcacagagcataagaggtgagaattgtgtgtcgctgctgtcttcatcagctgacaggccagtggagctcttacctgtttacatgggcttgctttctttcccagccatcaagggccctcatttggccaatagcatccttttccagtcttccggtctgacaaatggaataatagaagaaaaggacatacatgaagaattgccaaaacggaaagaaaggaagcaggaggagagggaggatgacaaagacagtgaccaggaaactgttgatgaagaagttgatgtaagtgtgtcctccatgagttaaaactgaagtgagttttctagcattataatacataatggaaggaactgaagataggaaatatttgaggcttgtgatccattagccttaattttgcacatcccgttatatgtacctccaaagagttaatttttcaggtacataactacttggattaaatgagcagacaagggctactaatccagcactatttttctttgtcacacaggaaaacagctcaggcatgtttgctgcagaagagacaggggaggcactgtctgaggagactacagcaggtgaggcaggcaaaaggggttctaacgaagcagcatggtatagaatcacttttactttttgaaaatctctttattttcctgcaatataggtgaacagtctacaaggtcttttatcttggataaaatcattgaagaggatgatgcttatgacttcagtacagattatgtgtaacagaacaatggctttttatgattttttttttaacattttaagcagactgctaaactgttctctgtataagttatggtatgcatgagctgtgtaaattttgtgaatatgtattatattaaaaccaggcaacttggaatccctaaattctgtaaaaagacaattcatctcattgtgagtggaagtagttatctggaataaaaaaagaagatacctattgaa

SEQ ID NO: 313 - DNA, 17711 bp, Homo sapiens
  source 1..17711: mol_type = other DNA
taatccattccccacttgctgtcgagttcagaagcctcctggcagacactggagccacgatgaagcccccaaggcctgtccgtacctgcagcaaagttctcgtcctgctttcactgctggccatccaccagactactactgccgaaaaggtagccagtgtccatgggtgtggcgtgagctgggggatgagagaacgcctgggaagtggggaagagcctccgcatgtgccagcgtgtcagcacaagtgcgtgtgcatccctgtgtgtgcaaaaaaatggtgcagacctcccgccaggcactaccccaagggccttactggtattctcccacctaatagaggggatgatccaatcatttccattttccaaatgaggaaatacagttttacaagcctggctctaccgccttttagtaagtgacctcaggagaatgatttatgctgactatgtctcaatttcctcatctgtaaaacagggtaatactagaacctattcagagggtggcggttgtgaaaaccaaacccattgtatctataaagtgcttaggacagtgcttgttgtgaaaaccaaacccattgtatctatgaagtgcttaggacagtgcttgtcgcagagcaaatacccaagcacataaacaagccacttggcacctctgtgccaaactgcattcaggcagccgcatgcagccgagcagagttggtgcagtgcgcatgagcatgtcacacacaagcaggtaagaggtgcccgtgtgcccctcctcgggggacacagacctcaaggcaaatggcacctgctaggggagtgccctgcggaagtggggatgagttggggagggtccactgcggagcagagaggaagattcccaactctcagagaccagactctagtctacctccgaattctcccagctctgagggcttccttctaggagactggtgggagcttccctgttgccacagaggccaaagtctccagaaatcaaaggacctggtcactgccctttttctgggcaaagctaagccagcatgcaaagctccctgaccccaccaggtctctcacccctgcccaaaggctgagtgtgatgcccctcccagacactggccctggcttcaccagctccaccccctgcatgcttgttcttctccaaggggtgctctgggcccctatagatcaagaaggacgtggcccctgccctgtggtgctgtagggtggggaatgaagcacactgctatctcttacctgagacaaatgttcacatatgagatgcctcactgggttcagcctgaggcctggtcagtggctcagtcagattgggagccagggtttggtctagagccagagtcagggccaactcttgaagagcgtcaccccgagctgaggtggcattgaaaccctgcaacccccttcttctttgctggtccagaatggcatcgacatctacagcctcaccgtggactccagggtctcatcccgatttgcccacacggtcgtcaccagccgagtggtcaatagggccaatactgtgcaggaggccaccttccagatggagctgcccaagaaagccttcatcaccaacttctccatgtaggtgccttcccaccctcctcccctctccacaccccccagtgctatgactccatcgctctgtgccagcaaaccctcttcttgaagtaaggcatgccagggtgtacatcttcaggagtacaccctgcacctggggccacacaggaacaggggcttgccaaaggacttattctcaaagatgcccccgtccttccctccatccagccattcatcatccctaagtgctgtccaggtgttaggcagagaaccacagaatctttgtgactttgcctttgaggagcacagacttgaggcctcctgaggccagaccaggcaagagggagtcaccaaaatgcacattccagctcaaagtacagaaaaccttctagacccttggcttcctcacagtggagagtggcttgaggaggattctcctaggtctgccccagctgggatcctgcagaggacatttttgctcaggctgcgtgagagatgcctgaggtttctctgaattctatgagccaaggatggtcctcactttgtcctctgccaccctcccctacccttcccaactcagtttccaatgtttactaaatgcaccaggatgccgcctgtcccttgctgccaggaaaagctgtgatttaggacaagggcaagactcttcccagaaacagggcgatggtggggcagagagggagtgtctcatgtggggtcccacactgtggcctctggaaaactgcagtgggggctagtctcctccctcaggcgccaagcatcccccactccaccgcagcctctacttttcctaacccagagcccgggcctatgctgcccagcttgcagtgcaagccccacgggctgtgtcagccttcgacatgggtgccagggtcagcagttgccaggtccaggcccgtggcatctgctgagagcccaagactgtcacttgccttctctagacccagaacctgttgctgcatgagttaggggagcagagagcaggttccctgctccctgacctggccaggagccccagctggccatctggagagatgaagcactgcctacccagggggaggagtgccactgcccactcaccagccccatcccgggctagagttaaattataaccaggaaggtcaggcaggagggacgcgtagtcctgacatcctggctgctccccctcctgcccactgccacacactaccacatgaagttgaccaggcacatccctacacaccccacaaggaggctctgaaaaagtcgttttcctccctgagaaatggcctgggccattctttctcagcccccaaaggatggctgctaggagtgtgtccacacacccaggagtcccgtccaccagttgtccaaaacctccttccagatatgccagcctccctatagggtgcctgcctcttgtgggagggagcggggagactgctgtagggggaaagtgctcagagcctccagccctacgtctgcttcctcctcagtcctggccccacacggctgcacgcagggctgggaacaagtgtgactcagagagctcttgctggtgatgaactagttcccctggaacagtccgtgaaatggaaggggcaggtgggaatgtgggccagcttcggccagactggacaggtggagagaaggcaggatttagcccggccctgcccctctgcagcctccccttcgtcccttctataaaatgaatgcttactgttactgtacacacctccgggagctagaggcctggagcactttgcagagtgccctgcacagggtcctgtatgcggtaggtgcataataaatggcactgggctcaggcaaagatgggagtcactgtgtcaagaggcacaccgagtccagaaaggctctctggaggaggcaggagtggaatgggcccctgccaccaggctctcaacaactcccacccttctgcccccaggatcatcgatggcatgacctacccagggatcatcaaggagaaggctgaagcccaggcacagtacagcgcagcagtggccaagggaaagagcgctggcctcgtcaagtgagctggtggggggcagcttcagtggggagggtctagacaaaggccaccttgcctttggcccttagtcctgctcccacctctaccagccttaccccacctgtcctggaggagcaggcctgatgcccttctcccccagggccaccgggagaaacatggagcagttccaggtgtcggtcagtgtggctcccaatgccaagatcacctttgagctggtctatgaggagctgctcaagcggcgtttgggggtgtacgagctgctgctgaaagtgcggccccagcagctggtcaagcacctgcaggtacctgctgctacctcttccagggaggcctcctgcatgacccttgccctgctgagggcggcccctctttgtccctgagcctcctgtgagccccagcccaggctcctggctgacccagggacccacatcttgcctccagatggacattcacatcttcgagccccagggcatcagctttctggagacagagagcaccttcatgaccaaccagctggtagacgccctcaccacctggcagaataagaccaaggtgggcctgttgtggtcagcaggtgagggtaccaagggccctgccttcaggccagccctatgagcccggatttctggaaagcaggatgggctctccctcctgtgagctgtgacctggagaggctcctgagatctctgcatccttgctgtcatttggcagatggggagggcaaagcctagagaaggaccatggcgtcctcgtatgagccctgagatctgtctgggaaggggctggataatagactgatgtgagggtcctggggccaggtggagagaaggagatggttggatggcacacatcctggaatagcctctgcttgcgcagctccaggaacagggagctcatcacacccctcccctacgtgaaagtggtccatcaataactcagcctgaaagaaagtgccctggaatacggacccaaggctgcatcctggaattctgatttcccaatatacagacaggggtagagggtgttgttggcctggctttgctgttcctcccaacttcagcccggattattcctccaggctcacatccggttcaagccaacactttcccagcagcaaaagtccccagagcagcaagaaacagtcctggacggcaacctcattatccgctatgatgtggaccgggccatctccgggggctccattcaggtgggtggacttcaggcaagagcagagcagcctagaagtctgtccacccccaagggcctgagcttgggtattttagaacaggaaaagaaccacccttacttagcagtgtgcaccagggaccggcacagacagaaaacacgtgatttagttgtgttgtccctgaaactattccctttcccaggcagaaaaggtttgtctctgagaagagctgccctgtggggtttccctctttgcctctgctgctgggaggctcacaactcagttttatgcagatttgcagtagtttctttcacactagtttctggcattattattgttgttatattttggtatgatcatggctcactgcaccgtcaaactcccaggttcaaaagaaactcctgcctcggcctccctagtagctgggactacaggcgtgcaccaccacacctggctaatttttttttttttttttccagtagagacaaggttgcccaggctggtcttgaattcctgggctcaagtgatcctcccacctaagcctcccaaagtgctggaattacaggcgtgattcaccacacccagccatttctgccattgttattatacttcccttttactccatgtttttgaagtcttccctcttttgatggttgtcaggtttatgatgtctgaactttttagtataaaccatctgaaatactaaaacaaatagaaggaaaagttgcagggagagttctggtgggctatgcatgagcagggaaggcttccgcaagaaaggggctggtctgagccctgaaaaagggcaaggttttggggaggttagcagtgggatggaaatgggattggaacagagcacagaaacccagaatttggggtaaaggggctgaatggggatagggccaattgtagctctgatggcctgggtgggtctcactctggccacagatcgagaacggctactttgtacactactttgcccccgagggcctaaccacaatgcccaagaatgtggtctttgtcattgacaagagcggctccatgagtggcaggaaaatccagcaggtaggtcctgtggcccagggcagggccctgaaaactcccaggcccttcacgctatcagctgtggtccggcaggcagacccccttgcttcacctttcggcaccatggggcgggtggctctcaggaaccaaggttggccagagcctagggcagcccctgttcctagagcagataccatgacctcacccctgagacaggagtccaaggatgccagccctagggcacacgagccctcagggagcccttctgaagcacctatgtttcctctccctgaccagacccgggaagccctaatcaagatcctggatgacctcagccccagagaccagttcaacctcatcgtcttcagtacagaagcaactcagtggaggccatcactggtgccagcctcagccgagaacgtgaacaaggccaggagctttgctgcgggcatccaggccctgggaggtaagtgtctctgtggccctgcagggtgggggcttccagggctcctggctggggaccaccttgagagtgcgtgttcctcagggaccaacatcaatgatgcaatgctgatggctgtgcagttgctggacagcagcaaccaggaggagcggctgcccgaagggagtgtctcactcatcatcctgctcaccgatggcgaccccactgtgggtgagggccctgcccgtgactccaggacgtgctgcacaggggaggcggctggggctgcacctgggcttgctgtgggatctgggcagggagagggggtcactgaggcccctcggctctgaggttccagaaatattcttcaagcaaatcactattttctcaccctcatcccaaacccctgggtccaggggagactaaccccaggagcatccagaataacgtgcgggaagctgtaagtggccggtacagcctcttctgcctgggcttcggtttcgacgtcagctatgccttcctggagaagctggcactggacaatggcggcctggcccggcgcatccatgaggactcagactctgccctgcagctccaggtgccagtgtgccccaggtgggctgcacagagaagtgggcagtcataaagcccagcctttatgacacccccaaccctgcaggacttctaccaggaagtggccaacccactgctgacagcagtgaccttcgagtacccaagcaatgccgtggaggaggtcactcagaacaacttccggctcctcttcaagggctcagagatggtggtggctgggaagctccaggaccgggggcctgatgtgctcacagccacagtcagtgggaagctggtgagtgtggccaaagccaccctggaggggaatggcagcctccacctctgcagccagaggggctggactcaaatcccagacctgcccagctccagctttcccctctgctgcctgtggatgacacaggggcatggcagggattcaatgagacaatggagtgattctcatgagaccagcacatacaggctctcggcagccggtctgtgcacctgcaagcacaggtgagggcagggattcctccctagttgtcatcccttcctgtcctggtaccacaaccctctcaggttgcagtcagacagggagggctgctcctatttcacaaatgagcagactgagctccaggcagggcaggcagctttccccgggccccactgcaaccaggccaagagcccagcttgccacgtggcaccctgtccttgcccagccttccctgcctccttccagggaccccctgtcatttccacaaagagaaactgagcacaagctctgcggcagggccttcttcaggccctgggatgcagcagtgaatgaggctgacccctccgtgccctcatgggagagacaacccaaggacatatcaccacacaaaccagctacaggctgggatctaaccctggactcaggagagcagcaccaggagccccagcctggcctggggatcagggagggcttcctggaggaggcccagcagagacaaaaggataagtaggaggtgggaagagtccagatggggcaatggaggaatatgttaggcccctgtggcatgagggcagcgtgtgtgaagagaataggagtgggcgttgggggcccatggccttgtttcaggacaagtccccaagtgtcatgactgttggtacggtctgcgtggccaccctgcctggcttcaaacccagctctgccacctcccagataggagacatggagaagtcacttaacctccatctactgcagtttcctcctatgtaaacatgggaataagtcgcatgcccccctcataaagtcactgtgattgatgtccagtgataagcactccatacatgtcagcaggtgatttagcttggaggccgtgggttcccaaagtacagaacccaaggtgactcaggggagttcacagacagacatggcttgttttagtggttatttacttattttaatgtgtattctgaaaaatatgacctgaacttcagacctaagatttttttttttattttttgagatggagtctcgctctgtctcccaggctggagtgcagtggttggatctcggctcattgcaagctccacctcccaggttcacaccattctcctgcctcagcctcccaagtagctgggactaccagcatccaccaccacacccggctaattttttgtatttttagtagaaagggagtttcaccttgttagccaggatggtctcggtctcctgacctcgtgatctgcccaccttggcctcccaaagtgctgggattacaggcgtgagccaccgcacctggcccagatctaagattttatggacataaagccaagtaaaaattgttagcttacttaaagttcatttaaggaaaaatatcaattaaatagctgtatgtgtggatggggcaaaattcatgcaggtagcctatgtgtgccaaagctttggaaagccagccaggctctgggcgagagacaggctgctccagtgggagcagaccgcagatctgatccgcactgtgaaaaggtctcttggccactcagggagctctggtgggagaggcctgggattcctctgccctaggagcccatttcccaggcagcgagctaggtcagtctgagaccacaggcccctccctgagggaggagggagcaggttcacacagagcttgggtgcatgcttccctgtcattgtcccacggtggccagccgcagaggggccagcttggacagggacagccgttggggtggatggggccccaaacccggagccatgacatctgagttgtgttctcaactctgcctctgacccctgggaaggtccttccctctctgtccctttccctcagctttgggggtaagggcaggctgtagctagacccttcctgctccacactgcacttgcaaatccttcctgctgctgtttctacactggcctggggttcccatccctttcttccagaggtttggctgatctgagtcctggcgctgtgcctgccttattgtatctgggctactttgctaccttttcacctccttctcatccctgtatgctctgtgactgagccccttgcacccctaagccccctccttacccccactcaaaggaaatgcagtccccacagtcagtgtgtgggacctgccccagccccaatcatggaagagctcagaagtgccaggcagatgcagatgtccggccctcactgctcctgccctggctgggcccctctttccagcctacacagaacatcactttccaaacggagtccagtgtggcagagcaggaggcggagttccagagccccaagtatatcttccacaacttcatggagaggctctgggcatacctgactatccagcagctgctggagcaaacgtgagtgcatcagcacctccctaagcctgtcgctagggggcaggcacaggtggcacggtacagcgcctaagcatggagagaggggggtcttggcatcatgtccaagctccagattctcccagagggacctccccagaaggggctggatggaaaatctgttcccgaattcaaggatctcctgagctctgatgtgctccacctacagtgtctccgcatccgatgctgatcagcaggccctccggaaccaagcgctgaatttatcacttgcctacagctttgtcacgcctctcacatctatggtagtcaccaaacccgatgaccaagagcagtctcaagttgctgagaagcccatggaaggcggtgggtgtggggttgagatctcagcctcccaggtagcagagtttggacccagcgttctccccgatcttccctgcatcctgaccaagaccccaaccgtgcccccaacagactccccctgggagattcagcctattcactgatgaggaaagtgaagccgggtctcctgtctccccaaattcattgcacctacgatatagtccaggattgggtagcaagattaaacacaagcgcttcaaattgatgaaaaccaccctgacggtgtctgtctgtgtctctgtctgtctgtctctctctctctctttgttttatccagaaagtagaaacaggaatgtccactcaggtaagcagcgaacatcctcaaaggctgtgctgggtggtggtctgctaacacagggtccagggcaccagccctgtgaggttgctggccagggcccaggtccacccaggcctctccagcccatccctgctgccaggaggcagtgtaatctgacccagcatgctggtgcatttagtcgcctgtgcattcaaatattggctgtgcctcaggccctgtccccagcactaagaatacagtccccatccaagtggggccacaggaaggtgggtgcaagatgcaaacccaggtcccactgatttccaggttccactttcttcaaatattatctccagggagcaaaaataccaaaaccaggtgacaaagtaggaggtggggggaggggagattgacagattgggctcagtcctggctgtggagggtagtgccttgcccagctcctctggctggtgacagccctcgggcctcagttcagttgtatctgatcaggacttgaccacacagaggcttccttttctccaagaagaggatggaatagacaaggtagtttgagggtttctgccagggggaggcatgacatccctgggggggagcttgagggaggtccattattgttcatctcccagctgttgggggagaggctccccaagttggccgggtgtggggagaggggacatagctgccctctccgcacccactcctgggtggatctcaagccctggctgtgaagacccacaccccacctgagagaagactgcatctgtcgatttctccaaagctggagctgctggctcccggatgaatttcagacctggggttctcagctccaggcaacttggactcccaggacctcctgatgttcctgaccatgctgcttaccaccccttccgccgtctggccatctgtaagctgccttccggccctgcgagggcctcggtttcccacggtggtccttgagcctgccccatagagcggggtggggtaaagcacgcaccacagggccaggccagggacggctgctgagggcacgatgtgaagtaattgtgggtcagttcaacctgggatcatttactggggctggggtgggagtgcatttcctaaggaggctgtcctcgccttcccagctctttgcagctgccccctgccccatccttagcgtctcatctcctcagatgcgagctcacccgggtcctttagctgcccctaggttgtcagaccacaggccatgacagagcagcctctcccacactccttgttcagaggggaccctaggccctaagaggggcacggactggccaagcatgcacatcacagcgctctttggagcagtccttgccagcttcctctctctgaaggcccctctccccactacccagtgtatggacatcaggcctcccctccccaaggcaggacttcacctgtcctttactttcactgagtaggatccactatactctagaggctgactcatgaggaaaccttctaggaagggagggcttcctccgttcagaaagccaacagaggtcccttgaactgttttctgatccccaaatctgcactcgaatgcagctgcacagccaggctggacctatccctgacagcatgctcttctgtttgaaaatctcctgtgacaaaggccattctaggtggagtgtatgtgtggcaggatggggggctggagcttggtggcagcgctgctggttgcccgcctcctgactgccttcctgctccctttctgtttccggatgttcctgccctagtgcctgcttcagcaccaccagccacctcaaatcctgatccagctgtgtctcgtgtcatgaatatgaaaatcgaaggtgcccccaaggccagaggccctgtcctaacagggggatcctgggaggggagtgacctgtcacatgtctcgatgttgaagtagtgagggaacccagccacacctagtcactgctccctccctcaacctcccactcctcaggaaggggctgcctaaacccagactttttcttcttttagaaacaaccatgacaacccaaaccccaggtaagttcccagcccccttggcccctttccacatccttgcccccagcctgcccttcctgctccaggagccgtgccccggctgtcccagcccccatacaggctccctctgccatcctgccactgcctgggcagagtgtggagcggctctgtgtggaccccagacaccgccaggggccagtgaacctgctctcagaccctgagcaaggtgagagaggcacacccagagagacccagacaccactggcacacacccaccacctgcctacagagacacacacagcgcgtgcaggctggccccacacaggcccctcccagatcatagcatggtcctgcctcccagtgctggcatgggcacacactcacacagacaccccggggaccttccactgggcaccttgtgtgcaggtgtgggtggccaaggcacagataagcatggcagccatgtggaggtgagcctagaggaggagccagggtggggcaagggtcaggggagctgcctggggtcacacagggatggcagggccatggcgggtgcacagagaccagcatgaggatgttccagatgatggaggagttagtgcctgcagagtacagagccccaaaagatgagacctagaaggtgtggatgaggggaatggcaggaagagacaggggtgctggctgggccctgccccttcaatcctggaccagacatggggacacactccactcagcagtgctcacccccgcaccgcccagccccgctcaaagccaagggacatccatggctttctcattcctcagatgcatgtgtcacccacttcctcactcaggctaggaatgtctttcctgagggcagggagcaccaattctccatcttacccttggccgcggcatctagctcagggccaggcgctccatggggcgttctgaaggcttattgactggagacaagttaattctcaaaggcctcaactgagggtggccgtcgccgaggatttaggggcccctccaaagccttagacaccaagggacaagtggagagattgtgggagccagcccccagtgtgaaggagtgctgagaaaggggcacccctcctgatgagggagggagctgctgcagaactccagggggtgtgatcaggggggactccccatgcaggtcggtgtcagacctggctggggcccagctatgacctctctggtctggtcctcccaggggttgaggtgactggccagtatgagagggagaaggctgggttctcatggatcgaagtgaccttcaagaaccccctggtatgggttcacgcatcccctgaacacgtggtggtgactcggaaccgaagaagctctgcgtacaagtggaaggagacgctattctcagtgatgcccgggtaaggcccaggctggagcccggggcaggggttgacctttcaggctacagtggctgatgatggtaccagcaggtggcctgaggccatggacctgagaatggagcagctacactcacaggaggggcaaagagacaagagccctgccatatacccctgcagctccggagggcactgaggagttgtcccagggacctaacccaggtcactatcccatgcaggagacagtgtggtttggagctagctctgctgctaatccttgtgaccctgggcaggcagctaagtccctctgagcctcagtttcttcaccaataaccagtactaatcatcctggcccagagtcagaaggctggggggagaacccaatgagagagtgtagttgggagcactttgccgtcagatgatacagtgccccccaagcaccccacaggacagcgctgcctacatagtgacgtgatgttctgatgacaatagtgagaagctggagagcactgttgacagcatgttaccagcattctctttagcgtatccttggagctttgctaaggagacacaagtcagtggcctcaaatactgagcagctggtgaataatggaggcagaaggccacctcttttgggtgagggagctcactgcttcacagtggccttccagggacagtcttccagctttgcagatcacgaggggcgtccaggaagggctgaggccctcgtcctctgtgggcagtgacctccaagcccccaccctgtgccacagctcacccttttccaagtatggagagccttgtccagccctgtctcaccaagccctctgcgggaactcccttgcacttgacagatgagtgcacacccagcttatccaagggctcacccaaaaaccttcccaatttcataaaagatctacgcccggtgtggtggctcacgcctgtaatcccagcactttggtaggccaaggtgggtggattgcctgagctcaggagtttgagactagcctggccaacatagtgaaaccccgtctctactaaaaatacaaaaactagctaggtatggtggcgggcacctgtaatcccagctactcaggaggctgagaattgcttgaagctgggagatggaggttgcagtgagctgagttaacaccactgcgctccagcctgggcaacagagtgagaccctatctccgaaaaaaggaaaaaaaaaaaagatctaaaattccttgctatctggtagattcaccaaaatcaatagcatttttatgcctagaaaatgaaatagaagtaaaatcctattaattgtagggagagaaagtccaaatagtttcatgagctacagaagacataaagaaaaataggttgggcacggtggctcatgcctgtaatcccagcactttgggaggccagcgcaggtggatcacctaaggtcaggaattggagaccagcctggccaacatggtgaaaccccgtctctactaaaaatacaaaaattagctgggtgtggtggcacgcctgtaatcccagctactcgggaggctgaggtaggagaaccgcttgaacccaggaggtggaggttgcagtgagctgagattgcaccactgcacttcagcctgggcgacagagcgagactccgtctcaaaaaaaaaaaaaaagaaaaaagaaaaaaacccacatattttagattgaattgaagcaatagaacagtgtatgtttagggaaaatttgtttcaaataacctctgagtaacagcagggtcttattcaacatgctcaaaggaacctaacattcatgagaacaccagaaaggcaagaatttcaagggttattttaactaaaaatctgaggagacagaatgagaagaggcctatcctttagacattaaacacatgattaaacacaagtcatccaaagagagtgcaccagctgtagaacaaaagggacagagtggatgcatcagagaaactccttcaatcatataaaattaatttatgacaaactgaatttaagaaaaccagaggccgggtgcggtggctcacgcctgtaatcccagcaccttgggaggctgaggcaggcagattgcttcagctcaggagtttgagaccagcctgggcaacatggtgaaaccctgtctctcttaaaaataaaattagctggacatggtggcatgtacctgcagtaccagctacttgggaggtagaggtgggagaatcacttgagccgaggaggcacaggttgcaacgagctgagatcacaccactgcactgcagcctgggggacagagtgagaccctgtccctgccccaccaaaaaagagaaagaaaaaaaagtgatggggaaactagacatcattaagttaactttggtcctattttaccaatgaggaaactgaaatcagaagatttaagggccttcccacccaaggccactccgtgacttcctggacaagaggggaagcccagcccactccccaccctgactactgaggttctgtgcacacgtctctaccttcctgctcaagacactgggtctttccacagcctgaagatgaccatggacaagacgggtctcctgctgctcagtgacccagacaaagtgaccatcggcctgttgttctgggatggccgtggggaggggctccggctccttctgcgtgacactgaccgcttctccagccacgttggagggacccttggtactgagcccattaccggggcccaggccttcctcagaaaccagctgtgcttgggaacaggcagcgcccctcccctgcgtgtgtctcccaggcttcctctgtctctgacccttactgatccaccctttgtatctcaggccagttttaccaggaggtgctctggggatctccagcagcatcagatgacggcagacgcacgctgagggttcagggcaatgaccactctgccaccaggtgacttggcacaagcagaccgctgagcccagctggggtggggtggggactggcaggccaggagccaggctctccagggccccactcctgtccttgcccaggaactagacacagtccggtggaaggttgatgctgtagaagtgtctaagccagctttcagtgaccccacaaaagatggatggccatctcagacccacagaaaacacatgggccctgagatccctggggttggttggggacagtcggaacctctccctgtccacaccctgaactcccagagcctaaaccctggagacctcacgtactggcttctctagggtaatgctctgggtgactgggccttgttggcctatgctggagggaattctaaagggacgccaggactccctgccctccatgttcctgtccccagctgtctccctcttttcgcaccacacctgagatttgctgaccacctgcctatctgtctgtctttccatttcagagagcgcaggctggattaccaggaggggcccccgggagtggagatttcctgctggtctgtggagctgtagttctgatggaaggagctgtgcccaccctgtacacttggcttccccctgcaactgcagggccgcttctggggcctggaccaccatggggaggaagagtcccactcattacaaataaagaaaggtggtgtgagcctgggaagtgggtgtctccagttccatgtggccaaatcctagggcctcaacctcgcatcctgaaccttagcatcgtggaacacagaagcttccactgtcagctctcaagagcccatggccaggaaggcccatgctgagctttcagtccagccccttcattttacaaacaaggaaactgagctcgaaccacccatttgagatgtcactgtggcccccagctagaggcccagggctgggagcattctccaggagcagaggttcagtctgcttcatggtctcttggaccagttttgactac

SEQ ID NO: 314 - DNA, 26125 bp, Homo sapiens
  source 1..26125: mol_type = other DNA
gcgcaccggaagcgcagggggatggggcggcggtgacgcgattctgtccgcgttggaggggccgggccgctgctggagtcgccgcggccgccgcgtgacgtggcacagccagagcctaaaggctagagccggagctgccgcgccagtcgcctagcaggtcctctaccggcttattcctgtgccggatcttcatcggcacaggggccactgagacgtttctgcctccctctttcttcctccgctctttctcttccctctcgtttagtttgcctgggagcttgaaaggagaaagcacggggtcgccccaaaccccttctgcttctgcccatcacaagtgccactaccgccatgggcctcactatctcctccctcttctcccgactatttggcaagaagcagatgcgcattttgatgggtgagtgaggggctgcgagtcaggcgggacctgggaaaggcagggtctccacaattggggtggcctctgggcctgtttttttcctccgcccgctgtggtgggggaggggcgccgggtcgggggtcggaaggaattcttaagggggaacaatggagcggagggtgagcgatcccccccgcccccgatctgtcgccagacgagacagggacagggcttcgggcaagatttctttctggactcggctttttctccttgatcttattgaaagctggacaacattgggcagagatgtggggaaagccaactctgggaagcaaacacttggcgaggccctttctgggggtgcgatctgcataccttcttgcccgggtgtggacagcggtcaggagggaggcagagcaactccagccttttccctccccttctgcgtttcgtgtacagtccctgcatactccattggtatgtaagccagcggccacccggagcctggagccgcccggggcaggaagttgcggtggccagggagcacccaaggtttccgaagagtctggagtccttcagcgctcactttgctaaacttggccttgcgctggattccgtttcaagtttttcgctccttgttaatctcattctccgaaaactgagcttatcttctatttctttgactattttcaaaaactttaaatgtgtttggtttattctcctaggtttttaagcttatttttaggcggtctaaggtctaatgcaaaaaaattttagaaacgaatttttaaaaaatacctgataaattttcaagtaactgaacatcatgacgctgaattttatggtagtcttgttaaatagtaactacaatttttttaaaatttctttttagaaagttgactttttaaaaactactttttagggggcgtgtttttgctcagctgagggagaagggctgtcagttggctgaagtaagcaaccgctcccggttactgtaagcagtctacatcacagctgagctccatggactagaataacgctgaaagaagcccctctaactttgaacgttgaaacttgttggttcattagcttgttttctaccggaggaggttttatttttctcttccttttttttttttgcagacggagttttgctcttgtcacccaggctggagtgcagtggcgcaatctcggctcactgcaacctccacctcccgggttcaagagattctcctgcctcagcctcccgagtagctgggattacaggcatgcaacaccacgcctggctaattttttgtattattagtagagacgggggtttcaccacgttggccagtctggtctcgaactcctcacctcaggtgatccacccacccaggcttcccagagtgctgggattacaggcgtgagccaccgcgcccggccggaggttttattttagagctgtactaccatcaaaacttgcaaacacaagcttctgtaatatttcaaggtatataaagagtaacagtatatacattggctcatgtttattttcctcttagcgtacttacactttgtgaatcaattgtttatgagtcattcataaagtattttttctttcaaagtttcttagatttcctttgtcaagaggacagaattattttaggagggcaagcatatttaagttttcagtggctgaaagttggcagtctgaaaaaggatcggaagttaatgggaggacttcggactgtgataaatgaatttccagtctgttcgttaaagagatttaacaatatatggttatgttccagaacacatagtatattggtctttttacttaagatttattgtaaatgaattgctatttttcaattccttagtcttttgtgattgatgaaagtatcagaggggcaaggaatatagaagtatgctaccagcattttcatatatttactatattgggaggcatttccctccaccccaaaaaatgattcgaagaaaatgggagagaaaaaatatttaagtttctgcatttgtgtggaggatttaggagttacttgtttttaatgttttattactcaggcatgctatcgttttgcactttaattttgggataatcagttttccttgactaaaaaacacttcagtcacaagatcgacatttatggtaactcatcaaaggaagtatcaacgtacgagggagatatgtgcatgaacagggaaaaaggtggtttggaagtttgataattcttacatttttctgtctggctttatgagtgactgacagcaaaaataatagatcacttttaaagtgtctgccccattcaactgttggaattattaatgttttacattagtgtgcttcgtttttctttataaagcttagataagattcatgccctcctgagtcagtgttttattcagactttaccattttaaagtataaaggagatagcagttagctgatgtgtcaggtttgccaaactactatggagaagttttaaatttaattcgtacacctgctgttcttcaaaagttcaagtaactttaaaagatattggaagttagcttgtagttaactgtaattaaaaaaccaacacagtgtatcaaatttaacatcatctgaactattgattgacagaaattatgtactagttataagggtaagttatgcaagtgatgatattgcccatactgctcgagttaggaagcaatagcttctggccaggtgtggtggctcacgcctattatcccagcactttgggaggccaggttgggaggatcacattgaggccagcctggtcaacatagcaagaccccgtatctatttgaaaaaaataaaaataaagcaatagcgtctgtattttattttgtttattttttttgagatggagtttcactcttgtctcccaggccagagtgcaatggcatgatctaggctcactgcaacctctgcctcctcagtagctgggattacaagcgcccgccaccaagcccagctaatgtttgtatttttagtagagacggggtttcaccatgttggccaggctagtctcgaactcctgacctcaggtgatccacctgccttggcctcccaaagtgctaggattacaagcatgagccatcacacccagccagcttctgtattttgtatatattttttaaataattatgttttttttccttttgagtagctgagacaacaaggacatgccattagacctgcctggctaatttttgacattttttgtagcaagaaggtctcactatcttgcctgttcttgggctgaagcgatcccgcccacctcggcctcgaaaagtgctagggttacagggcgagccactgagcctggctgcattgtcctattttaagtctggtttctgtatcttgatccatgataagatgtaatgttgttaagtgaatccttaaattatgtatatatccaaaaatactaatgtgttctgcagaggaattactaattctgatctctttactttgaactttccagttcttgcctgttgaaaagctgaaaaagtgttacttttaaaaagtttgctgatatcagtgtagtgtagtatgccagtgtagttctgtattgtcttgaatgtgactgtggttttgggggtctagagatgttcaggagaaaggatcctatatttgtcactttaaaaaatattaccaagctaaagagtggtgttttatatttgtttcttagcatattttgtaaatccatctatttatgtaatttttttatgtttttcctcttgattctaaaagtagtatgtgttccttctgttacatttagaaaacaggtaaaagaataaagtgataattacctatctgtaattccactattctgtcatatttactctcagccttatttttatttttattttttgagacagggttttgctctgtcacccatactctggggcacatacaggtggcatgatcatagctcactgtagccttgaactcctggattcaagcaatccctcctgccttaggctctggagtagctaggactacaggcgccactatgcccggctaatttttaaattattttgtagagaatgggggtcttgctctgttgcccagctgatctcaaactcctgggctcaagaggtcctcctgcctcgacctcccaaagtgctaggatgacaggtgtaagccaccacacctggtacacgctcagccttttaagaggaagtttttgttcctctaaaattgtagttgtgatgtttagttttgtgtcctctctttttgatttagcttattacaagcattttctcaggttattggttgaacatataactgccagcctttaaaaaaacaggctcttctgattatgtgaatataggaaacagaaaaggcaaaaatcctgtttcatgccactggctgataggtacagccatccttagatgcacccttttgcattattatagtagtgcaataggctgtcggaaactttgataatttgctgctaattaactgataaaaatgtagatgtttctcatccgtgtgtagaagcagaacctaagttcacatttttccgtataactggtggcctgagtttcagtttggttggtcaagcatctgatgaatttgataaaaaatatttgagatggagtctcactgtgtcacccaggctcgagtacagtggtgcaatctcaggtcactgcaacctccgcctcctgggttcaagcaatccttctgcctcagtctctccagtagctgggattacaggccccctcccaccatgcccggctaattttcatatttgtagtagagagggtttcaccatattggtcaagctggtctcaaactcctgacctcaggtgatccacctgcctcattctcccaaagtgctgcgattacaggcatgagtcaccgtgcctggccaaaatattaagatacagtatgtccaccagaaaaacctaaaggcaggatggcagcatgtaaatagtatttgaggtctctggcatcagaactaggttttttggttttggctttttagaaaattttttaataaaaaaatcaagatataatacatagaccataaagtttaccctgttaaagtgtacagttccgtgggttttagtatatgtattcaaagttgtgtaaccatcaccattgtctaattccagaatttttcatcatccctcaaagaaacctgatacccattagtaataattcccattcccctttcttcccagcccgtaatctgttttctgtttctatgggttaatctattccggacacttcatttaatggaatcatgatttatggcctctttgtctggcttttttcacttggcatgatgttgtcaaagttcattcataatggccgggcgcggtggctcacgcctgtaatcccagcactttgggaggctgaggcgggcagatcacgaggtcaggagttcgagaccagcctggacaacatagtgaaaccccatctatactcaaaatacaaaaattagccgggtgtggtggcagatacctgtagtcccagcaactcaggaggccgaggcacgagaatcccttgaacccgggaggtggaggttgcagtgagctgagatcgtgccattgcactccagcctaggtgacagagtgagactctgtctcaaaaaaaaaaaaagaaaagaaaagagaagaaaaaagttcattcatattatagcgtatattagtacttcattcttttttttttccttttcattaaattcacataagcacctcatttcttttgatggccaaatagtaattacattgtatggataaaccacattttatttatccattcatcagatgataaaaattaggttgttttcactttctagctcttcaacattcatgaacaagtttttgtgtgggcatgtgttttaaattctctgataaatacttaggagcggaattgtgtcatggtaaccgtcttgaacattttgaggacctgacaaacatttccattttacatcctcgtttacatccccactagcaatatatgagggttctaatttttctgcaagactcaggtttttaaatatctgttcttctgtttctgtgactgtgggggacatttctggacattaaatgtctcatctgaaaaatgaaaggttattgtgagaattaaagtccaaaaatgtatagaatcacctactatgcttagaatgcagtaaatattcaattttaaattattattttaaactattacgcagcctgggcaccataccatggcaagacctcatctctacaaaaaaattttaaaaattagctgggcatggtggcgtgcccctgtagacccagctactagggaggctgaggtgggaggattgctggagcccaggagtttgaggctacagtgagccatgtttgcaccactgcactccaggctgggtgacagatcgagaccctgtctcaaaaaacaaatgtatatatatgtacacacacacacttataattatgaaggtatatttcaaacttgtagataatttgaaagataaaggaaaacatgaaaaatctttttatccatctgaaaatactcttttgtctttccagtcttactcctttctgcaatatttttttctccctcaaagttgagatcattggatctaacttttttctttttttgagacggagtcttgctttgttgcctaggctagagtgcagtggcgcaatctcggctcactacagactccgcctcccgggttcaagcgattctcctgcctcagcctcccaagtagctgggattacaggcacccgccactgcgcccggctaatttttgtattttttagtagagacagggtttcaccatcttggccaggctggtctcaaactcctgacctcatgatccatccacctcagcctcccaaagtgctgggattacaggtgtgagccactgcacccggcctcaatttttcatcactaattatgatactagctgtaggttttttatagatgttctttttttgttttttgttttatttatttatttatttatttatttatttatttatttatttattgagacagagtcttggtctgttgcccaggctggagtgcagtggcatgatctcgactcactgcgcctccacctcccgggttcaagcaattctcctgcctcagcctcccgagtagctgggattacaggcgcccgccaccatgcctggctaatttttgtatttttagtagagatggggtttcaccatgttggccaggctggtttcaaactcctggcctcatgatccaccctcctcggcctcctaaagtgctgggatttcaggtgtgagccaccgtgcccggctggatctaactttttaaatttaaaatgtaagtatttcttgctgccataattatgggcaaaggtttgtttttttgggttttttgtttgtttttttgagacggagtctcgctttgttgcccaggctggagtgccgtggcgcggtatgggctcactgtaacctccacctcccgggttcaagcgattctcctgcctcagcctcccaagtagctgggtttacaggcgccagccaccacgcctagctaatttttgtatttttagtagagactgggtttcaccacgttggccaggctggtcgcgaactgctgacctcgtgatccacccacttcagcctcccaaagtgctgggattacaggtgtgagccacggggcccggccttgtttgtttgagacaggatcttgctctgttgcttacgctgaattgcagtggtgtgatcatggctcgctgcagccttgatcccctgggctcaagggatcctcctgcctcagcctcccacgtagctgggaatatagatgggcaccaccctgcctaatttttgtttgttttgagacagggtctcaattctgttgcccaggctgaagcacagtggtgcgatcacagctcactgcagccttgacctcctggggtcaagtgatcctcccatctcagcctcacccagtagctgggactacaggcatgtgccatcacaaccggctaatttttttttttttttgagacggagttttgctcctgttgcccaggttggagtgtaatggcgcgatctcagctcactgcgacctccgcctctcaggttcaagcaattctcctgcctcagcctcccgagtagctgggattacaggcatgtgccactacacccagctaattttgtatttttagtagagacgggctttctccatgttggtcaggctggtctctaattcctgacttcaggtgatccacctgccttggcttcccaaagtgctgggattacaggtgtgagccactgtgcctcactcacacctggctaatttttgtattttttgtagtgacagggttttgccatgttgtccaggctggtcacaaactcctgagctcaggtcatccacctgcctcagcctcccaacatgctgggattacaggtgtgagtagagacgggctttctccatgttggtcaggctggtctctgactcctgacttcaggtgatccacccgccttggcttcccaaagtgctgggattacaggtgtgagccactgtgccccactcacacctggctaatttttgtattttttgtagtgacagggttttgccatgttgtccaggctggtcacaaactcctgagctcaggtcatccacctgcctcagcctcccaacatgctgggattacaggtgtgagccaccatgcacagcttcccagctaatttactttttcttctttaaagatggatctcgctatgttgaccaggctggtttcaaactcctgggctcaagcgatccgcctgcctcagcctcccaaagtgctaggattacaggtgtgagtgactgcctggccagcaaagatttctgaggtagttttcctgctatagtaacactttggtcaaagtgcaggtctagttaaggagaacaagtattccagtacatctttaaatacagttgcttgtttctggacacggaggggagggagaccattgctgggctatacagattagtcttatcttggctagttgaaaattggtaatagttttcattttgtggagaaatttcattgccaaatattgcaacattaaggaaatacataagaaatgactgaagtggctcaaaattgttggaccaatatgtttttgagtaaagaactataagttttaagtgatgactgtatatgtttaattcgtgcattaaagcttataaatacctttttcaaaaactcttaatttgcatttatacagcattgttatttttgatacaactgcataagatacattctgtgttgctgtgagccattaaactgttgtcttgtaatttatatttagaaaataatttgtggatacttaaaagtcattatgggcgcattattttttccccttgaattctggggtgacctagaaatggttgcatgattttgtaaacacttccctttttaaaaaagtaaaatgagtatgtaaaatattatatatttaaagccctcaagcagtcgtcttcaaaaagatacatcaggaaatgtaaacagcccaacattttaattaaaaaaaatctgcttggacaattttttttctcttttcataaaagtaatacatgatttttgggtaaaaaaaaattcctatcagtagaggagcaaggaaaataattattcatacagtattcatacaagcacatataaaacctattaaaagaaaacttggattacctacatgcttttgtataatttaaaatgatatagtcatgatttgtcttggatttcttcaattcttttctttgtcagtatttttggatttactttttttttttttttttttttttgagactgagttccgctcttgttgtccaggctgtagtgcaatggcacgatctcggctcactgcaacatccgcctcctgggttcaagcgagtctcctgcctcagcctccagagtatctgggattataggcatatgccaccacatccagctagtttctgtatttttagtagagacgggattttaccatgttggccaggctggtctcaaactcctggcctcaggtgattcgcccacctcagcctcccaaagtactgtgattacaggcatgagccacagcgccaggccttaccttgtttttaaatgacaatctgaggtccagttggacctccggtgataactggcaggtaccatagttttgtgtgtgtgcgtgtgtgtgtgtgtttcttaatcagcgtctcagtttcaattctgacttggcttaatcatatttgaacttaaaggttaattttggttaacttaaaaatctgatgctttcaagagacagctttgttggaccatttaaagatccagttgttttttgccacccccctttgttttatatcttgttactaaagatgccaaactttaatgtagctcctttttatgtattttttagaattatgttttctgatttttttgataatgttccatgctcaaaaaataaaacacttgtataacagttggtttttattattatgctcatgaatgagggcttgatgtgggctgatcacactgactagtagttgggaaggaataaacctgtatccgagtacgaagtggggaacagggttttacaggacaaaggaataaaaggcttgagtctccaaaaagaacttaaagttattcttggtagggtacagagtagaaagggttgttaagagggtagaaggaatcagaattgcctgtagccttcgcttctgttttggactaactgataaaagatagacttacttgcataggaatgtaaattagataagtgagataatttcagctcttttttaacttactagcattgcttttatgtgctaagtcatgctttgatttaaatattaagaaagtgtccttgcttaaatcaatacttgattgaatcgatacaaaaatctgtgataagataaacccaggcggccagatatgatatcctaagaacaatgatagattcaatgaggttattagatgttgatctttcatttatgagggctttagcaaacactgcagaatattcaggttttgagagattcatacttacaagcatttaatttgttcttcactgtcaccctacaaggaggtatagcctcttgttctagtgtggattttttttcacaagcaaacacattcctccctacttgtacttctgcctcaactgaatcattttaagaatttaggccggacacagtggttcacatctgtaatcacagcactttgagaggctgaggcgggcagatcacccgaggtcaggagttcaagaccagcctggccaacatggtgaaaccccgtctctactaaaaatacaaattagctggggtgtggtggcacgcacctgtaatcccagttactccggaagctgaggtaggagaatcgcttgaacctgggagatggaggttgcagtgagctgatattgcaccattgcacttcagcctgggtgacagagtgatactctgtctcaaaaaaaaaaaaaaagaatttagatattacttatattgtagatgaatgtgatagggtcttttattattatactttaagttctagggtacatgtgcacaatgtgcaggtttgttacatatgtatacatgtgccatgttggtgtgctgcacccattaactcgttgtttacattaggtaatgtgatagggccatttttataacaggttaatcagactttggttttcattttggcacatttaatgttgaaatggatttaagcaggggtaaaattggcttcatcttcctttattatcattataaggtcactaggacatagttacattaagttcattagaacatagttataccactaggacatacttataccagtgtattttttaccccttagcatcaaaatctgttacccaaattttactctgtaaataagagaaaatatttttacaaatcttaagaattctttattcacttacatgttgtctgaatcaacttctaatttgtgtttttaaaaatggtagtatggctgggcacggtggctcacgcttgtaatcccagcacattggcaggcccaggctggcagatcacttgaggccaggagtttgagaccagcctggccaacatggtgaaaccccgtctctactaaaaatacaaaaattagccgggcgtggtggtgggcgcctgtagtcccagctacttgggaggctgaggcaggagaattgctcgaacccgggaggtggaggttacagtgagctgagatcatgccacttcactcccgcctggacaacagagcgagaatacgtccccccgctcccctgcccctccaccccccaaaaaatgctggtagttcatagaatttaattggaagagatcttagatgatctgatccagtccctttatttatggctaatttctctggtctcagtgtcctaaagtcactcaactagtttgtcgcaaagctagagattagagcctaagtcagctacatacttgttaccttttactagtacatgctgtctctcttggtctagaaagcagaatggaaaggctttctgtaggaagtgttgcctttgggaatcagaaataaggtcatttcatttctaactcatttagaagttgtcttgaacagtcaacttctagttttgaactataaatttattgtaaaattatttcttggagtgtgcttttggtctggattttaaatctataatgtcttcttctagttggattggatgctgctggcaagacaaccattctgtataaactgaagttaggggagatagtcaccaccattcctaccattggtaagaaagtttacagatgactttatatcatgatatgttgtaaagtgaaatatatacagtctagttttgagattgtctttttgttaagcatgttgattatcttagaagtacttttaaaacaggccgggtgtggtggctcatgcctgtaatcccagcactttgggaggccgaggcgggtggattgcttgagcccaggagttcaagaccagcctgcataacataatgaggccttgtctctgttgatgtttaggcttaaatatattttttaaaaataaaaagaagtactttaaaaacactattctaagaaaattccacaataaaaggttttattttcttaatgacgctgcacagcggtcatttttgtttttctttgtaggttttaatgtggaaacagtagaatataagaacatttgtttcacagtatgggatgttggtggtcaagatagaattaggcctctctggaagcattacttccagaatacccaggtaagggatactgtatgtttttataacttttctttgtgggtttcatgctctaaagtttttattagtatctagtatttacttggatattggtgtttactatgagttggcatttgtcttatcaccacttccacattcttcagtggactctcacttaggccttgaaggctaacttatatagggtggaagagttgtaaagcaattgcggtaagtgtttggaagatggggtgggtgctggtgtagttcacaagaatgaattaggtctcttatccgtagttctttgctttccatcttagtttagaaagtaaggtctgtataaactgtcattgtagtttctgatgaatgtaagacaattgatagtcctttgtttagcccagttacttgtttactttattaaatacagtaaagtcagttcgctgcattgatttgtaagatatttttatattgccacatagtatgtatatataatactggcatggaagagactttagtgatcctgtagaacaggagttctcaaatttgggggtggcacgtaagaatcacatggggacctttgaaaatcccaagacctggatcatcccctagatgacttgaatcagaatatcaggggatataatccaggtacagtagtgtttcttaaactttaatatgcatatcaatcacctgggtatttgttaaaaatacacattgagtccataggtcctagctaaggcctgagattctgtatttctagcaagttctcgggttgtgctgatactactggtctggtatcttacagcacagcactattgacattttgggctgggttattctttgttgttgggtatggggagggctctctatgcattgtaggttgtttagtggcatccttgtcctctacccactagatggcaatagcagctgccctcaagtagcagccaaaaatctctccacacctgcaaaatatcccctgggggcaaaattgctccctgctgagaaccactgttctaatctaactctcttacatatgaggaaactgaaacttggaatgacttacccaagatgggagagtttgttctcactctacctttgtttaacctggtcccacctcgattgtgttttctaccacccaaggaatttcttgtcagtttttttttattacttaataattttttttaagtgtgatatcactgccactttatatttttaagacttgcaatgtcatcttgttatcagcctcttaaaacattgcatacaagtggggtttattgccatcaggtggcagtgaataccctaggtgagtggctgggacaaccaggtttacatagtatgtcatattaaataagtggtatacttttttatttaaaaacgagaatgtttaggccaggcacggtggctcatgcctgtgatcccagcactttgggaggctgaggcgggcggatcacgaggtcaggagttcaagaccagcctgaccaacacagtgaaaccccgtctttactaaaaatacaaaaattagccgggcgtggtggcgcgcacctgtgatcccagctactcaggaggctgaggcaggagaatcacttgaacccgggaggtggaggttgtgatgagccgagatcacaccattgcactccagcatgggtgacaaagcgagactctgtctcaaaaaaaaaaaaatagtagaatgtttatggtcatcaatatagctgtgactagaaaagatacttgatacagaggcacatgctttaaaaagcttccttatggaaaatgttaaatacaaggtgaacattccttatccgaaattcttgggaccagaaaccactgtttctgatctcagaattttgggggttttggaatatttgcattgtacccagttgagcattctaaatccagaaatccaaaatccgatatactccagggagttttttctttgttatgttggtgctcgggaagttttggatttggatttttggattaaggaaactcaatctgtacacctacaaatagaatagcataataaactcacatgtatgtattatgcagcttcagttactaggatataagcagtgctgtgttgtttcatactcatctctaatgtgctctaccctctagacagtttgtttattttttttgagatggagttctcgtcctgtcacccaggctatggcgcaatcttggctcactgcaacctctgcctcctgggttcaagcgattctcctgcctcagcctcccaagtagctgggacttcaggcatgcgccaccacacctggctaattttgtatttttagtagagacggggtttcaccatgttagccaggctggtctcgatctcctgacctcatgtgatccacctgcctgggcttcccaaagtgctgggattacaggcatgagctactgcgcttggccaatatattttgaaagagttagatatgaagtaaaaccttgctaatccttaagcctaataattcttgaccaagggtaaccctgggtttatccctagatttgtttagaatgctttgtaatttactttgcattcttaatttgaaattagacccaattctggcctctttggaccatctgagaattaaaagtctaagtactgcttcctagggagttcatgctagctggggaaagctttatgtgttacctgatagaatcaaagctaagctcttagcttgcattcccagcattactgatcagttctcctagctataaaatttaaaagaaactatagctttaaccatgtttctaacttatactaacaaaccatggcacagtgtgtagtaaattcctcttataattccaactaatttgccattgtaaataagtaaatatttggcttttcaaataatttcatagcagctgggcttatctgtagaatcctagcttttcttcactcttgattctaggctgttccaggaagaaaataattagggattaatacctaaaataattctccttctcaataatgtcactttgggactgatagcattatttgcattttaaaacaaaggctgggtgcagtggcttatgcctgtactctcagcactttgggaggctgaggtgggaggatcgcttgagctcaggagtttgaggccagcctggggaacatagtgagaccctgtctttacatttaaaaaaaaaaaaaaagaataaaaatgggaagttagcagtcaaaataaaattaggtcccttttaggggcattacctcttgtaaagggtaggtttcaggaccgggtgctatggcttatgcctgaaacaccaacactttgggaggccatgatacgaggatcacttgaggccagtccaggcaacagagtgaaaccctgtctctacaaaaaaaaattaaaaaaaaattacctgggcatggtggcatactcctgtagtcccagctacttgagaggctgaggtgggaggatcacctgagcacaggagttggaggctgaagtgagctacagttgcgcctctgtactccagcctgggggacaaaaggagaccttgcctcttttttgaaaaaaagaagaaacaaaaaaatggaaggtttggttctaaaaaggagtagcttttgaaatatggaaaggaggagacatatttgctaaataaatgcccatgataagccaagaacaatgatcttttatatctctgtgattgcatttaatctttaacaagcttatgaagttagtatttttattttatttagacgaggcatagtcaaggattagataatatatataacaagtagtataagatttgaatttgagtctgtcttcccaccacactatattggctcccaaagcatcaaacattattttttgtttttgagatggggtctcactctgttacccaggctagagtgcagtggcatgatcatggctcactgtagcttcagtcaacctcctgggctcatgtgatcctcccttctcagcttcctaagtagctaggactatagacatgtgccaccatgccctactaaaattttaatttttttcgtagagacagggtcttactctgcccagggtgatcttgaactcctgacttcatgtgatcctcccaccccagcctcccaaagtggtgggattagaggtgccatgccagccaaaagttttctcaaaggataggatatttaaagtgatggttttccaggtggtatagatgcagtgtaaaataaaatttaaaaattaagttatggtttccaacagagataaaggaaatggacttacaatttgctaaaacaaaggaaattgtcatttaatggatgtaaaataagtgttagatgctcctggagagcccagtactgtggtaatcctgagaggtaaacagaaaatgatgtaggatggggctgggcgcggtggctcacacctgtaatcccagcactttgggaggccaaagcaggcagatcacctgaggtcaggagttcaagactaacctggccaacatagtaaaatctcatctctactaaaaatacaaaaattagccaggtgtaatggtgggcgcctgtaatctcagctactcaggaggctgaggcaggagaattatttgaaactgggaggaggggtttgcagtgagctgagatggcaccactgcactccagcctgggtgaaaaaaaagatatagtatagtcctttgcccttagtggatgtaatctagttccttttttttttttttttttttgagatgtagtttgctcttgtcgcccaggctggagtgcaatggcgccatctcggctcactgcagcctccgcctgccaagtagctgggattacaggtgtgccaccatgcccggctaatttttgtatttttagtagagatggggtttcaccaggctgatctcgaactcctgatctcaggtgatccacctgcctcggcctcccagaatgctgggattacaggcgaaagccacctcaaccagcctcgttacttacataaatcagtagtgcaagacaatctgttataagtgacatgatcaaaattgatactttaggagtcaaggtttatctttttttcttttttattatttttatttttgcccccccccttttctagctgaaaattctatactttcccatttgaaagttcttagaaaaacagttcaactagttgcttcctaattccttccatttattttgtagtatagaattctaataatgggccaggtgccatggctcatgcctgtaatcccaacactttgggaggccaagatgggtggatcacttgagtccaggagttcgagaccacatgggcaacgtggtgaaaccccatctctacaaaaaatagaaaaattagctaggtgtggtggcacgcacctgtagtcccagctacttgggaggctgaggcgggaggatcatttgagcccagggggtcaaggctgcagtgagccaagattgtgctactgtgctcctaggcaacagagttgagaccctgtctgagaaaagaagctaatatttgtatctctaagaattgataactaccttcctttttttaaagaatgtcttactcgatcaggtaaatcttgaatttttctttctttttttttttaagagatagggttttgacatattgtcctggctggtctcaaactgctgggctccagtgatcctcctgccttggcttcccatagtgctgggattacaggagtgagccactgcgcccagtcttggatttttcttgctatcattttcttaagatgtcttcctgatctagagttggcaggcagcattctgaagcaagttaattttttccttccatgatgaagcagataaaaactgtagtgtacacactcgcgctatcccaccccccttttattactctgtacatgcctttgagtcagtaagctaattcagttagtaaattcatggggtttttttgtttgttttttgagatagggtctcgctctgccacccaggctgcagtgcagtggtgcgatttcagctccctgcaacctccgtctcgggctcgtgattcctcccacctcatctcccaagtagctgggactaaaggcatgcaccaccacacctggctaatttttgtatttttttgtagagatgacctttcgccatgttgcccaggctggtctcaaactcctgagttcaagcaatttcaggcctgatcgtttgcctcagcctcccaaagtgctgggattacaggatgagccaccatgcctggccaaattcacgattctttaggatccttgatttgttatttttctttttgttcctactttgtggctattttggtacctgcacttaaatgtgagagtgcagagggaaggggaaaaatagatacaatttattcttagggtagttgagaaaagtaattaattggtgaagaataaaaattttttagatttgaaatagcactaataaattaaacttacaaatagttctcaaatcagcttttagcattacagccttaagttcttacttttaaagagacattttcttcctaatgtctaaccattggtaccattttgctgcctacactgtttcatatagagagtgtcgtttaactgttaaaatttactgaaacaatttttccccagggtcttatttttgtggtagatagcaacgatcgtgaaagaattcaggaagtagcagatgagctgcagaaaatggtaagaaatatactttaaattcatcattttcaaggtgtgcttttctggattaaactggtggtggtttagtacattttgactatgattagattacacaaatggattgggggggctagaaataaacttaagaaactatattatccacaggttcttaataatgtacttcaaaatctcttatagagcgttttaaaaaacacatggaagagtagctacttcagtaagttgggaggaaggcagagcagtgttgttttttttttttttagaatgcctcatgggtaatcttgatgcctatctctggctgaggatatctgatttagctcagtcccttactttacagatatcaaatctatagtgctgtagtggttttgaccctaggaatcttggttcagatgttttgttcccaaggtcatcggttccattttctctatgctgtgccaataattacttcagaaatgttttttaatagtaaccatttaaggataaggaattccttctgaaagtagagacaaatgtttggttcacagtggcattttgcagccttcccatagattggattaatgttttcatgtgttcatgttgttaaatgtactaaatggaggaagactgctgagaatccttgtcatgattttaaacttgtagccataaaatatttactgaaatgaaatcttaattcttgttcattcctcctaagattagagggcagtttgtaaaaccattgtgccagtatatgtgtaactaagtcattgttggatttttgcctgagtcaaatgtcaccagctttccctcttcaaaaaaaaaaaaaaaaaaaaaagcttggttgagacatacttcacacactataaatgtcatcctttttaaatgtgcatatcaatggcttttagcatacatagttgtacaaccatcatcacaatctaatactagaaaattttcatcaccctcaaagaaatcttggaccattagcagtcattcccatttccttcctctcgtacaccacactcccagcctctgacagccactaatttgtctttatacagtcacctattctggacattcatataaatgaaaacatacaatgtgttcttttgtgactgattttttcacttagcataatttttcagggttcgtctatattgcatcatgcatcagtacaacttctgttcttggtactttttttttgtatatttcatgatactgccaacacccagataattgtgttattgtcccactgttgttggaaaggatagaagtccgaaaagaatcatcatctatctaagtacttctgctactaagtaccataagaacctgccataaacattttattcccacatgtatttcttgcccttatcagtcctgacaatgggtaatcatgaaggctgaatgatgagtgatttgctttaatttaatggggtgtaggatgattgacttggaaaacagttctgtcttatttgaaggcatatgattgtttgctctggatttaaaaactgaaggatatgagacttcagttgtaagagtgaactttgtgtcgagaaattaggttaatgtttaataatgtatttaatgctgagtaaagtatatataggaagacattttcaaaaattggattccggttggtagttgttaatgccttaccttttatttccagcttctggtagatgaattgagagatgcagtgctgctactttttgcaaacaaacaggatttgccaaatgctatggccatcagtgaaatgacagataaactagggcttcagtctcttcgtaacagaacagtaagtatttggaggttgatattaacctcttgactattaagacttactaggatagttgtgtaagctaatattcagtttaaacatttattatctcctttggacaaataatgagcacatcatttatttaaaaatatggtaataaactttaaataccttatttgatttttgtaaagaaacggaaaactactgtagaataggtctaaagattattgatagtttcttttttctttttttttttttttgaagggagaggtggaaggaatggaaagaagattattgatagtcttaattttaattttgtatcttttaagtaaccctacagcaaatattttgaaatctggctttcttattaagggtccagtaatgtttgtttgcttgttttaaaagtggagatggggggctgggtgcggtggctcatgcctgtaatcccaacactttgggaggcctaggtgagcagatcatctgaggtcgggagtttgagaccagccggaccaaccagggagaaaccctgtctctactaaaaatacaaaattagccaggtgtggttgcgcatgcctgtaatcccagctactcaggaaggctgaggcaggagaatcacttgaacccaggaggtggaggttgcggtgagtcgcgatcgcgccactgcactccagcctgggcaacaagagcgaaactcggtctcaaaaaaaaagtggagatggggggtctcgctttgttgctaggctggtcttgaactcctggactcaagcaatcctctcactatctcagcctaccaaagcgctgggattccagccatggtgcccagccttgtttgcttgttaacataacagtttatggaggagaccaggtaccacggctcacacccgtaatcccaatactttgggaacccaaggcaggaggattgcttgaggccaggagttccaaaccagcccgggcaacaaagtgaaaccctatctctacaaaaataaaaattagctgggtgtggtggcatgtgcctttagtcccagctacttgggaggctgaggtgggaggactgtttgaacccagaagttggaggctgcagagagctgtgattgtgcccattgcaccccagcctgggtgacagagcaagactgtttctttaaaaaaaaaaaaaaaaatttgtacttctctaaaattgcttatcattgatcagtgattcagtgatggagataaattatcagaaacttagtgtcataggctttttacagtagttttgcattaacctgtaaataagggaaatactgtggctgtggtaaaaaatgaaacaaacaacaaagaacctattgcaggccgggtgcagtggctcacgcctgtaatcccagcactttaggaggctgaggtgggtggatcatgaggtcaggaattcaagaccaacatggccaagatgatgaaaccccatctctactaaaaactacaaaaaaattaggtgcagtggcaggcatctgcaagcccagctactctggaggctgaggcaggagaatcacttgaacccaggcagcagaggttgcagtgagccgagatcacgccactgcactccagcctgggtgacagagcgagactccgtctcaaaacaaacaaacaaacaaaaaaaaacaacctattgcctgtttgagatatctcaggctgatttgaagaacataaactgggccgggtgtggtggctcacacctgtaatcccagcactttgggaggcgaaggtgggcggatcacttgagaccaggagttcgagaccagcctgggcaacatggtaaaactctgtctctactaaaattacaaaaattagctggtcgtggtggtgcatgtgtgtaaccccagctacttgggaggctgaaggcacgagaatctcttgagcctgtgaggcggaggttgtagtgagccgagatcacgccactgcactccagtctgggcaagagtgagtactctgcctcaaaacaatcagtcgatcaatcaataaataagcaagcaacactaactgtaaatgatacaagttttccatgctgtgaaggtatgaatttgagcctttccccagcctcctaggttactgagatttggtattcaaataattggcaacatggtatacctgcagtggccttgcaacattaaactggtcaaaaaaattaataaaagtaaactatgccttaaatgtaaattgttttctaggttttttttgatactttcacacagttactagagataagattcgttgccatttaaaagcaagaacgttttggaatgcatgagactaaagatggtgaaattgtctgaaaagcttgcccttaaaatatcaacaaaccctactctttctttctttcttttttttttttttgagatggagtcttgctctgtcacccaggctggagtgctgtggcacgatctcggctcactgcaagctctgccttctgggttcatgccattctcctgcctcagcctcctgagtagctgggactacaggcgcccaccaccacgcccggctaattttttgtatttttagtagagacagggtttcactgcgttagccaggaaggtctcgatctcctgacctcatgatccatccgcctcagcctcccaaagtgctgggattacaggtgtgagccaccacgcccggcctaacaaaccctactctttcaaaaatttgcctcttctactttgagtttagttttatgggaaacgagagttataaaaaccagatgggtagtttattagttactaatttccccatgatttcttttttcagattaagtggtagaaagtttactaaaagggaaccaaaaaccagcactgaaaagaaagctgaatgaggggggaaaatcttgtctaaatataatgaataggtagaagtagcttgattgattgagacggagtctcactctgtcgcccaggctggagtgcagtggcacagcctcggctcactgcaacctccagaataggtagaagtggctttatttttaaaaaataatttaatctaaaaaagtagagacaaagtctcaccatgttacccaggctggtctcgaactactaagctcaagtgatcctcccatctccgcctcccaaagtgctgggatttataggtgtgagccaccacgcccagccagaagtagctttaaatatgggagagttttgtgagatgcaagaggtgtgaaaagactcttaagtttgattaagaaagtttaaacactggtgttatatattaactttgttaatcaagtattttcttgtcttctctttacagtggtatgttcaagccacttgtgcaacacaaggaactggtctgtatgaaggacttgactggctgtcaaatgagctttcaaaacgttaaatgaaattggatatctaaccaaggacatgtttgataaaattggtctaggcttgttacaacaaaattagtttgtatcttggttattaaacagtatctgggactggtttgggcagaatattaaacttattttgttgccaattattgtttaccgagtataatgttgctatttagcaatgtgcttggttttaaagaaattctccttgggaaaaaagtatcctcttttaattttacttcccataagcgtaaatgcctggacatagctcttgtgcaacctttaaataaattgttttgagtgttttttgagccccagacaaataatgttttaaagttatccccttgctactttactgatacctttatcattcctgagacagtttgctaatttaaaaatgtagcattccatttgtatttatttctctcccttgccaaaaagattttctaatactgcttgtaccagccagagaaagatccaaaacactactcagctctcttgcactgaggaaatttttccccctacattgactcctggcctacatcagccaaacttaaccttggtggggtttggatttgatagccaattagttctgtgctggttgcaaagaattgatatttagatggtttttaatactcagcagattgtcttcctttatattgtgtcttttttatgttgcatgttgcttttgttatcagcctgattttttgctcagtatatgatagttctgctgatgttttgtttattgggcagacatatcttcattaagagtttttggaaaactcatcaaattcgatgaatacattttcttcataacccatttggaattattcctaataaaatgataaaatacgta

SEQ ID NO: 315 - DNA, 30053 bp, Homo sapiens
  source 1..30053: mol_type = other DNA
aggcggccgcgggcgccgccgcctcctcctccatggctgtttacccggctgcattgtgggagtttgacctccgccgccgccaaccgccgcctcagcttgcgccgccgccgccgccgccgccgccgcgcacgccatgggagccgtgactgacggtgaggccccgctcgccgccacacgcgcccgctgcacggcccgctgggcctcccctgagacccctggcctcccggcccgcttccgggaacccctcggcctccccggcctcttcgccagagcgcttcggccttcccgacctctccccggagccccgggcctccccggctgcttccctgagtccttcctcctctcgccagagcccgagcgcccctcggagaccctcggctttccccgtccgctctcccggaggcagcgcggggctatagggtgtgccgggagcgtggtcggtgggctgggaacacacgtgggtggccgagacggctagaagcggtgcaagggcgggtgggaccagagggagtccgggtttgtctaggggcgcggtgaggacccaggagccgcgaagggtggacagtggtgccgggcttagggctgggggcctggaaggtttgtggaggtctgggagggagtgggagctccagggacggggcgggaatttcgggactcgtctacaaggggtgtcaggatacagagcgtgacaccaggaggggtcctggggcatattgggaagcactcacagacagtggagtcgatggcaatgaggccttgaactgcgagtggattgtgggtgagaaggaggagcagggaattatttataaaaggaatagatagggatgaggtatccggagggtgatcaggaagtgtacctgggagatttacgggggtaaggaggagccagtatagtgatgagaccgtctagggtagatcaggacgataaaagatgtatgtgtgtgtgttaggaagggtggttgtcagctgggatgaatttagaggggcaaaggctgggtttgtggacagtctaagggagatggtctatggactgagagcggaaataaggtgacactttgggggaaggggcatgattggcaactggagggagaacctacaaggtatctggttagggaggaaggaggtcctttgatatctgggaaggggatatctagggctcttgggtgtttttcaggagatggtgaccggtaactgtaaatgcctgtggagaggccacttcttaagagttgaagaccaccagggtctccacattaaagggcctggccatgggaagaacagtgataggcccaaatttccagactgataaagagtagtggaggtgggaggctactaaagacccaggaacttcatgtggaatttcagctttgcttcattccagtttcatttatttagtggatatttatccttcctggactaggctttgggattacaacccagaactaacaagcaagaacttttccctctccaaaattttggtctgaagggaaagaaacattgactaatgagttttaagagtgacaaatattaccacaaggaagtacaaggttgggaactgtaggaacatgtaacaaagattatttatccaatcaatggaaatgagaaagcctcctcgaagttaatcccatttttgaagaataaatagatattggactggtgttctgggttggtagccacttgtataaagaccccaagatgttggaagaactcaaagctgacaagtattgctagaatttagaaagttatgagccagagatctctaagggcaataggaatccattaaaagttttaacactggtgtggtgttaatcagattggcattaaaacacacacacatgccgggcacagtggctcacgcctgtaatcccaacactttgggaggccaaggcaggcggacctcttgagctcagaagttcaagaccagcctggaaaacatagtgagaccccatgtctacaaatacaaaaaaattggtctggcacagtggcacacacctgtagtcccaggacttgggagtctgaggagaaaggatcacttgagcctgggaggttgaggctgcagtgagccaagatcgcgccagtgcactccagtctgggtgacagagtgagaccgtgtctcattaaaaaaaaaaaaaacacacacacacatacacactgtctctgttatgtgcagaatgattagaggaagagaaaatgaggagctaagtttcctcgccacttactaacgtttacgtagtgctgttaggtattattctaattgttatccccattttacagatgaaacagacacaggttagcttgcctaaggtcgcacagatagtagttatagagggtcaaaggcagggagaccacctgccgagttcctgctcttcactattatgcgtcctgtgtctgctacttctgcagtggccctggtgagagacaatgaggactgtgaccaagagggaatgcaaagaggacaggtgggagggaaatagggaaatttgtgaggtagaatgtcaggacttcaggtattgaatggatggtgggagaagggatttaggatgatcccaggtttttgacttcactgtgtgcctgttagtgctacttttctatttattgagattgagatgtccaaaggagcaacaggctttgtcagatgggagatagggacagaagatgagttctaaagtaatgactgcagtcaagtgcccccccacatccttaaaagccacaggaatctctaccctgccacttacagactgtctcagcttcagtctctgaacggagataataataaaatccacatcagcggattgttttgaggattaaacacaaaaagttgtaaagggctttgcattgagtccaacacataataattaatattcagtaaatattaatgtcagagttgttttactaatctgtcttccactttcctttgatgtggactttgccttctctcttaatctgcacaggttgccttttcctgccttttctatcaggtgacactccacttattcctcaagacccacctcaaaaatcccctcttttctttcctagaagtagttgaccttctgcctactagccatattattttatgcatattgctgctgtcacccttaatacgttatttatatgccttatgctagaaaacatttaaggcagttcactgtaatgagaaaatataaaaattaaacggattagaaaacaagacaaaaagaacattgagattaggaaaaataaagggaagtcagaagtggggtgatcctcaaaatgcaggaggataaagtctagtacattaattaaccaagctgtaagtgacctgtttctccagtaggccattctgagaggcaggacctcgtctgctctgtgatctagtgttcatgagagaaggcaatcttagatgcccaggaaaagcactttttttttctgatttgaactagaggaaaagtttatcattgaggtctttataaatgaaagccagtgtcatatccttaacctcttttcagcactgaagatcatagagctgttttgtagcacatcccttgctaggtaaaagaaggctaaatcacaatttagaaagacattctaaagccagtagaggctgggtgtggtagctcacacctgtaatcaatcttagcactttgggatgctaaggcaggaggatcacgtgagcccaggagtttgcgaccatcctaagcaacacagcaagacatgatctatactacagaatttttcaaattagccaggcgtgtgtggtggtgtgcacctgtagtctcagctactcatctctactaaaaattttcttaaattagccaggtggagtggaacacacctgtaggtagtcccagctactcaggaggctgaggcaggaggatcacttgagcccaggagtttgaggttgcaacgagccatgattgcaccactgcactccagcctgtcaacagtgctagaccctgtctaaaaataaataaataaaatcaatggacaatgtggtttaggtgggtagtgggtagctctgctgatctggcttgattcaaatcagggttttttgattgaatatctagaccatagaggaaagacaaactacaacttcttcagacaatcctctataaacatggtttttgtcagctgagcttttgaaaaaatcaagctgaaatgagtggtatgtgtgatccgtcaacaagtatttattgcataccttctaggcacaatgcgaggtcctggctactttgcagtgaactagacagaggagggccctggcccctgctttggggaaagaagccatagtgtgcaatcaaataagtaaataagataatttctgaaaaggaatgtaattaagttctgagaatgaacttgatggaatgaggacagagagtaatgggggagggcagtgatacctgacaggttcaaccacatgaagagcccaggaaagtattccagatagagacaacaactagtgcaaaggcccgaggtgaaaacaagctctgcaccctttagaggaaataaggaaagccactgggctggatctagggacaggactgcatccaggtgggccaagaggagtacgatgcaaaaggaggtaaaagggagctcaggaggagccttgcaggctttggaaaggagactgaattgtcctttgtgggcatttagaaatgataggaggattgtaagcaggagagttagtgatccaattcatcttttagatcattctgagttgcataaaaaatggattctaggaaggcaagaatggaaacagggagtccaatgcaaaatattccagatgagagaaatgtgggcttggattagagcgatgttagtgtggaagatagaagtggatgctcttgatatctcattcatcctcctggaaagctcttggaggagtaccagtacctgtccatggagcttacataagagccaatgtcttttacaaatttgatgtgcctgtatcactgtcccttcatgtaatccattcctctgggtctgcgtatccagttggactgggagctcttgaagaagcagccctttatttcctgcactcagtttgaggaactgccctgctttagagtagctatagctactagactggatattttcaccactactgtcatgttataagtgaaaaagtagaggtctttggaagttagtgacttgcagtcacacaggtagtttgtgacaaagccattttctctccttcccttgttgccaactctagcagtctggctagctgaaaaacagtgtggatgttgtcactgttaatttaaactatgttaactgtattttgtatgtgttaatttaaaggatgctaaatattgttagtaccctgatagaaatcatttcagaagcactttttgcactacagagaacattaggtgatatattgatatgccagagcaacagatgagagatggagaaaggggttggggtggaatgtggctctacattctatttaataaagcttgctggttttgacggtagcttttttttttaacttagaaaaatgtaatgcatgaatatgtacttgttgcaatgtgaaataatggtttttaatatgcctacgaataatatgacagaataatggagctgcattatgactttctaataatgtaattgtatatatttttctgtgaatgcagaggtgagtagtaactcatctgtgaaaggaagataatagtacacactttgtagagttgtttcaaggatgaaacatgataatatatgtaaagcactttgaagttgagtgaccatttaatttattgtgtaaaccaggacacttttcagagtgaaaagaaacaaatgggttgtgtggtcaccaactagggtggtataaatgctgtgcaagtgtttgctgctgctgttattcctatttcaattgctgatccaatgttaattagacatttgtgggcacagggttcttttgtttttgggtttttttttcattagtgccattgcatttgcccactttcttccatcttctgtggccccaacacagggataactgctgcagttcaactatgaaatgatgtttctttagccaagataattggtttttcaaagcaagatggacatttcaccttgactttattagcactatactactctaaacatttaaatagagagaaaagacaaaggacctcaacatgatgttttgcatttattttccttttaaaattttaaatttaattttggtgcacgtaatttaccttggcatcagcaatttatgtagaccagtcagaagtatcttaggagaggttaatatctacatggaggaatcaaaccatcttattgttccttccacccaccttttatgtgtctccttaatattgttgaccttaaaaattgttttaatggctttgagctttttgaaaggagggaccaggtgttattttaccataaggaatgtaacacaatgggctaatatgtgtgattcatcttaataacatgagctgtggtggtctaacgataaatcttacaggaatctgcatgaacattttttttacatggccttagtctctcttcttgttcatttaaagtaggtcaaatcaagccagttttctttgttgttgttaacatatcatagctttattcagtaacggagtagaatttttaatacagagaaaatgaagtacctgagaatgataaataagtttaccacccagttaaccactgttactacttcataaaaaaagtactacatgtcagtaaattcaagaagaaatgcacaatatgaaaaatgaaaaccttcccctctttaccttccgtaataattcctctcccagaatgatttttaatgcctctaaaaggtaaaagtatcttctctggagcctgactcctgagtttgagttccatttctattccttacttcctgtgacatttaatttttggcaagatgctttttcattggtaaaatagggataagaatatctataatgaggccgggcaaggtggctcacgcctgtaatcccagcacttggggaggccgaggcgggtaggtcacgaggtcaggcgttcaagaccatcctggctaacacggtgaaaccccgtctctactaaaaatacaaaagaattagctgggcgtggtagcgggcgcctgtagtcccagctacttgggaggctgaggcagtagagtggcatgaacctgggaggcggagcttgcagtgagccgagatagcgccacgcactccagcctgggcaacagtgcaagactctgtctaaaaaaaaaaaaaatctataatgctgttgtgtagattaagtgtgtttatatgtgaaaagcatctaaagcagtccttagcatatttaagtgttacgtatctgctggctagtataccagtgggtatatatgcttgaaaattttatacagtcatttacacactggtctgtattcaacttctgtgtacccataaaattttttttaagtgatatagtaggtgcgtatatttatggggtacatgagatattttgatacatgcatacaatgcaaaataatcacagcagggtagataggatatccattgtcttcaagcatttatcatttgttataaacattctagttatgctcttttagttggtataaaatgtgcaataaattattgttgactataatcatcctattgtgctatcaaatactagatcctattcactctatgtttttgtactaattaagcatccccgcccctcccctgccaccacacaccccacagctcttcccagcctctcgtaaccatctctattttctacctccatgagttcagttgtttcaatttttagcttatcatggagctcttttgaatataaatctaccttattcttttatatcagtgtgtatagtctattaattttttagacagatcctctattggcatttagtttgttttcagttttttactcttccaaacagtgttacaatggagatatttgcatagatatattcgcgtacttgtgggaataatttctaaaagataagtcaaaaggtatatgtgtctttaattttggtatatcttgctgtaatgccttagtagctagctgttttccccactataatcctgtctgaaattgttatcccttcctgtggctttcagtttggtacctaccaaattttttgccaaactgcatttagaaaggaaatgctaatcctcactggtagatcacaggattactagttcacaaaggcaggtgagattgcagccttccctcaaagggaaccacatttgacctgcaatttagccttagcaaggagttacataacaatgatgctattgcctctggttgtcaagccttgacctgtctctgaagttgttttgtaatcaaggttttaatggcaaatatagggaaagaacaattatgaattttgaaaacgttagtctgggtttatgagaaactcccttttatgctaaaatgagagcacagctaaaatggctgtgtcatctgaccagaggcctagaaatctagagttgctctagtaactgtaaaggagtcatttcttcctgcctctatgtttatgaaacatagagttttaagatctaaggactttttgaggcttatttggtgtcttgaataattttatatttcttctggctatatgttggcatatatgtatcccattttgcaagtaaatatttacatttcagcataaatgtgtcattactgattttaaactgattttgaaagatattttgtatgtgcaattatggtataacgaaatccagtaggaagtcataagttctagaattgtgataatagtctactgttaaaccaatcctgtttttttatgttttcagtggttaacatttaggcatattggatatgaggcattttgatgagcaaatatgtatctcatgcccctgcctcatagacagtatactctagacaatgtgtggtcatattactcactaattaatacgtgaagttaattgctgcctccttttctttcttttttttttttttgagacggagtctcgctctgtcgcccaggctggagtgcagtggcgggatctcggctcactgcaagctccgcctcccgggttcacgccattctcctgcctcagcctcccaagtagctgggactacaggcgcccgccactacgcccggctaattttttgtatttttagtagagacggggtttcagcgttttagccgggatggtctcgatctcctgacctcgtgatccgcccgcctcggcctcacaaagtgctgggattacaggcgtgagccaccgcgcccggccctccttttcttgactcagattcacactccacagtctttccaggagctagatggatggtattatccagccattgtcctacaagcctaaagccaggtggaaaaccaccatcctcacagcaggtgtcaagtattttggtttagaaactctttccagatgatgttcatcctcatagtaaagaaagtaattatgacaaggagtgatgttgataacataaaaaaaataacaaaaaatctgctaagccatctttactgtttttacaggatagaccaaagcccagcagaattactaatataagcattcaaactgcttacagagggtttcaagcatgataatttgtgaagtcaacatgtatagtaaacaaaacatattttaagtgtgttcattatggagctaattgataagatgtcattaaaaataataatgctcatggcatttgtgttaggaactatcagcagcagtccatctttaaatttaaaaagaacagaggctattctcaaactgagagcttacctttttgttttattctgtttctgttggagctgtgctctgtactttatacatgttatttcaataattcttgtccacagagttttctaggcagcaactctctgtgcacaatttcagctagaaacgccatgaccttcccagtaaatttgagacagaagcaaatttgtaaggaatcctaactgggcaaaacttgatatgcataaatgcctaatatgtatctacatagatatatctatagataaatcttcaacatttactctgacttttataggatgatacaagttgtggattaaattttttttttttttttttgagacggagtctcgctttgtcacccagcctggagtgcagtggcgcgaccttggctcactgcaagctccacctcccgggttcacgccattctcctgcctcagcttcccgaatagctgggactacaggcgcccgccactatgcccggctaattttttgtattttcagtacagacagggtttcaccgcgttagccaggatggtctcgatctcctgacctcgtgatcctcccgccttggcctcccaaagtgctgggattacaggcgtgagccatagtgcccggccgtgaattaaatttaacataaacataaggataacatattttttgttttcgtactatagacagacattgtgctcctttgtatacttttatttcccttaagtttcccaatatttctataaagtagatagttttattcccattttacagatgaaatcagatgttggtcttacgtgaatatacacacatgcacacacagtaaacattgggtccagtttttgttttgtttcgtttttctggtctaggcagttggctgtgaggtgtgcttagactaaagagggagagggctgagtgggaggagggcctgtgaatgcctggacagggaattccctgtgctgccagaactagtggtgccacactcctacttgtgccaccccaatgttggcattggcccctgttttttcctaaccaagtcatctgctcagtcctaacctgccttctaggacctgtgattctttttttttttttttttttcttttttgagacagagtctcattctgccacccgggctagagtgcagtggcgagatctaggctcactgcaaactccacctcctggattcaagcaattctcctgtctcagcctcccgagtagctgcgattacaggtgcgtgccaccacgcccagctaatttttgtatttttaggagagacagggcttcaacattttggccagcctggtctcaaactcctgacctcaagtgatctgcccaccttgggctctcaaaatgctgggattataggcatgagccatcgtgcccagccaggacctgtgattctaatctctcctttttagttcaggccatgttagctcctaactgtgtatgctttggtagcctcctaactagcctccctgcctctgggcttttcccagttacaatccagtttgtacatcctcctaaaaattctggcccatgaatctttagcaactcccagtttcctaccagcaagatgtacaagtatagtatttactggtgtgactcccaaaatctgactcccaactgcttgtatatctttgggtcctgctatttgtcttcactcatccagcctccctagtgttctacacactcatgccccagcttcagcctttcattccccacccagcctctgctagagcacagctttctccctgcctggggtgagaagaaggaaaggacttcagctttcttttttaacaacagctaacaagttttgagtacatatggttcaaaaatcaaatactataaaaagataatctccaatcttccagtctgttccccatccaccccacttatactgccttctctcttggtgtaaccccttttattagttttttgtatatccttccagggtatctatactgctcagcactgcactagtagggactccttgtgcccctttgacgggtctctgtctgggcttctaggctgtccacagcatcctttgaaatctaggcggatctcttggaaggtcagagaacaacttgcattctgcatgcctgcagaattagcgtcatgtagatgctaccaagttttatggctgtatcttcccaagtagtaagtcaagctgcacttgggccttcttgaaccacaactggggtggccgaggagcactgtgccagaatgcagggagcagagacccaaggtagctctgggcagcaaacctatggagggcaccctaggtcagtcctccaaaaccattctacccgcctatagttctgggcctgggtctgtggtgggagggacagacttgaaggttattttttagtttaaagatctcaattggctttattctcgattctagaattgggccagacatcattccataaaatagaataagtgttccaataagccgaggagcagaggctggctttatatacagagaagggctaaagaacgtagaagcacagaacagacagcatattagtcatttcaaagctactcttcttgtaagttggggacagagaggccaacgatagaaaaataactaattagttaacatgaggttatttcagcctaccttttttgtagagaagcaaggactaaagtagaaggaacttcattattatacccacggaagatttaaactggcctctttgggaaattagctgttattctcttctgatctcttacaaggttgggtaacgacttagtctaggtttggtgacatggaactttagcatgggtgactccattttgatttttagtctggtccattgggacatagtacaagaacttagtccaaaacaatggcctcctgtaatttttatttgacagttttcccttttggtcaggttgttatgtaggtgagagtgtaaccaaaacttaggtcatcagtactatcagttgccatcattctgagtttctagtctcagcatgtgtttatagcttattgtgtcctccccattattataagtttgtttgagtttttgttgttccagctaaagacataccatttgatgcttgacagatggctctctggaaacatttaaaactttttgagaagatacagtacaccagggagactactgttgtgattagcaggtggaaaacatgaagagtttggagctttctccttagccaggattcccatgagccaaaccaactaaaatcaaataactagatgaggagtctacatgttttaacaaagtaatctgctctacaatacccaatgtatttatgtgcaacaagaaatatcagttgcacagatggatccctgtttaattaattgatatctagcctcccatgactatcttaaattaaagcagaggtcaggtgcagtggctcacgcctgtaatcccaacactttgggagtctgagggaggtgaattgctgaggtcacgagtttttgagaccagcctaaccaacatggtgaaactccatctctattaaaatacaaaatttagctgggcgtggtggtaggcacctgtaatcccagctactagagaggctgaggcaggagaattgcttgaacccaggaggcagaggttgcagtgagccgagattgtgccactgtactccaggctgggcgacagagcgagactcgtctcaaaaaaaaaaaaaaaaaaaaggaaagaaagaaagataaattgcacagattgctccttgtttagttggtaatctagtatcccatgactatcttaaattaaagcagaggccaggcatggtgactcacgcttgtaatcccagcactttgggaggccaaggtgggtggatcatttgaggtcaggagtttgagaccagcctggccaaaatggtgaaaccctgactctcctaaaaatagaaaaattagctgggtgtggtggtacgtgcctataatcccagctacttgtgaggctgagacagggttattgcttgaacccgggaggcagaggttgcagtgagccgagatcacaccaccgcactctagcctgggcaatgggagtgaaactccatctctaagtaaataaataaataaaagccggcagtcccaaattacttctaggaattactgattgtgaaactgtatagcattatctagtcaagggaaagaagtaggcataaataaggaataattaagaggagtaagagtcttcttatgatggggagtcttattccaatggtcttgggaaaagttgtccccagcatgaagtcaacaacttctcatcctgatttgcagtttgattgtctctggtgtgacatcaggcattctggtgaattctctatgtggcacatgtatcaggtatgagatatctcccttgaaatttacatcgagttgtccagcttttgcttatagggcttgagaaacagccgtttttgttatttgagagtcttagccagatattagagaaaactagaagaattcagaatccagtctagtctactagtgaaaaaaggagaaaaagaaaaaagaaaagcaaaaacaatgagccaggctacaatctaataacaaggccactataactttttttaacgtaatttttttctctacattcaccctcatttctacaaaagataatcacagaccaatttgcctgattatttataaaagtgcagcaagaataactacatagccgtcttttaaatttgctttgctgcaaactttgacaaggaatctcagattagaattttagaaacctctcaatgttaggaagccaaatgaaggcacacatcagactttgcctgctgtatctagtaccttgaggttcatgggcctgccaggaagtgacaacctttactcattcactataaagctgagaatccttgaagctaggcattcttgtttttttgagatggtgtcttactctgtcacccaggctagagggcagtgacgcagtcttggcccgctgcaacctccgcctcctgggttcaagcaattgtcctgcctcagcctcctgagtagttggtattacaggctcatgccaccacactcggccaatttattgtatttttagtagagacagggtttcaccatgttggccaggctggtcttgaactcctgacctcagatgatccacccgccttggcctccaaagtgctgggattacaggcgtgagccaccatgcccaggtgaagctaggcattctaagaacattttcaaatatggtattcctgtcagagccttgataatataaccactgtttccaattgtatcctgttaaagagaacagattctttgttgaacttatgcagacaaccaaattgccgtaaaaataacagtactaacaaatagtttccaaattctggagatatcatcaggtagaaagaaaaagcaaatgtttctgtttttattcataaaagtatgctttaccaaattgctgtaagctatagatagcttttaaaaaaagaagtttccttaaatctgtaaaacaaaatattaaaaaaaacagcaatgtttcaaataaagaagccatgaaaacccatagtttttatttatcagttcaatcagtctcatgtaattaattcgtgctctgtttgatcttggttagcagttttacaaacccatcaaatttgtcaaccaaaaagtatctgagacaagtcttaatcaatttaggagtttattttgccaaggttaaagacatgccacagcatcaggaggtcctgagatgtgccgaaggtggttgaattacagctgattttatgcattttagggggacagaagttacaggcagacatcaatgaatacacgtaagatgtatattggttcagtacagaaaagcaggacagcttgaaggtggggggtgggaaggacttccagctcataggtggagtcgattttctgattggtaattggttaagttattgtctgaagacctggaatcaatagaaaggaatttctgggttgaaataaggggttgtggaggccaaggttctgacacagatgaaacctccagctagcaggcttcacagagaatagatggtaaatatttcttatcagacttaaaaaggtgccagactcttaatctctcctggatcaggaaaagacctggaaagggaaggggattctccacagaatgtagatttatgagacaactttgcagggccatttttaaatacatcaaagaaatatatttcagagtaaaatacttcaatttatttcaatgtctgctgtcatgtgatgtatcttattggtacaaagagtctgtttggtcagtcttaagatctctgttttaatgttcatgctggtcagttgtgcctgaattctagaaggagggtgtaatgaggcattctgaccccacccccattcccatcatggcctaaactagtttttcaggtttactttggaaagcccttggcctattgaatgggtgtccattcaattggctggagggcttagaattttatttttggtttacagtttcttcattaaacttttggaaattttgtccaatggtataaactaaaagttatgtcagagtttgttttttttgtttgttttttgagacagagtctcactctgttgcccagactggagtgcagttgcacgatcttggctcactgcaacctctgcctcctgggttcaagcaattctccttcctcagcctcctgagtagctgggattacaggcacgcaaccccacacccggctaatttttgtatttttggtagaaacagggtttcgccttgttggccagcctggtctcgactcctaacctcaagtgatccgctcgcctctgcctcccaaagtgctgggattacaggcgtgagccactgcacccggccttcttttcattcttctgatatagctttttggagacacagcactttaggattataattgcttgcagaaagctttcataaaaggcattagaaccaaaacaattaactgtggacaacatgacttaaaatggccatggttaaaacctgatgagagttcattaaaataatgatgaaattgacaaggaaatttggttatttttcaaccaaaattatgactgatagcatttataccaatacataccagatttataggaactttttttatcacagggtgggtgggaagcctgattttaggggctttcctagaaattttttttagcagtcctttttccaatgtcctggttatttgcacaagtggtggtacttcctattcgcctacgcaattcttcgatccattcccaacaaactaggaggcgttctagccctcctactagtgaatttttggaaactgctgttttagggattgcttatttggggaagcaccctaggacaggcccaaatgtcattctaggttgctggttgtcatggagctgaaatacttggggaatggcttttcaaactgtaatttgcagtcttttgggttttgcctgacccataagtagatcggacgggacttgttgggtacttgatagaattctcaggagactatcattctgcctctttcatccatgtggggctccctagagtacaccaacacatatactagttggtacagatcaagtatactggggttataaattaccagtaaggccaagcacggtggctcatgcctataattcccgcactttaggaggccgaggtgggtggatcacctgaggtcaggagtttgagaaccagcctggccaacatggtaaaaccacgtctctactaaaactacaaaaaaattagcctggcgtggtggtgggtgcctgtaatcccagctacttgggaggctgaggcaggagaatagcttgaacccaggagacgaaggttgtggtgagccaagattgcgcccttgcactccagcctgggcaacaagagtgaaactccgtctaaaaaaaataaaaatttttaaataataagttactagtaagaccctgaattcttcagaaaacttgtgaaatttttctctaggtttaggaaaatcttgaactgtggccctgaagtccatttttgtccagggagtgcaagtcgcttggggattatctcctgatttttcagacgattctcttataaggaaactgtttaactgcttttttcagggaagaaaggcaattcagacaaagcagactgaatatttagtagtagattgtaaatattcaggcaaagaaagagagagagaggcagtaggagttacatcagttttaccatccttggtaagggaatatcttccatttccagcttttcattagctctttacagtgaatctttttaaaaggtgattttagaggactgtctctttgaggcttctgaatgccaataagaattttgttctctctgcataatttgggaggctcggggttcgagtgcacttcttagatgaatagtctttttcatgtggaacattccatgtaatggcatcataattctgaattatcttttgtaagattttgccatttgtaaatatttgtagcttccagaaccagaaaccttatacacaaaaaaggcagactggccagaagggagggtactcagatctttagaaattaaagaaaccattttatgttggatattgggtcttccaaagccaaaatggctttggctttgagatcgccttgaccaacttagctaatgacatttcagtttcttttttgtctgacccagtcagatgcctgaggcctccctcatctaaacatgtaagaaaaaaagaacacacatacctatgaattccaaaagccagagttcatgtccccctccacctcatggtaataaccacttactgtgactgccgttggttacctttactactgcagccctttatggtagccacagagagtgtaacgcacatttccctctggtcatatgctggtcaccaatgggatgcaacccgtatttctgtccagccacattcttcagggcttgacccaagccttttatggcatcatgcatgagatatcaccagagtgggagccgaaacaatgtagtcattgccagtgacttgtcagccactatgaacccagaagtcatgtgccctgccacagtacaaactaaccctaggtaccccaaagtcaaatgtcctctcatagcacaaactaatcttgatacccccaaagccaaagatatcagcgagcttaaatacttaaagagagcagagctcagatctgagggggacttaaccctcagggctacatgaaggagatagtaccccccacccccagaaaagaaggttagcatcaccttttcctgtgttcctcaaggagtctcaggtcagctgtctccaggtccttttgtggtcatctgtcaagagacaaaattacaacaaatgtaaagatctcaattgtctttatttatgattctagacttgggcaacacttgccgcttccacattttcaggtattatagcaacagccacactgccagtacaattttccgtcttactctgttttccaaggctgtaatagaataccagagaatgggtaatttataagcaataaaagtttatttgacttatggttctagagggtgggaaattcaagatcaaagggccaaatctggtgagggtcttcttgctgtgtcataacatggcaaaaggtatcacatggcaaaggagagtgtgagatggagaaaagaaatggagctgaactcacccttttatcaggagctcactccgagattactaacctatttccacaatagctgcataagcctgttcatcagggcacagtcctaatgacctgatcacttcttcagtcacctcttcaaggttccccctgttaatactggcacgatggcaattaaacttccttcttttttatgtatttattttaaaatgacagataacattgtgtatttttgtcatgtacagtatgatgtgttggagtatatatacattgtggaatggttaactagctaattaacaaatgcattacctcacagagttatcatttttgtggtgagagcatatcacattcactctttttacatttttcaagaatatactatatcatcattaactatagtcaccttgctgtacaattaggtctcttgaaatttattgctcttgcctaactgtaagtatgtatcttttgactaacatttccccaacctccttctccctagccaccccagcctttggtaaccaccattatactctctatttctgtgagaccaccttttttagattccatatgtaagtgtgatcatgcattatttatctctctgtgcctgccttatttcacctagcataatgttctctaggttcatccatgtagttgaaatgacaggatgtcctcctttttatggttgaatagtatttcattgtttatgtatgtatgtgtatgtgtaacacatatttgtgtgtgtaacacatacacacatatatatatacacacacatccacagttttgtttttttttttctgagacggagtctcactctgtcgcccaggctggagtgcagtggcgtgatctcggttcactgcaagctccgcctcccgggttcacgccattctcctgcctcagccttctgagtagctgggactacaggcaccagccaccatgcctggctaatatttttgtatttttagtggagacagagtttcactgtgttagccaggatggtctcgatctcctgacctcgtgatgcgcccaccttggcctcccaaagtgctgggattacaggcgtgagccaccacgcccagcccacattttttttaattcattcatctgttggtaaacacccaaattgattccataccttggctattgtgaataaggctgctataaacgttggagtgcagatacctctttgacatactgattttatttcctttggacacataaccagtagtgggattgctggatcatatggtagttccatttttaattttaaaagaattattgaggcctggcacagtggctcatgcctgtaatcccagcactttgagaggccgaggtaggcggatcatttgaggtcagaagtttgagaccagcctggccaagatggttaaaccccatctctactggaaatacaaaattagctgggcatggtggcacatgcctgtaatcccagctgctcggaaggctgaggcaagagaatcgcttgaacccaggagatagaggttgcagtaagccgagatcatgccactgtactctagcctggatgaaagagtgagactctgtctccaaacaaacaaacaaacaaacaaatatacatacggtttttggaggggttggggcaggcacagaggctcatgcctgtaattccagcacttgggaggttgaggcatgtggatcacttgagttcagtagtttgagaccagcctgggcagcatggtgaaactctgtctctataaaaaaaaaaaatacaaaaattagctaggcatgatggcctgcatgtgtagtcacagctacttgggaggctgaggtaggaggctggcttgaacccagtaggtggaggttgcagtgagccgagatcatgccactgcattccagccagatcagtggtgaattctgatattttagtgcacctgtcacccgggtagtgtactacacaagtgtgtacttatacccagtgtacccaatgtagtttttttttccctcacccctctcccagcctccatcttcttaatctccagagtccattatgtcactctgtatgttttggtgtcctcatagcttagctcccacttataagtgagaacatatggtatttgattttccattcctgagttacttcacttagaataatggcctccagctccatccaggttgctgcagaagacactatttcattcctttttatggctgagtagtattccatggtgtatagataccacattttctttattcactcattgatcagtggacacttaggttgtgaattctccagctcatattttcagttttttgaggactcttcattttgttttccataatacctgtactaatttacattccaccaatagtgtataagggttctgctttctccacatcctcaccaacacttgttattgtttgtctttttgataatagcctctctcagtggggtgagctagtatctcactgtggttttgatttgcatttccctgattagtgatgttgagaattttttcatatacctgttggccatttgtatgtcttcttttgagaagtgtctattcaggtcatttcaatggctgttaaatttcaacatgagttttggaggggacattcaaaccacagcatcaaactttaatctctcttagatctattaatattttttcctctcaatcagggcactcactccccaggttgccttagatgttgttttcctattactttaatgtatttacatttgaaatccccagtcctcaatacagttggagatccaggcatgtagcaaaaaaaatggtatttcttggagacttgagaagaacacagataagactagcaaaggaactgttgaataccatcagtgccaccagattcacccactagatgcttctttttaataaacttaaaacatttgtagtaagaaaattctattagtatttatttcctgcattttaatctcttcaaggactatgttttatttgtctcagtctcttcagataataatgttggtggttaaaaaaccgaaagcattagtttgtatttttaaaatataaaattaaaacacttgatgaatatgtagcttgagcagtctgtcaaagccatgactctgagaaccaaacccaattctaaaaatgtttatctgatattatcacaatatattttaaaactggagccatctgccttccaaagtttatctccgctgcacctgcgctcaaaaatacttctgcctacacacaggaactattgtttaaagattttgctgttgattcagcatggaggctctccaggaattattcacactttaaaatttattttaaaaaataattactgcgtactataaaaaacaaaacagaaaaccccccaaattctacaaagacatgcaggaaaattatcttttcccacctctatctgtagtccctcttaccagaaataaccgctattacaagtttcttgtggatctgtccaaggatagtctctgaatacacacatgcatgtgtgatacacatgcacacacgcaaagcctcctttttccacacatatggcaacatattgtatatgcttttctacacctgttttgttttcattttacttaatgtatctaaggagagttttttggtatcagtatatctgcactattcttttggctcatactattacattatgtgaatgtttcatcatttaaccagtttcttactgatgaataggtttgcaatctttctactataaacagtaccactaagaacatccctttatgtctgtctttgtgcatgagtgcacttctataggacaaacttctagaattggaattatggggtcagaatggtagtgtgtttttaattttatttgttattgttcagtggccctacaaagaattaccagtttgcattttattagtgtataaaagtgcagttttctaacacccttgccaacagttttatcagatcttttgccaatctgatagttgaaaaatgacgttttactgtggttttaacttgccttgctcttgttacgatccagcatcattttgtccaggaaagaacactagctcaggactgccaggcagacagatttggaccccacttgttggccatcattgtcatctgtatttttttattttttatttttttctttggagacagcatctcgctttgttgccaataggcgctggagtccagtggtgagatcatggctcaatgcagccttgatctccgaggctcaagtgatcctcctacctcagcctcccaagttactgggactaacaggcacatgccaccacacccagctaatttttattttttgtagagtcagagtctcactgtgttggtcaggctggtctcaaactcctgggctcaagtgatactcccttagccaccccacccagccttaaattatatgtttatctaacaaatccattcctttttccctcacccatctcatttttttttcctagtttgccactacatcttttaaatatttcctgtctattccttttgtcagtgcttctcaacagccagagacattaacatttggagttctgtctgtctgggcaggttatttcacaaaaggttctctatgaattattggcttatttccttgattgtacctgaaaattatttccactcaacaacccagtagactgccaactctgtaacgatgtcttttcactgctattactccagcccctagaatagtacctgacacacaatagtcatgcaataactttcttttttctttagtatataaatattttttattatatacaataacataaactatgcataacataaaatttaccattttagctagccatttttaagtgtacagttcagtggcattaaatgcatttacatttcaataattttcttttgaataaacaaatgaacagtgatactggttatttgtacttgaaagttaccaagagccagatggtaacattgcccttctttcctgcagacgaagttatacggaagcgtctcctcattgatggagatggtgctggagatgatcggagaattaatctgctagtgaagagtttcattaaatggtgcaactctgggtcccaggaagaggggtatttcattttcactgttgtttccataccagtgtcctaatgtgattttaggccctatattaaggtcctgtgagtagatcaaattttcactcaccttaaatgtacagtggagtcaactcttaattaaccaagagtagattttcttggccttttcttctcttcaaaggcctctcatatgtttattaaaacatggagaaggcagattggtaaggagaaatgaagattaaattcagactcattagtttggttacttttaggacataagtgtttagtaagataaaatatctaaatggaattttctcctttgctaataaaaggctgctgctatgtatgtatatattaagttggtgcaaaattaatcgtgatttctgccattaactttaatggcagaaatggcagaaaccacgattacttttgtaccaacctgatacacacgcacacacgtatatctaatctttttttttgtgagacagagtctcattctgttgttcaggctggagtgcaatggcacaatcttggctcactgcaacctccgccccccaggttcaagcagtactcgtgcctcaacctcctgagtagctgggattataggcatgcaacaccatgactgactaatttttgtattttagtagagatggggtttcaccatgttggccaggctggtgtcaaacttctagcattaagtgatctgcccaccttggcttcccaaaattccagaattacaggcatgagctaccacgcctaactatatttatttattttttaacatagcaaactttttctcatttgaatttgctttccatataaataattttatagagtgaaaaaattgtgggaacagaattgtgaagttaaaaaaacatcttaaagtatttctaaagtcttttaaacaaaattcaaataattgtttgaataaaatgtgcattgataagaacaacaatcccacctttgcatttgtaactaaagtagttaaattcaagaatactacatttgataaaaagaaaacttaagggacagatattctaaattttaaataagcaaatgattctctcagaacttgctataatttaattagcaaatatttgtctgcattataacagttcacttttgtcagtccacaaatatctttattttggttttctttctttttcattagatatagccagtaccaacgtatgctgagcacgctgtctcaatgtgaattttcaatgggcaaaactttactagtatatgatatgaatctcagagaaatggaaaattatgaaaaaatttacaaggaaataggtaaagaatcttaatgtttctatctgtaattttattttttatggtctaaaggaaacaatacctgctaacaattttctttggtggtaaaagaataataacaattactgtattaatggaaagaatacagtaaatgttagctataaaaaatgtgtattctaagatgatatagtactttgggttacagctattttttaaaaatactagtgtctattttgttaccaatagaggttaatttataaatgcgttttaaaattaaaaatggattattgattttgttacaactatcttttaaaaaaccttctcatatagaatgtagcatagctggagcacatgaaaaaattgctgagtgcaaaaagcaaattcttcaagcaaaacgaatacgaaaaaatcgccaaggtaagggttttgagggatttaatgtgcaaatacattattactgactacagttttcatgcagtttttaatgttgtgaggtaaaatctgcagcctgaatcaacctggattaaaaaaaatccaaattttaattccttaaaactatattattctttaaaatagagaaggaagtctgtgttgagaagaatgtttttgctggattacattgattatccaagtatttcttttctgtttttctctttttttttcttatcccagtatttcttaagtattaaatttttaccatcttggacccttttgcctaaataatgttatggttaatcagcagaggcaatttacataaatatactagatttatggtttgggttttttgtttgtttgtttaatagagctactttccaaaaaatgaaatggaaaagaatttaaactctgagttttcattaagtacaaagcaagcaaacatttctagactgcctagaatatctaataagaaggttaaagttgagttttgttataatctcttgtttttaagttagagtatacccttatgtagttcctaaatactatttcaagataatttttaatgttagaggcactgctcttcttataatgtaaattgaagaaaagtaaaaataaaaaatataatgtgtaatcacaactgttacattgatatgaaaaactagaagaaaatagaaaatgttaatggttattttgaagttgtgggtttttatggcttaggttcttttctctgtttttgtgttgttttgttttgttttacatagggcatgtattattttgtaattcaaaaaatttgtatccaaaagaatcatactttgaattaatatgctcagttctaaaacaatgaattttcactttttaatgaactaattaagatgaagcttaatttcctctttttacaagttttttttttcagtttaaaatgtgtatggtgaagttttggtgccttatttacagtaacatataccaacttagtatcagttctaaagtcatctaaaaatattttgcagtgttttcgttggttaatgaggcttttaagtaaatcctgccactcatcacttcataagaaagcttaacaggagttacatgacttatcttggaggtctcagtggagcagaaaatagaacctgaattttaagttatttgcaagtttctgaaatcttaacttttggaatgagtgagaagtgtaatttgctgttgactaacaactcagattaatggtaggatatattcactgattgtattttattttattttactttttggacaactagtgagtaagatccttctcagaatcagtctatttgataatcaataataacttaaatttgcttatgcttatgctgacctcttacgttctgtccaggacatataaatggaaaaaaagtgggagctaaaacccctgtttggaacacttttgatgttatgtatcgttataattataactcagttaactaaaactggcaatactcatctttcagtgatttcatttcttgatgtactaggaaagtgattaggagaggtttgtgatattacacattttgttttgataattcacattcaaaaaatccttagtttgataaatatttttatgtcttacagaatatgatgctttggcaaaagtgattcagcaccatccagacaggcatgagacattaaagtaagtgtagagctttactttgaaaggaactaacctttatacataaatgctcgaaaactaccgtaggcatttcatttttgcagaaataaatatgtttcaaaaggaggggtcagatattcaatattatattttcccatacttctctgttagattttattttcctctaaccttaccagctatatgtctaaaataaatgcatataatatgcatcaatatcacaatggataaatagaatatggtcttcatatattaaaatattgaatttcagttaaaaagaataaactagttatgcccttttaaaacacagctctcaaaacataatcagtgaaaagacacataataaactttaaattatatttaaattcctgaaacacatacagaataataaccatttataaaagttagaaccccctttcaaatattatataccaatactgtgtattattcagggatacaagtatatgcataaaaaagaataagaatgatatagtagttgcctgagtgggaggtagaggagataaaaaggcccaggatagaggactaggcgtaagattcaaagggtatttcgagttaattggcaatgttttatttcttttaccaaaataaaaaaccctcgaagttaaacttcacaatatgtatcatttcttgggtcttgttattctgttatctgtatttttctgtactttaaaaatggatccaaaaatgtaattttaatgaaagtgagtccatatttagaagttaagaagaaatcatcctcagctttaaaagtttcaccataatggagtgttataactccttataagccctttttttattttaaaaatcctatctagtaacttaaaagttaggcattaattgtaaactcttctcccccattcagcaaaatgtaacactgttttattatttccagggaactagaggctctgggaaaagaattagagcatctttcacacattaaagaaagtgttgaagataaggtattcgcatatatatttagccttcatgatctgtctatctgtctgtctatatatctatatatacaggtcatttgtataaatttttttcttgttaacacagctggaattgagacggaaacagtttcatgttcttcttagtaccatccatgaacttcagcaaacattggaaagtaagtagaaatagtctcaaagtaaatgcttatgaagattttttaaatgacccagggatgtaccttttgaaatatacatcttggagagacagtataccttcaatttctgaacagtgtagctggatgacgttagaaggtactcatgttcaactttcttgaatacatgtagaaaagtcttaatttgtagtaatataggatttaaacatatacatagtggtttaaattaagaaaaattcaaggatgatagatttggaatctttcttggttcactgtagttgactactataatataacaactcaggacccaggcaggcaataataagaaatcagtacatacgaacatttgcatacccactgagtagtgggtgctttggggaactggagacttgctctttatattcactataggcaagtggaaatttttgtgttacctgatcttctgattgttttaaagaatagcctaagacccattttttcttttcttttttttttttttaagacagtcttgctctgtcacccaggctggagtgcagtggcacaatcttggctcactgcaatcctcaccttgcaggctcaagtgattctcctgcctcagcctccctagtagctggaattacaggtgcatgccaccacacccagctaattttagtatttttagtagagacggggttttaccatgtaggccaggctggtcttgaattcctgacctcaggtgatccacctgccttggcctcccaaagtgctgggattataggcatgagccaccagaccctgcctggatttttttttttttaagtgaagtctatcacataaattttaaagtttgattcaactagtagccatcttagctttaattgtattggctaataaaggataaacatgttttcatgtgttcatcgaatataaaatataggcaaacttgactaaggttttatgtttccttctcaattacagatgatgaaaaactctcagaggtagaagaagctcaggaagcaagcatggaaacagatcctaagccatagacaggctaattgcccaccactcccaggaatattgaaatagctacatgaccataatgtgtttaaaatgtggtatgctcttgagatatttaaagttttggcagtaaaatactctgtttttaagtatgaatgtatttcattcatatttcctctcacaaaggaaaatgacttcagtatagatttgtttttattaaaatgcattttttattcttaagtggtaggaagcaacatccaaaaatgcttaataaaatgcttttaagctgc

SEQ ID NO: 316 - DNA, 32744 bp, Homo sapiens
  source 1..32744: mol_type = other DNA
acgtcatcgccgcggggcggaggcgacagtgtctagcgggagctccgcgtgtagctacgccggccgcctggctttgagacaacgtgattctccgcagctggtcgcctacccgtgatgttctgcccacgtcgagacctgagctgaaatggcagacgatctcggagacgagtggtgggagaaccagccgactggagcaggcagcagcccaggtacccactctgtgcccgcgctcctacggggcctctcccggagcccttccgtgcgcctcagccctggtcgcttctggcgatcgcggtgtttgcccagcaggggtgtgcaccgccttgggagcgcgcaagcatctcggggaaaatggtgcaagagattctttaacacgtgaaacagacagctgtgacattaactcagatctgtctgccagccaggaaggatcctttccacaagctttctcttttccttatttcttgagaatggataagacagtttttgtgaagagaggcaactttgtatgatggttaagggtgacccatgaactgctttcaattcagactgaggtcagaagcaggggttgctgcttcagactccctccattcaaatcacgactccagtattctgatactgtttagcctccttttcctcatctgtaaaataatgataacaataatgtccatttcgtaaagttgtgaagattaagtgaagttagtacagtaatgcactttagcatagtgcttgacatataatgtgtggtaaatataagttactgtatttcttgtggtcatcatcattatcatggaatttggaatagtagaactggaaggaggcttaaatagagatcatcctttgaactcacttattttacagatgagaaacataacctaaagatgtcaagtaacttgacaagttcacaaagctagctcctttcagaaacaatactagaattcagttaacacaatttgaatagtttctactatgctctgctgtgtttaccaactcctgatgcagtgggcatttcatccccaagtagagtagcgttaagtgaccccccatgtcaggctagccttgaactttttaagttccatcacacctaccatgcaattattggttggttggtttttatcactcctcaaggtctgcctcttttctctacaagagaagacagggccaaagtcagattcatacttctgtcatccacagggccctgcacatgttagacacttgatacctatttgctgcaaacaatcttgaaatactagttgtgaaatatccattaaaaataaccaacttcatttgttgcattgtttccggaaggtcaagccttcaggtacaaactaagcagatgtcatttttagaaaggtagccaatacaacatttccttgattaaacttcctgactcttttgcagccctgtggtgttccacatttactttaataactacccctcccaactcaggtgttaaaaagctctattttatgatatgattgaagatgaacagaggccatttaagaaatagttgaattctgtttgagtggtgaaggggatcccaattcttggttctagtcctcactagctgtgtgactttcaagttattcatccgttggaagaaaggcagtcaacatgtattgagtatctattatgtgacaaatgtcttcataaatatgaattgatttaactttcataacatcccgaaaaggtaagtattctcttcatttgtataggtgaagaaacagaaaaaagttaagtcgtgttcttaggaacacacattgaagaagaggtctgggaagagtttagtcaagtgtgattgattttgaaagtcacgcttttcccgctactactttgtgacttctctgggcctttgtatcataatctgtaaagagcccttaaagatcatcttttttagggttttaccaaccaacagttttttttttctttttttttttttttgacacggagtctccctctgtcgcccaggctggagtgcagtggcacgatctcggctcactgcaacctctgcctcctgggttcaagcgattctcctgcctcagcctcccaagtaactgggattacaggtgcccgccaccacacccagctaatttttgtatttttagtagagacggggtttcaccatgttggccaggctggtcttgatctcttgacctcgtgatctgcccacctcggcctcccaaagtgctgggattacaggcgtgagccaccgtgcctggcccccaacagttttaaacactgaatctagtaaaactttaaatcgctacagcctccttcatctaagttgccagaattctcatgaagacagtgtgttggagtgcctaagattgctctacttcttacattccttctagccataagactaaccctttttttttttttgagacgaagtctcactcttgtcccccagtctggagtacagtggtgcgatctcagttcactgcaacctccacctcctgggttcaagcgattctcctgcctcagcctcccgagtagttgggattacaggagcctgccaccacccccagctaatttttgtatttttagtagagatggggtttcaccatgttggccaggctggtcttgagctcctgacctgaagtgatctgctcgccttggcctcccaaagtgctgggattacaggtgtgaatcaccgcacccggccaagactaagctttgaaaattgctggcattaaatttatcagaggcctttgctttgttcgctgctcttaagcaaagtaagtatatgcctttatttgaaatatccttgattattcactggcaatttgcctaattgtaatctgtacagcgtttctaattcaaaagaaatcacagctgaaccacagatttcctgattcttcttttgttgatgggatctagccttgatcctagagcacaaggcttacttacctggctgccttcttgaagtctttacttaagttatttgatagggatgtcaaatgtattcaattgttgtttcagcctaaagtatgtgaattatgttttgttttgaaagttgaaggagaaataatatgttaaatcagagaaaggaaagatagttgtattggtgcttttattcctgttgtggattatgctacctgcctataaaaataaacatttttgctataatctgttcccacttgacatccatggtagcaaggcagtggaagatttcagtcacttacaaatacttgttggttgtacatggtttataacatctatctaatgtgcctatctgtttgttgtctgtctaaggaactgtactattttttggctgttatcatgtcttcttagatgtggtatgtaacaaagttttcatggctctttaaaacctgtcatttttgtgctagagttctacattgcactggagctcaacatgggacctggcacttaattggtgtttggtggatgttggcagaataaatatatgtgtgtatgcgtgttacctgctacagagtatgtaggcagacatataatttctcatccaatctagacacttttgtgagtggaaggctatgcaattagaattttgcagggactctcctggtccttaagggatgtctagtcactccattggtggcaattggagtcatggcccaacataagacagctgggagttacagtgctgagtgtgcagcccaggatgccttaggcataagaccccaggaatcatctaatggcatctaatatttgatttatttccttattccctgtaaaccttcagcaactgtttgaagtgacttatagtaagtaatacattcagtagaataatgatgtgaaaatattaatgctgaaatgagcaaacacaatgcctgagattttaatgtagttgaccggtctgggtactttctcagtgtgaagctgaaaactgagagaatgtcaatcacagcatggatttcgtgacttaaggaagagagccaagggattctgcagttgaaaatgtcacttgagggcctgtaatcccagcactttgggaggccaaggtgggcagatcacctgagtccaggagtttgagaccagcctggccaacatggagaaaacctgtctctactaaaaagacaaaaattagccaggtgtggtagcaggcacttgtagtcccagctactcaggaggctgaggcaggagtattgcttgaacccaggaggtggagcttgcgacgagccaagatcgcaccactgcactccagcctgtgctacagactgagactctgtctcaaaaaaaagaaaaaagaaaatgttacttgatcatttactcactgaagatgaagagaatactaattgctttccctttttatttcaatgacatacctattaaattaccaagtcgagtacccagtaggcagctaagtatgtgagtctggagccccagggccagatccaggctgagatacagatttaggaataactggcatacagataggttatttttaaagagcatgttcttagcagtctgtaacattgagcctccatgtcttttaaggagggtctttcatatgcctccccaactcattctgaatctttgatgacatctcttcccaagcacctaactagaaaactgaagtgttaagacactgctatgtacagtgccaggagactgcaggtaataataccagcttgcggccaggcgcagtggctcacgcctgtagtccctacactttgggaggctgaggcaggtggatcacctgaggtcaggagtttgagaacagcctggccaatgtgatgaaaccctgtctctactaaaactacaaaaaattagctgggcgtggtggcacgcacctgtaatcccagctactcaggagactgaggcaggagaattgcttgaacccaggaggcgggggttgcagtgagccgaggtcgtgccactgcactccagcctgggcaataagaacaaaactccatctcaaaataataatgataataataataatagtaataataccagcttgcatttgttgagcacttaactacctgccagatgctgttttgattgctttacatgttctagttaatttaatcttcccaagtacaccagcggtagttactgttgttatctttattttactgatgaggaagttgagacactgagaaattaagtgatttacttaatactatttaatttaattcacccaatactatctatttaattggtaaataggggagctgtgattcatatgcaggcagtctgaaaccagagcctgtgtgcttatatttcgcattctcattatcagtggtaagaatctcatctctaaaggaataatctgttatcggcttaaagagactcataatttagaaagtcttttgtttatatatcattatgaaattgtgtctattagttttccaaagtttactcttttaaagaacactggttacttggagctacaaataagcagcttttccatttgggctttgagaaccatttctgccagtaactcaaacctgatcctggagctcaaagcttaacatatgtggctgccttctttaaatctttacttagttatttaatagggatgtcaaatgtaaacaagacccagctactgaattattctccaaacctgctttttctccaaactttcctgtctccataaattaaaccaccaactacccaatttcacaaaggcctagcagtattctgatttatttatttttttcacccctatatctcatccatcaagtcctgttgtcactacctcgaaaacatatcctgattctttctttgcatttttcttcgctctgcctccattggagtatacattttcatccttactgccataagcttctaacagggctcagagtttccaccttgtccctcactcaccagctagaggccttttgaaaagaagtcaggccactttcctgcttaaatcttccaatagctttttccctggcacatagaatgaaattcagattacttaccatggctggtggccaccaggtcttctactatttactcccctatagtttatgctgccccacccacaccagccttcattctgttcctcagtaggccacactcattctgtcttacttagccgtttgtgttagctgttcttttcctttctgtcctgtccttctgattggctggctttctttctttctttttttttttttttgagctggagtctcgccctgtcacccaggctagagtgcagtggtgcgatctcagctcactgcatcctccacctcctgagttcaaatgattctcctgtctcagccttctgagtagctgggattacaggcgcctgccaccacacccagctaacttttgtatatttagcagagacgggatttcaccatgttgaccaggctgatctcgaactcctgagctcttgatccgcccgcctcagcctcccaaaacactgggattacaggcatgagccaccaggcccggccagctggctctgtcttaacattaagtactcagttcaaacgtcacctactcagagtggcgcttcctgatcaggcagtctagagtaactatctaggtgctctattacattatcacaatatctattaaattattatgttattataattctcagcagagcacttagcaccaactattatttttccttgttaaattaattactttttcccagcagtagactgtaagagctccatgtgagcaggtattttgtttgtcttgtttgctttagtttcagggcctagagtagtatctggatacagcgaaggcactcattaagtatttgttagttaaccaattaattattaatatttcgtagtcacaccttgaagacctcaacctaggagatctttatcaaaagaaccttgatctgctggcagatttgtcaaactcctgtccaggcttttgacagatttggcaaatgccgcttttctcttttcaaaattacattagtagtccttgtaaaactgtgtctaacattttattgtaaccatatttggatttaattttataaattacgtttggaaagaggacaagagactctttgtaaataagcctgtaatttttactggtgacagcttttgtcacctagaatcaatgtgcttattctttttgagattgctgaaatgagctttgtaaatatttttgttgtaatatcattttatggtatattcttcaaattatattgctttatccatggtgaattccttctggaaatggagtaggggagcaccttggatcttttctttaaacccaagtacccaggtttttttgttctgtgttttttctattttcacaccaaagttaaacctttacagtattagttttacatatagacagtcttgcattgtagatgttgtaaggcattgtctctacatataaaattcagacttggaatatttgtaggagatgttaataacacacaacagaggatcgacttctgggcatgttgttttcataatcattcgtcaagctctcatgcttagccttgttttagacactgtaccagaattagagggaaaaaacataatcagcttacattacaggatttacacattgatgtggttcagtcaaaatgcaaatagtattgacagatattcaggggcaaaacacaggggcaggatgaatttaaaaagcaaggggaaggaaagaagaaagaggagggagaaaaatgactatgttattagtcattgctctacacttgaaggctgtaacagatggacacttagataaccttcatggtctggtttaatttactgcatataatttccacagttctttcagatgattaaatgagtggttcttgacaacaattacgaacatttaaaggtggaaatttatgcatatttccctaaattgcatgtcaggtagttcctgctataattttgctaaatgtccatgaatctcttgaaaaatacaactcataaatgtggaaggcctatacataacttccatttcctccctcagattcaataataatatatcattttgtggcacaaatctttttttctttttttctttttctttttttttttttttttttgagacagagttttgctcttgtcccccaggctggagtgcagtggcgcaatcttggcacactgcaacctccgcctcctgagttgaagcgattctcctgcctcagcctcctaagtagctgggactacaggtgcatgccaccatgcctggctaattttttgtatttttagtagaggggggtttcaccacgttaggcaggatggtcttgatctcctgtcctcatgatccgcctgcctccgcctcccaaagtgctaggatttacaggtgtgagccacggagcccggcccagcacaagtcttttatctgttgttaatctgatgttatttagtggaacacttcagatgcattcatagaattatacattttactaaatatatcacagcttgaaatatagtttccccatttttatcagctttcatagaattcttaattgatttttaaatggctaatattgcttataaaaagtagttgatcaagctcttaaattcctatttctgagttccttgttctagttcacactagaccagaggtcagcaaacttttttcatataaatccagataataaatattttaggttgtgtgggtccagtcatcaccgtcataactgctgttgcagtgtaaaagcagtcatagaaaataaatgtgtaaacgaatgagtatggctgtgttccaataaaattttatttatggacaacaatatttgaattttatgtaattttcacgtcacaaaatagtcttattttgattgtttttcaactttcacagtgggttgaatttggcctgtgaaccgcagtttgcaaacgctgccccaaactcaaagtcacatcgtgaattgtatgtcacgtgtcttcaggagaagaaatttgaaacaaatccagagagaattgtgttttaccttagttactccgttacttagtagttatcagctatgtattagaccagtcacatatctgttaaaatcagatatttgattctaaaatatctcaagattagttcagaaaccttgaaggtaaataaatgaaggaccaggaaaagacttcagcttaaaagtatcaggtttttaacatttttgttacaaattggatttgttttcactcacttggatttttatctgcttactttgaaacagttcatcaggtgaaatcactctagaattattaggtcagcttcttttattttcatttttcttcagaggccacacttctgcggaaacaacatgcccaggaggaaagatgctttatatttcagttgtgttacatataggtcagacattactgttttgaactccaaatagtattctcactttatagttgtatttgcatttttattatattattaatacatattgcttgaaacaagcatggtttttggttgtcaatccttttgttaaaatataactttatttattgttattattttgagacagagtctcactctgtcaccaaggctatagtgcagtggcatgatcttggcctactgcaccctctgcctcccagactcaagcgattctcgtgcctcagcctcctgagtagctgggattacagccatgcaccaccaagcccagctaatttttgtgtttttaatagagatggaatttcgccatgttgaccagactggcctcaaactcctggcctcatgtgatctgcccgccttggcctcccaaagtgctgggattacaggtgtgagtcaccgcacccggcaaatgtaactttactttgaagacttttgtcttaatgggattagaactgcattaccatttaaagatgagtttctgctggttcccatagaagtgtcaacatttttctacgcaaattttttctttttttaatttgagacggagttttgctcttactgcccaggctggagtgcaatggcgcaatctcggctcactgcaacctccgcctcccaggttcaagcagattcttctgcctcagcctccggagtagctgggattacaggcatgcgccaccatgcccggctaattttgcatttttagtagagacgaggtttctccacgttggtgaagctggtctcgaactcccaacctcaggtgatccaccgcctcggactcccaaagtgctgggattacaggcgtgagccaccgtgcctggcttctacctaaattttttagtactttgtatactatcttgtccctctttttgtgcttcctcttaaacttatgctagcttggataaaaatgtactttaggaagtctcctgacatgggagaaaacaattttgaaagcttcaacatacaacgtattttgtgcttcatttcagagtaaaatttttcccaaggtattttgtttttctgggactattgttagtgcatgttgtttttcctgttttatgcttcttttcaacctgtttggttttcactaagggattccaatgggttttttttctattagcataattaccaatgttgaatgtcacctgggcataactacttttcctaaccctgtcataccattgctatctcttagcatgttttctcaagtgagaaaatgtcttgactgaatggccttctcttcttcatttactcattctctattcactctagatttatcaaatacctgctctatgtgaggcacaatactaagcactctgtacatacgtgtatttttttttttttgatgttagagcttcatcactgcacccttttttttttttttccccacaaacaaggtcttgctctgtcagtcagtctggagtgcagtggtgtgatcatgctcactgcagcctcggacttctgggctcaaacagtcctcttgcctcttcctcctaattagctaggactacaggtgtgcaccaccacacctggcttttttttttttttttcttttcggagagacaaggtcttgccaagttgcccagactggtcttgagctcctggcctcaagaaatcctctcacctcagcctcccaaagtgctggggttactggcgtgagccaccatgcccagtcttcaccttcttttgtagtccatccccttctactattctcttcctgctttcctttcacttcgacttttccatttcaggcttttaattcacttgacctccccctactgccctctgccacttgcctgctgggactgctgcccatcatccctctcaatgctgcctatcatccctctcaatgctgcccatcatccctctcaatgctgcccatcatccctttcaatgctgcccaggcctctagctccttctcctccttgaaattgcaggggcctgggggtgtttgtacagtggcattagtgcaatgaggtggacttagttagataagtatggggaatgggagttcctttactcttgctctgctggctccaacccagggcagctggctaaagcagtccttaaccatgaggatttcttccagggtcatgcttccagtttttagtgaaggatcacaaaaaatgtttagtgtcgttccattgatttttttcccccctcgattgaagctttttgaaatgttttttgaactgccttttgtgtcaaacatgccttgtcttaaaatgtcctgtattactctgtccacactgaattacaggcacacctttctctcaattcaatgagagagttttcagtgtgatgtaaagaattgctttagctttctgccaggggactgtgtctacccttatagatgactgtttgaattcaacattttgtattaatagttgggcatattcataggttatcagaactggaagggacctgaggaattatttcactttcctgttttacatgtggaaactcaaggcttagattgatgaatgcaaagctcgttgtcacatgaatgaaaatctaggattggaatttgagtctcctaaccccaagcttttgttgaatcaactgattttcgatagtgtttattcagagaagagatatgaataaacaatgtcctgtgagatgataaattctgtattttttcaagcacctggaatattgattcatgtctccctaaaatatctcaatgttactgagactaagtgccagtggtcaggtatgcttactacaccagtgattgtcaggtattctgcacaaaggatatattcggctgttattcacttttgttatgcttttcctcctttaagaattatcactttgctttttccctcctggtcataaagaaatcatagttttagaccttaaagtgtgattttaattgtcctgtcatcttgatggaaataatctgattttcttgactcagattaggaatttttgctatcaccttttcttagcaaaatatgattaatcagcaaagttctgtagaatgaagaattacttctgttttcaccagaaaactcttgaactgttctagtgaattcagtcctatcccaggctgattctagatagttcatctttgggttagattatatgtcggatgaggaaatgggtagatttgggtgtgggtctaggcctgcgagtgtttgtgtgtgcatatacacatatagaagtaaaataattgtagacgtgctgctttttgggggatgatcttcatcaggtccacaaagctgcttcaccatttcctggagagatggtcctttggcctttcatagtggtaattttagctttccacatatttctgtagatgaatgtatccaggcagtgcattggtatgagttaccttctccctcccacgtggaggaaggtgttggaggtgacagttctcacgatgtgtagcttcccacagccattttggtaaataggcttatccataggcactgtgggggctttagtggaaatcttggtgatgcctgtagatttcggtttagggatccgtgctgggattctctgcttgcatacctccttgatcttgaattaaacaagagaacaaaaggtaattaatggtacagttggtggagaagtagaaattgtttaggacatggagtcagtttggaggatttggctttgaaagcaccagtttctggggatgtatcagatcaaagatcgtcaggttgaagaaaagaatgtcagtaaagtaatctggtgtgtgttgaatgtgtgctgtgtgcacagttcttgatagagatagtggtagatacagagatgaatagatatttggcaatcacggtgtagtaggacatatacaagagtagtgtcccaaattaatctcaaagagccatgagattgccagagaaaggttaatttcgaatgagattgtctttaagagtgcttcatgaagaatatggcatttgacttgggccttcagacttttaaaagttttcacagtatgagtgagatgggcagctccaatgatgattagtggaacagcttggtagtatgtatcaagagccttatgaatcttttctaggatgtagagaggcagtcaaggatatttgattttagcattgtttataatgatgaaaaatggacagttaaatgaataggatgtgttaaatgaattatagtataattatgacaacatgctttgttaatgaggccaaagcttcaggaaaacgtttacttagatatgttaaaagtagaatttaaaactgtgtacatgctttaattatttacatgtgaagagaaaaatactaaaagaaaatgcacccatgctattggttgttaaccctgattagtggacttacaggtacttttgatttttcttacattttctgtgttctccacatattttatagtaagtatgctatgagaaaaaggaacactaaattgttttaaaagacgaaaaaggaaggaaacaacttggagatcaggacatttctgtgaacaaccatattatccaagccatgagcagtagaagctgcagttgaagtcagtgacagactaatcaagtctgctaatattgtgactatagcattaataatagccttcccaagatggatttctgtgatgtcctgtaactttatcaagatttagattgggtctccaatttagtgttcaaaaatctatgttgggatcgtctttaaattgtagatttctgaatcttactcctatgcattgtaattcattggtttgtggatatgtccagcaattcacatttttaataaactctcagagtgatttcttcaactcaggtggttggcctaccacacttggaaaagtgctgccataattgaacttcctttagatgtaagctttattttttcttcacctggaactctagcctacctgggtatgcatagttcaatactgtgaaaggccgagacagattggtatgacacacagtattggtggagctcgtttcttttgagcaacactgatacgtgttggtgaagaaaatgtggcttggaatggtggtcactgatactttcaggcccagctgcctgaaggttactgggctcctacttgtttctacaccattgatgtgcaagcttttgttttctaggtaactccattttcattacgtagtttttacctctagatggcagcaaaggcttgttattttatcagaacaaccccaattgtcattcctaaatctttttttttttttttttgagacggagtctcgctgtatcacccagactggagtgcagtggcgcgatatcggctcactgcaagctccgcctcccgggctcccgccattctcctgcctcagcctccccagtagctgggaccacaggcgaccgccaccacgcccggctaattttttgtatttttagtagagacggggtttcactgtgttagccaggatgatctcgatctcctgacctcatgatccgcccgccttggcctcccaaagtgctgggattacaggtgtgagccactgcgcccagccattcccaaatctttaaaaaaaaaaaaaaaaaggcctagcgcagtggctcatacctgtaatcccagcactttgcgaggctgaggcgggcggatcacttgaggtcaggagttcgagaccagcctggccaacacggtgaaaccctgtctctactgaaaatacaaaacagccgggcgtcgtggcgcactcctgtaatcccagctacttggaggctaaggcaggagaatcgcttgaacccacgaggcggaggttgcagtgagccgagatcatagcattgcactccagcctgggccacagagcaagactctgtctcaaaaaaaaaaaaaaaaaagttgttttttttttttttcttgtatgacttatccttggacatgtttcagtaaatgaggtatggagcattaaaatgtgtcatctcttggatcatttttatagagcgttatgtcaaatagctccaagaaagttttgtccaaatttggaatgcatattgcaagagaaatacatgcatatggctcttttaagaccacacagtgaatgttctactcagagttggaggctcctgggtttcatcaaagagcagatgtcttggaggagattaagcaagttggaaagctcattcatagaagaaaacgattttttaataaatgcttaacccagttcaacatgaagactgggatttggaatgccttaaaagtctgaaggatgttgagttcaatgaggcagaagaagtggttccacctagggagcagtagaaagaagaggagtaaatttgtggaatatattaaattctaaaagtgttggtttgttttatccatagattctcaaaagaaacctagcaatctagaagactccctggttacagtgagttattagaaggcattgagtcataatgagcaaaagaagtatggaaaggtgaagtgttttcagttgtattcaaagtctcagttctatagcccaatttctacatgactcttttgttcttccactttatcatggagcacaaatataccagaacaaaatcagcatttatggagaaactatcagatctcagacagctggagtcaggatgtttccttttctctaaaggaaattaattttgtaagtgctttgaactttttgatctgtattgacaacgtgttgtgtaagaaagcagtgttttctcaggagcggtcctgactccagggactgcatcacaccttagctctagaggttgagaagttgaagactcccagagacctctggtcattttgatatgtggtaattgaggtggtgtgggacggtggttggattcagggctgctcactcccttggggacttagctgtggaatgcttggccaaggccatgtgttatcagaattgacagtgtttttgtagttttgtttttatctcagtgtttaatgggaaagtatataagcaatgatgatggatatggtgatgaaaagaaggaaatgctaaactgaagaaaaatatatttgaaatattattgccttcttttcttttgtcttttatattgtttgacaaatcactgctaatttatggggagtggtggaatggaaataagagataatgaatctggcagctagcccaaaatttcataatgatgctttggcttttttctcttgatttttctcagagctcccctattaaacaatgaaactttatcactacaagttttacgctttatacaggaaagggtctttcaaaggaaagctgtttgattttattagctcattctcattaacctcctatgagagatcatttggttttgaatagtgttctacttctatggcttatattaaagagttgtccaatatctgatgcaaaggttagagtaaataggtgcctttattctgtaatgtatcatggtttgtggttgtacctagtcacctctcaatctctctttctgtggaaattatacagtcagcagtgggggcaatccaagaataaacattgaaataaagttttcaaaatcgctccaaacccagttgcccccactttgtgtcagaccaagcatcagatgtagcaatactttgttaaaataaaatatactaaccttaaatacttgtcttcctcatttgttctctttttatccatctgtgaacttttttccttttactcagcttttctttttttgtaccctttcctccctcccctctcctgtgtctttctcatttcttcatttgcacccacttaattgttttagtcattctcaggcttacatcttataacagcctttgggtagtatctagagcacaagccgtggagccagtcttgggtcttcattctagttttggcactaactagctgtgtctctttgagcaaacactttacccatgtaaacctcagtttcctcttttgtaatcttcatctggggattgaaatacctacttgtaagttttctttggggagtagagatattgtgtaataaagtccctggcccatctaaagtttcgggtgttaggtgttcctgttgtgatcatcatcagcatcatctttgtctttttccttatatcacttcttaagatgcctatttcttggtcataatcctaacttctttgattgttttacctttcttgttttcctgctttatctctcaactttcctctctctccaattatttataggcaatatgttgctaagggtgggagttaaggcagctgaataagcagcactgattcctgggctatacttctaatcacctttgacccagaaaaggcccactcacatgtcctttatcctccttatgctactttgtctggtccttgtgaatctttcttttttagagttcacccagagacattatctgttctttcctgttttcatgtcttttgtttgaaaaatgcagtagttcttttagatcacctgtaaagtcctttggctttgacattctgtgattctgtgaaaaggacaaatgcaggccagctatggctaccaggtgcctttattagccatatgagcttttgttgagcacctactatgagcactatttaagtcctgggtagaataggaccatggttcttaaattttatatgcccagagagcctgttaggatgcagaatccctgcagtgggaattaataggtctgggaatgtgaaactctgcaaagtcatatgtgattctgatgaaggtggtcaatgactgcattttaagaaacattgatataaggagttcaaaaataaatgatagctgattcttgcttttgagatgatagcataggaggggtaacaaataattatgaggtagaatgacgtgcaataatagaattacagacagcagttttggaaactcagtggaaaactaaaaagtaaggaaggttttccagaggaagtgacacatgagggatgagtaggattttagtatgaggaacaaaggaagaagagtatttcagccctacaaacagcatgatcaaaggtaagaaggcccagtagtatgtgggaggatagttagtatggtgtcctggtgaagatgtgagggtatgtccagagtttcaaagggagatgaaacgaaagatgaaggccatggtagaaggtttggactttgggcactaagcaattttaagtgctgttttctgggaggctggagaattgctgtgatcagaatggtatttaaggctggattatagaggtgaggatttaagtgtagtagattaactatcttacagtaccatctgtcctaaattctgggcttggggagtagtagtacaaataagtggggaggacagagaaagaaataatatgacagagtggaggatgagcagagaagtggagaatagttcccagatgttgaacctgagcagtggggaaggtgatggaccatcaatagaggcgagacaaagagcagttcaagaaagatagtatattgggttatgggcgcatgctaagtttgaagtgtatagttgggccttccatgtggaactgtttggtagagttgaaattttggagatgttgctttgaggatcgtggtagagaaattgttgatactactcaagtgcctgagacagccagagagaaaaatgtaattcccactcaactgccgctcttttcttctcccaccataggtacttctacatccctttcccagagcctgagatgaattttgtgggaccctaccatgtgcccacatcctctgcacaaggccactctatcttaatgataagaatataactagttctgagaacagccacctaaggaggcatttattcccattacttgaacagtacatagtgattgaaccactatccagggagtgattggcttgctaggggaaaggaaatcctgcacctctcttccagtaacctggctggcccctcagccattgtgtctgaaccaatcagacaaattacataaacttgtactcgcagaaaggtttgccactttgtggcacagagccatgcagtaaggacaggatagcctccctaaagcgtatttccttccttattggcagtctgagaaaaacctggaataggaccatatttgataggtttggcctaaaaaaatagtaataatcgtccattgttctccctagtcttctcattgtccttagaagctataatcagcagcctcagaagcatttatatttttcagtttctgtaattaatacatactcttataatcaggaaatttcatatgaaataaatgggctgcttatataaattactatgagagctgttcttctcagcatgatccgtactcactgattccctccctgttgccctaaaggaataactatctgcctcttgtgttatggaacttttgaggacctcttgcagtttttagttagctcctgtttatataaaacagtggttttctgaggcttcaaaagtgactgatctcaggcacagtgaattcaggcaagaacaccatgaaaaggcataagaatagaagaagaatagctttttctagttaaagagaagagagaaaaaaaaaaaacagccaaaccactaattgtaaaggataataatgcatttttgaggaattactttgagttgtttgaagagtgtctgtgttgatgcagattattgtattgtgaggggagacataggagccaacttgacaactttcctttgcagtggcagtttttacttgggatgcttccttggtttacagttttgtactcctgaatttggagactgacagggttgaaccccaacacttctccttctgacctgggaagatacatagtgattatttctaaaaaatgattttgggagtgccagtcttattaagttacagtgttccttgagaaatagaaatccagatttagagtgtaccatctgggaaaattttctgtttctgcaaaggcagaatcacaccaaatgtggcctaagttggtggtgcttgtctttatagtggctggaccttgatcccttgattgccttttctgaaagtcttgggtcattatcataactgtcaaggcagccacctacttataagctcagatgtgcatggttgtgatgttccttccgtgaatcattttcactcacttctgatgcttttctatcccatcatctctgaggctaatcaggtacctcctgctctgcacatattgattgcctgtccaagctcattcttcatgcttggcatttgtgccctttgcttatagaatcttaccttaggataaagtggacactgactgcaccttttgtgttctgagaacagtctcctaatgagaacatgagcttctctttggacttgctttctcacatctcctatcccaggtcagtcttccccgtgcctgcccatttgtgtggggcttggcttctcacattcattatctcttgtcaccctaacagtggcttcagggaagcaggtggagttggaaggagaggcaaatcactcttggctatggtgatcatgggaggtttcagaagaggcgagcattgatacagacccttcagtgtgggtcttacttcacttgacaagagatgaaaattgtgtccatgtagagaagtggggaggagaaagccctgcatatgtttagggacattctgagtgttctggctgaagtggcagatctgtgaggtggagcacaaggaggtaacattagacaatctgtctgtcaccacagattgtggaaaggatcaaattcaacttataatgaatttaaaaccccttgcaactcagtgtgttgccacggaaagagaatggggcaacagaatcagacctgttttcactcctcagttttgtgacatactaacagaatgacctggaacagctttccttatatgtcagagttttaatctacttatccctaaagttgtcataatacccactttctagggttgttgtaaaataaaataatattgtataatggatttgttttttgccctctcttttatgttacctcactatgcagaaaccttctgtgaagacacagagactccctagtgctgtattcatggttcttcacaatcaacaggtctttgccctttaagccttaccctgccccaaccatctcaacttcatccacattgcactgctcactgttccttgaatgttgattatctgccctcctgcctgcccccacacctttaccttgtgggcacctctttggagcacctttcttttttctctatatcctagtcttccccatcctgtatcccctgctcaattctcatctgtttctgaagcctgatccccaaatcccacctgaaagtaacctgctcttcctctaaaatcctgtagtacttactgtctatatagttccttctctgtgttgagctcttagttaccttttaagctaccccttaactcccaccttttattccaaactttaacatctgcatagctgcctggcacaataatgagcaatattgcatgcttcataaatatttgttggttcattcttgtaggtgattggttgaggaatgaaggaagcctgtatcctaatagaagacattcatgcctgtggtggttataagctaataatacacagggaattgcagcttctcagagaggaccttttagaaaggtctaaacagtagagagttatctcttcaattcttgggattcctgctgaaaaccaattcccttctcccccgactccatttaaagccaaggtggttggtttctagactcttatttctcccaagggcacatgaaaaatggaaagctctagttgacctgaaaattctagtttagaattcaggtatctttgaaagagacagaagtataaaatactgtaataatacaaatatagatgttcaagtatgaacatgctctcagccagtctgtcaagtaagtggaaacaattatgcaacaaaactcttcagtataggtttttaaagttgctttgaggcttatgtttcatcagattcaaggttctcatctctagacaccagacataagagttttcatatgagttgtcagatttttcccacagtgttatataagagtggaactcttatagagtcacttggtccatctctttaatgtggtgatttttaaccagagggcgattttgcccttcagggaatatttagccatgtctggagatattattgtcacagttgggggatgctacatggtgtgtaagtagaagccagggatgctcctaaacattatacagtgcatgaacacctctttcttccccacaacaaagagttaccaggccaaaaccattaatagtcctaaagttgaaagaataatggggagaaaaagctgataggattaggggtaaaagaaattaattcgtagaatcttttttttttttttttttttttgagacagccttgctctgtcgcccaggctggagtgcagtggcgtgatctcagatcactgcaacctctgcctcccgggttgaagcgattctcctgcctcagcctcccaagtagctgggattacaggtgcccaccaccatgcccggctaatttttgtatttttagtagagatgggatttcaccatgttggccaggctggtcttgaactcctgacctcatgatctgcccgctttggcctcccaaagtgctgggattacaggcatgagctaccatgcccagccaattcatagaatcttagagaaggaaacatctagtagttttgacatctgtaagtggaaaaatgaggaagaagtttaatttctggaggaaagaaactcatgcaggttgttggcttatttatgctccaactttatttcccaaaaggaattttaaatgatttaaggagggtggcaagacttcaaattcagaagtcattggaagttagaaccagatgtgatcttaaagatcaccaagttcaattcgcttatttcacaaaggttaaatgacttgtccagggcctcacagctgactagaaaaggcataaactagaacctgatctatttgcctgcctccagtgctccttcccccaatcttttcacttaactgaggctttgttaatctactgtggtcttccttaatctccagtttattggtagagattgacagtttcccacttgattaaatgttgtctgatactcttgtttcatttctttgcccaggttaataagctcttcaagggcagtgaatctttcatctccataatatctgccccagtggcaagtaagaggtacacagtttaatgtgtcatgatcagtggattgatcgattgtgtacatgtgatgctttgaagaaaacatattgcatactaagacactgcgcatgtcactgagacacaagtttggttgcataaggatcgtttccactcacttgattgacagattggcccagagtatatgtacatttgaacaattatatttgtgttaatacattgtacctttgtttctttcaaatatatcaaattataaactagagttttcagataaactggagctttccatttctactatgcctgtggcagaaaaataatgtagataaccaaccacctttgccttttgccggaacagcagataactccctctattgtttagacctttctaaaaggtcctctctcggaagtctcaattccctctgtattagcttgtaaccaccacaggcatgaatattcattagtaacctcacctccacctatccaaaagcctcaggaatggctgaggacgaggtaggctttgtaggtctgtagggcttatatttgtatattgtagttgtccaaatatggctagcctttaaagagctgaacaaaacaggcgcaatcccatcataaaaatgggctaaggacatgaatagacaattctcaaaagaagatatacaaatggcaaacacacatataaaaaaatgctcaacatcactaattatcagggaaatgcaaatcaaaaccacagtgcaataccaccttactcctgcaagaatggccataatcaaaaaaattaaaaaataatagatgttggtgtggatgtggtgaaaggggaacacttttacactgttggtgagaatgtaaactagtacgagcatggaaaacagtgtggagattccttaaagaactaaaagtagatctatcatttgatccagcagtcccactcctgggtatctgcccagaggaaaagaagtcattatatgaaaaagatacttgcatataagtgtgtttatggcagcacaattcgcaattgcaaaaatatggaaccagctcaaatgtccatcagtcaatgagcggataaagaaaatgtggtatatatacaccatggaatactactcggccatgaaaaggaatgaaataatggcattcgtagcaacctggatggaattggagactattgttctaagtgaagtaactcaggaatggaaaaccaaacattgtatgttctcactcataaggaggagctaagctatgaggacacagaggcataagaatgatacagtgcactctggggactcaggggaaagagtgggaggggtgtaagggataaaagactacacattgggtacagtgtacactgctcgagtgatggttgcaccagaatctcagaagtcagcactaaagaacttattcatgtaaccaaacaccacttgttccccaaaaacctattgaaataaataaattaaaacaggccaaaaaaaaaaaaaaaagatggtctcaggtaacccctcaaatatcataccaggaccatttggctatgaggaggaagaagaactcactaaaataagaaaactagtttcagtttttcaaaatattgcctcaaataataagataagttttatttctcttgatcaacaattttgacaatgaaattttaaatgatgccacaaataaaagtgattatccctggaatggctgactgcaatgccaaaggttattcctgaatacatttttatggtggcattctaactgtaaaacctggtacctgatggaatgttgacagatttgtaagtgctcccatgtaaatggtgttaattcattatcaaattatgaagtacttagaggtgttggccagttaactcgctagactccctcaagattccttaccctacagcattgcctttgggggatggctgctctgatatattgactgcccaaaagccttacccttcttgatgtaccttgaggaatggaaagggtccatctgctggaaaggaaagggcttgaagtttaagtaaaatgaatttaaatggggtttaaggtttgagaaccttagtaaactacttgtcttccttgctctttcttgtatttgcttcactgtgccataagttgaatggagtcctttgttttggttcatctaactgccttatttaatgtgtgttctggacccttcccaagaaatgctacagatttaagttgagggcctgggattgagagagaaacagaccttgtaggtgtcagacagcctactttagctcagccaaagatttaggcatctatgctttgctacagttataaaaccgggaatcttcccacccaataaaatggaagtttttattgagctttccttttaaataaaaagaaaacttggagaataaaccttctgtttgtcatgccagccactagagggtagaatagccacatttcctactacagatgtaatttaaagagagggactatggtcagaatacatttgccagtgcttgtcaatacagatgctttttgacttatgatggggttagaaccacataaacccactgtgagttgaaaatattaaaagttgaaaatatgtttaatacacctaacctactgaatatcatggctttgcctagcccaccttaaacatgctcagagaacacttacataaatctacaattgggcaaaattgtctagcaacacagcacactgtagagcaggggcctctaaaccctgggccacggactggtagcagtccatggcttgttaggagccgagcggcaagcagaaggtgagtggcaggcaagcgagcattactgcctgagctctgcctcctgtcagatcagcagtggcattagattctcataggagcacgaaccctattgtgaactgcacatgcgaggggtctaggctgagcactctttatgagactctagctaatgcctaatgatctgagtggacagtttcatcctgaaaccatccccccaaccccccgcccatggaaaaattgtcttccatgaaaacagtcccttgtgccaaattgggaactgctgctgtacagtatcggttgtttaccctcatgattgtgtggctgactgggagctgtggctcactgccactacccagcactgggagagagtatcttacagcatattgctagcccagaaaaagatcaaaatttgaagtaccgttttagggcacaattaaccagcagaagagtttgttaaaatgcagctttctgggccctacgcccccagaggttctcattggatagctctgagtggaacttaatatcaggggattctcacacaggtatcttggattttactctgagatacgctgatctataagagttttggggcatgcatttttgcctatcttttctcttgggattacaaagcaaaatgattatttggaggaaaaaaatcttaataacagaaaccagggtataggaaaaagctagagtgttggttaatttaaaggtctttccctgcctttgtctaacatatttcaaaggagactcactttgtaaatattcagaatcaaagaagctactaaaacgtttttattgggagttttacttcaaccagtaaagaccatagaatccttagactacaaatctctaaaatttttgataaaatatcccttctatgaccatctcacagctcccctaattttatcctttatgggttatgtatgtggtttagctctgtgtcctcacccaaatctcctaactgaaatccccgtttggatcgtggggtggtttcccctgctgttcttgtgatactgagggagttctcatgagacctgatggtttaaaagtggcagtttcccctgtgcactctctcgctctcttgctgccaggtgagatgtgccttagcttttctttgcctcctgccatgattgtaagtttcctgaggcctcccccagccatgaggaatggtgagtcaataaaacctttcttcttgataaattacccagtctcaggtattctttatagcagtataaaaatggactaataaaactggtgtcatgaagaccccaagcctaatgtcttagcattgtaaaatatagttgtggagaccttacaaagagtgtatgtaattttatcatgatcttgattgaacaagtatcaagattctttcttatgtgtacagattcaagtgtagtaatgcacaatgtccttctagtaaggatgacaattttatttttgtcagtgcccctagagagcagtggcatcctcctggggaaagttttgccattgcttttaaatagaaaaaacatgataaaatcattcgaatctgtgataggattctaccttttaaagagttaaagagatagtgggaatgtgagtaaaatgaaacttcgttctgaagcgaggacttagaccaatgaaagaatggtatgagtttttcagagagacgaaaaaacagtctatcttctgtgagccctcatggaccaaagaatacaaccctccacccccacatatttcatatgaagatttctgaagattttccagtgtcacttcctctttccttcctggtttttgggggagttctatgattatctgtcaatgaaaaaggaagttctgtaatcttccaatctctttctctctctcctctctcacacgcacacaaaaaaatataagaaatcttttcaaaattaaaggccagaaatctacattgtgtcattttaggtgtaattctatagaaaaaaagatgttttgcagaaattatgctgcctttatgaactttaattagtaacacttgtaataatctacacgttattaatctgtctcctaaaatttattttgatgctgatacaaattattatactgaaggaatcctcccagtagaggtacttctaaaagaggtattccttgaaagtttggtaaatttccagttatgttagattaactacttaggaagcctctatatagttaaaatctggaacaaatgattaaatgagaatttgtgcattatcataatagaacacaagacttatggtgttaactttattatagagaatttctgtagctcacataagaaattgaatcctttcaaaatgggtgggctgatgaatagcccaaatttggctcccaaactctattagttacaagtgtgccaagaatggatttcttccctccccccgtcccccaccagcacttgggacagccaagaggaacctggggtgatgggaatcccttggctggttatctctgcctctttatctgtttcccccagtgccacacaagcatgtgttttgtttatgccattatgtgacaaagttgggaagactttgttcttaaattctgatttccattgttcataattttatgatcagttgatcgatgccttccaaaatattacatgtacccactctcagtaactagaaaaagatctcatgaagcagcagcattatcattgtctgttttgaaagagctaaaattaagtttgccattccttctagagttctggcccaaggtgacttaaaaacagttttaataaacatttagaccatcatgtattttgtaatacagttgggtcactgttgattcctaagataaatgtgtttaaacagaagctttctcattcatcagcagcctcagctttcatccaaatttatttaatgatgatgcaagcccatagcgttggtgttgcagttcgtcaccatggaagtgtttctgtcaacaaatcctcgctttactatcatgaaattgattttgtaggggaaaggaggataattgtgaaagcttccttttattcttaaagatcttcacagtttgcctggatgtctaaatgaattgtatttaaaatcaataactggcaataaaattaaccacactaaattaacaattatgaggttagaaaaagggaaatggcaataagctactttgtctgaaatcgtcgttttggaatgtgacttggggaccatacttgtaatttaaatgttccctgaaagctgttgttctctgctcagaagtatggattatccccagggactcccatgaggcagatatcagaatttctaggaggattcggctgagttattctcatctatattgtaaatggcataataatcacagaagaaattcacactatattacttctttcaactaacatactgtattttttaaatatgccttttctatagcttatgttcataactatctttggcttttatttgcttgtttaaaaaaaactgtaagaggttaaaacaaaaaaaaaaactgtaagcttttgaatgcaggccccttatgaacagggtaggtagcacctacattaagtaattcaaactgttttgggaaccccataggaaaaagaaacaagaatgacattttctttttttttttttgctttgaagtagagtgttcaagagtttatgtcacagtggctggttccagatttggttgtagacatacatgttctatgggaggtttgatctctggtagaaatacagtcaactcttgatttgtcaatgtaactatatttccaaatgtactttctctggcttcctatcacatgtcagagctttttaattttatcatctgcttctatgtgctcatgaaaaccaaaattattcggtagtattttatttcattattataaacatttaagttcctaatgtagtctaagcactgtgctgggctcttagagatactgaaatatatcccaagcatgaagttatgtttgcttctgaaagatcttatagttcactttgaaatcaaagagatgtaatttttatttatttgaaccacttttctctcctctaatatgtgattagaagttgaccataaatgggacataggtcctgtttgtttttaaggaagaattaatagagactataagcaaaagacaaaattctattgtacatgcagaaatataacacagaatgaccaaaagaaaattcagcaagcaatggtaaaaataacaaattatttactgttttataatgttaaagtatttcaccaagacaagttgcagtcaaattaaagtgagttatggaaaatgaaatacataaagatgtatttatacaagtgcagactaaatattttccatacaagtatgtaaatgaaaagatatacagtaagtgcacactcgatatgactatgcaggcaacagttagtttcagatactcttgtatagttcatgcacaaaccttcccaaagtacgagttcagtcagtcttgggggatatggagggatgattaaaaaaggattgagttccttgcaaaaatatcagtatggactggatgagggtgagcgtggtcagttatatatattacttactgtaatttgtgattgtcgaggaagaggtgtggctgttggtgtgatagtaatactgctggtgactttattggttgttttgtttagtgccccgttaattaagccttgagttcggttatcctgcagtggtgctgaagggctggcaggtctcacagggctggctacagcttgcatgtaaggacttcctaagtgaatgtggattttattatcctcagtagttatcacacttgagctattgctgtttgaacgctgaaactgccatgatgactgccggtctggggagactctgaatatcgcatgcttggcactgatttctgttggttctggggagcgtccctgctcaggagagctagctgaaccagtcacagccaaaacctgaataggggacattgtcctttctggagttagagaaccacaagactctggggtctgtgctctggcaaaggttgccatggtaattggggacatgccttgttctaaattcatgaggtcttcggtagaggttttggactttactggtgttatggaggcgttttggaggatggttatcctttgctttggcgtgccacagttcggtatcactgcagtactcgtgtaagagtgaggactctctgtggttggacttgtgatttcaagagtggctgtgttttgtacatggtctggagtaacctttatatgaagtggctgcccaggtgtgtggcttaggactagatctccaggttgcacaaagttggcattgggtttagtttgcatttttccattctgaagatggccctccttggatttcatccagggaatccatagctttctgttaacaggacatggagtagactggctgcatttgaaggacagcacagatccctcatcattagggtcctcgtcttgattctcactctcctcatataactgaccattgatgactgcacgttccagaggaatgaggctcttgtaatcaggtggttcattgtctactgcttctgtctgaacttctttagaaaatacttgaggatcggaaattcttcttccattgagactaggcctgaggctcttactgaaatgccggtacctctctaactccttagtgaggttttcaatctctcttcctaaatctctgttcctgttttcttgttgatttagttttttttgcaggactgagtgatctccctggaggtgacatattaggtcttcagttgccatgtattcatgaattttctcttttaatgcatccacttctcttgagaggtgccctgacttagcttcttcttcttgaagccttttgaaaagccattgttcatggctggtctctgtcttttctgctaacttgtacttagcaagttccattttaacatgttctagctctttagataaaaattgagctttgtctcgttcattagcataccttcgttctagagtctcatattcatcttctgttttcatgaggtcatcctcaatggctttcatgtcctttagcttcagtttcagtctttccacttcttgagagagctccttaatcttattgttttcttggtgtaatgctgttgtggatttcccagagtcttgatttaatttgttttttaggaaatctttctcaattgcttccaatgattgaagcctatttttcaacatattaactcttgacaggagatcatttcctttctcttcttccgctttcaatttgttttttaaatcatctctctccttggttacgctgtacatcttttcttctacatcggttttggacttgagcgcccttttagtttcctcaattaacttctcagtaactgttgttactttattttgctccacttgaagctgagaagaagcagcttgtaatttatcttcagttttctttaatttttcactcattgttttccgttcatctacaaacatcacagttaatgttttcagtttagttaaatcctcttttagagtgaattctgtcttttctagccgactttcaatggcttctagctctttgatccttacttttaaactctccagttcttgagacaactgctttgtggtcatcctttctttttctaaattgcatttcagagagtagcattcttgtttgcttttgttgaaagcgtcttctaacttttccagagccataattcttttactgagtttttcaacctctagtttaaagtctttactctgtaacgtctccctttcaagcctcttattgagatctctgcactgctcctccatttttatgagctcttcatctttcccttccatatctagcacacgtttcctgagctcttccacttcagccatgatacca

SEQ ID NO: 317 - DNA, 32742 bp, Homo sapiens
  source 1..32742: mol_type = other DNA
aaacctcgcggcctctcagacgagggtgggttagcgggggcagctcccaacccccgtcctggacccacaaatcacctcgacccctggcccaccccggccgtcaccgagaacggtcccctagggtgcctagggacttccggagcccgaccggatccggaagcttctgagagcgagggggtggggccgaaaatcaaaaaaagcgcggcgaaagctaaaggccggcgcacgctgggcggtggtggtccctaagccgggccgcggccggtgcaatggactccactgcctgcttgaagtccttgctcctgactgtcagtcagtacaaagccgtgaagtcagaggcgaacgccactcagcttttgcggcacttggaggtgagaggctctggggtagaggacagatggggcttcccctagcaattcttatttcacagtgaggccgaggagtggcggccccagcctgggaaagaaaggacagtccttcgatccctctgttgtcttttcgtactggtaaaggctagtgagtgtcggggttccgctggccgcagcgagaggcaagagcgctcactgaaggctctaggaaaagcgggagtggggcaaaaggttgggaagttcaggttgtttcgagtaggtaacggaaaaagctcggaactttatcttttcctttgcttctagttttggtttttctacgaaaccaagccctcaatacacaactattctcagtgacggaaagtcatgattaaaacttggttttgcccttcggtaatctataattgaatttgttgcttactgctcttacttgaactcgggttgaactcaaacttgaaaaacattatttcaacattaagaagcacttccccttcctagtaagcgtaatcctttttctttaccaaaatacattgcttacagttttttaatcttagaatgctgaattgcctttttttctattctagtgatatgtgtccagacgattccgtttgttttaggatcttaatcttctgctttcatttgttttgcatttacggaattcaaactaacattgacctcagtttaatttttttaaagctcaattaaggcttattttaactctctgtgtcacagctttcctctgttaaggtagaattgaacataattttaaaatatattgtattatattaaccctatgataaaagactaatgtgccaaaaatttgtaaaatattacaggaaaaaaatgatttccagtagtagagcaacagcagctgttagtgaagctgctgttgtattaaatgtgtctgtcttatcttgagcttcactggtgctcctcttttccctacttcaagtgcccatctcctaagtacatttgttttctctttttcattctttattttaagaagtgcctgcaaacctaataattaaggtgttagctgttaaatgcttaaggctttgcttctgaattagcataggctccagaagccgcagaataagcagggcagtccgtttaatttaaaaatcgggagttaagcattttgtatgctattctgaagcattacctttctttgaataaacaggaaggttgtgcactgaaagagatttaaggcacaggggcttacacctgtaatcccagcactttgggaggccgaggcgagcggatcacctgaggtcgggagtttgagaccagcctgaccaacatgcgaaaccccgtctctactaaaaatacaaaaattacctgggcgtggcgtctctctgttgtcccagctactcgggaggctgaggctggagaatcgcttgaactcgggaggctgaggttgcataagtagagatcgctccactgcactccaacatgggtgacagagtgagactccgtctcaaaaacaaaacaaaaaaaaagagagacttaaacaaaatatgggatggggtctttactgtattcctaaactttcaaggggtttacataaaactcttctaccgttgttgcaaaggtatgaagagcactggcttcaggttactactaaaaaggactttttgtaattaagagataaaatacatacagagcataaagtgcattaatcttaagtgaagagtttgatagtttttaatatataggtaccatagctaccatattggtagctaacatataggtagagtagctaccacctgtatcatgatacagaacatttctagccccatagggtttcttcattgcctcttcacataaggtttgggtaagtagactcatacaatatgtactcttgtgtctggccttttccactcaataaaatctgtgaaattcatgttgcacatgtaccgctacttcattttttttattattgatgtgtagaattctattgtataagtgtaccacagtttacatacactttcctgttgataggcatttgggttgtttacatttctgggtggaattaagaataaagctgttgtagacatacattttttgtggatatatgcacacatttatatacttaggagtagaattgttagagcattggaacatatgcctatatgttccgttttagttgaaactgccaaacaattttctgaaatatgccattttatcttcccactagcaatatgtgaaatttaccatcacttatccacaccaacccttgatgttttcatatttcttaattttaaccattttggttgacagtatttgtatttttaatggtgaatgtctttgtacagacttcatgagagcgagatctgagtatgcaaagagagatgggtatcatgtgaaaggagattattcattcttctgtacttctcccacacttttatagccccatgcagagtgtaggctttgaatgtttgatgactggcaaagctgagctaatctgatttttaatgatgatgtttcataacactaattttgtgtagtgattaaaagcatgaattcaggaaccaagctgcctagatatgaattccagttgtgcttctttactatcagtgtgtacctcagtttactcatctgcaaaacaaaatagtggtacctaccttatagagttattatgaagatgaaaagagttcacatatgtaaagtgcctagatcgatgcctaggccagagtaagtgctgtataagtattagttattattaaaataaattatctttgttttaagagattcagtataagtaaagggaaaacttgtaaagcaatttttattttacctagtgcatataattattacatgttagacaatttatgttaatgagatacaggaccaatcctatagagaatcatttttaaaacagcaagtgtcttattctggagagctagatttataaataagcaacagggtaatgcccacagtatttcctaccccagaatatctgttactggcatctgcactttcatatttggacttattttttcttgtatagacttttactttagtaatgttaaaacactccttgggaacagataatgtgaaactcttatcagcaaagccttagaagaaaaactgatgtgggtgagagaataaagggaggatacagaaaggaaagattagagggatgctaaagcagcctgcttaggcttgatcttattaaaataagtattcaggacagagttagtcttattctaaggtaactaatggttttgccatctttgtagaaaagatatgctttgtaataaatacatccataaagtatgttgaaaattcatgctttgagacaactgcttttggcctttagttccagctttacctcctctcttctctctttcactctgtgtgtgtgtgtgtgtatgtatgtgtctgtgcatgcgtgtatgtggcttatagattacaagaaagtaaaaaaaacaatggaataatcagaaataaaatttttcaatgccttgcctggctacttaaaaaaagattcacttttcacttccttctttaatcccttaacttctgagctcacctattgtctttgggaagaagcagaaggaataatcccataactaccctctgggcttcatttttcattctcctccctcaaagtaagtagaatgtattagaatttatttgcatagtaaatatattggtactagagtgcagatttgtaggctatgccttcatcgcatgttcaatgtagtgtgaaggagaaatattgctaggaactcaaaagtttgctaacttaggaaatagaaatataatgtactataggatagcataataggccgaccgaactgagatggtataagaaactaagaaaagcttcctggtggaaattattttaaactgagatccaaatgattactttagctagggagggagggattaggtaattgatgggtactctaggcaggggtgaatttttcacagcatgtgtgaattttttaaattgggaaggtagcagtggcactttgagggaactgagttttttatttgaaatggagaagagatgaaaattgccatcgcttaaccaacacattttgattactattttataggtaatttctggacagaaactcacacgactatttacatcaaatcagatattaacaagtgaatgcttgagttgccttgtagagctacttgaagaccccaacataagtgcttcactgatcttaagtattatcggtttgctgtctcaactaggtaatgcatttaatttctcctttttagtttttggaagatgtatgaacaatattttaaagtgcaggcttagttatagaatctcttaaagaatgattcaccttcaaagacttctcagtctagtgtgcattgtgaatcttttgacactgaggaagtcatagctaccgatcaaagaatgatccttctgtaatagattacactgaatttagaactaaagggtaaaagtactgatgttgctttttctatcttttcccccatttctttagttcttaaatgttcatttagtggtcactactccaatttggggcagggcggtggggatatttctttgtgtgattataatagtaatatatgcatagtttaaaaaattctagtgatccagaagtattaacacagagcagcattgtccaataaaactttcttcagtgacagaatggttttaaaactgtgttatccaatgtagcagccactagccacatggagctattaagcattcgaagtgtgggtaatagactaaggaactgaatctttaattttaattaatctaaattgaaatagccacatgaaggctagtggctaccaaattagacagcccagacatagagtaaaatggggtgagcctgtacccattaccaccagccctcatcttttcagctttgagggtataatctcatttaatggtttggtatgtttctttgcagatatttttctgtgctgtaacaaaacaatacttttggatctttaattggttgttttcagcacaaatggtgttgtggagcaccagatgtttctttccatatcagtatctttaatagctgcctagtgccttaattacagggtactgtaatttattcaactattcccctaatagtggacagtcaactgtctttaagtttttgctattggaatcaatagtgcagtgaacattctatgtaattttgctcaaatattagtgtgtttctattagataaattccattagaatttctagatcattctaaaatttgataaccgttactaaattgctttctgaaaagattcttccacttctaacatccaccaacagtttgaatgaatatgccagtcacttccagtgtttatactttagaagcatttgaggtttccagaaaaattgaaatgataatctttttaaattaattttttcacagatacataatatttatacaaacttatggggtacatatgatattttgttacctgcataaagtatgtgatgatcaattgagggtatttaggatatccatcacaaatgaggatttatcatttctatgtatttagaacatttcaagtcatattttgaaatatacaatacattgttaactatagtcaccttactctactatcaaacattagaacttattccatctgattgtgtgtttatatccattaatcaatctgtcttcatctcccccactaacggctccccctcacacctcccatcaccacacactcacccatattcttcccagcctctggtaactgtcattctccacttccatgagatcaacttttttagctcctacacatgaatgaatacatgcaatatttttctttctgtgtctggcttatttcacttaacctaatggccttcagttccatccgtgttgctgcaaatggcatgcattcttttatatggccaaatagtattccattgtgtaaatataccataaagtgataatcttttaatattcaaagtaaatgattttaatttgatactaaaataattagtatcaaagaaaaagcttgctacaaatgtgtaaacaagttttttctttgatactagtttattttacatagagaaatcatttgaatttctgaattggagggttatcataaagaaaataagaaaatagccatatcataccttttttaataataaattcatatgaaataaattctgtatgaattatctgcaaaaccttgtaagaaaatgatatattttgtgcttttattttaacttatagcagtagacattgaaaccagagattgtcttcagaatacatataatctgaatagtgtgctggcgggagtggtttgtcggagcagccacactgattcggtgtttttgcaggtatacagacccacacagtgtattcccctttccttactgtcagatcaaaattgatagtttctgtcataaactgctgacttacagtgtatatatgctatataataaatactacatgattaggcacagttcatctcattaaaagctggttgcacacatacaatttaaatgtttctagagaagagaagcttatccatttctatcaccactattgaagaaaaacaaatctacattataactgctttgacttataaacacagatgtctgtgttttgagacataagctatttatattaaaattgtaacgtgagttggcatctagtctcaatctgtggaggaaacgttctacaaaaattaaagctgtagatagagtctatttaatatagattcaaagctcttcatatttcattgactctaaaatgtcatcaattgtaagaaagaaaaacatcacaaattaaattgacatgcagttttagaggtgataaaatgtgaagaagggtatcttctaattgatggactacatgtgtgtttcaaactgcattcaagtttaagatgactaagtgaacaaggttgataaccatgctctgagacagaatacgtagaaatgtgtgaattgagagaagagccctaaggttcttacattactttacatgtgttttttaaaaaaattgttttaggaaatggaaaaggacatgctcagaatgtgcctgagagtccattattttaagcaggcaatgtttttatatctttatatttataactattttcttattctcagtgcattcaacttctacagaagttaacatataatgtcaaaattttctattctggtgccaatatagatgaattaattacgttcctgatagatcacatgtgagtatgcaatcaaacataaaaccaaatagtttatttgtttatttttaaattacaaccatgtggtagattaatttttcttagataacattttctaacatataaactgagtgagactccgattcttatttgttctgcccagatgattttaaggatcaaaagttgtaaaagtatgtgacctcattcattggtgaaaaaatgtaaaaaggaaaaaaaaattgtaaagcaactttaattttcataagaaaaatttatggactgaattgatttggccagaaaaaaattactgaaattgaaaattgtgtagttattcttgtaggaaaatatactgatgaaacagcacatggtccacgctgacagttacttccatgttttcatgatggaattgaatagggtaatttggttttaaaatgagataaatgatcaatactattcaaagcttccctggcttcttatgttaattagtttttttttttgcgtgtaaaagggaattgaaatgtataaacttaactatatcattttgacttagaataatgttaatgctttttttcttttactattttttctttaaacaaaacaccaatgtaaaacaacagtcaatcttctgaagatgagttaaaaatgccttgtctaggattattggcaaatctttgtcggcacaatctttctgttcaaacgcacataaagacattggtaagaagtttatttctttttaatgtttcttgttttatggtagattctctgcttaaagaaaattgtatttatctttttctttaaaacaaatttgaacaaggattctgtgtcttatcggatgacccatcaaaattaagagtcagattgacatacaaataacttgaagcacttcagccttcgtgtatgttgtattgaagactgtgtgttaagggttaatgcaaacacttatttctaaaagttttcctcagcatggcatcccattatttattacattgagtagtacaagaattactaaattattttgtgctcttagaagggaggcacatcactggcagtcccatttatctcagtcttgtgtttccacaaaatcaatggcaaccccaccagaaagattcatgagttaagtgctcagtatgaaccaacagtacttgtgataaatgaagacacacaaatgaatttaactgaatcacttttagaagtatattaaatcagctgggcatggtggctcacacctgtaatcccagcactttggaggccaaggcaggcagatcacaaggtcaggagatggagaccatctcggccaacatggtgaaccctgtctctaccaaaatacaaaaaattagccaggcgtggtggcacacgcctgtagtcccagctacttgggaagctgaggcaggggaattgcttgaacccgggaggtggaggttggagtgagctgagatcgcgccactgccctccagcctggcaacagagtaagactccatccttaaaaaaaaaaacaaagtatattaaatcaagcaagtcactgattctttaaggtgcttggtgaacaatttccctgctgtgctattcagcattacccgttcgattttaaatttaatatctcacttgttcaagtgctacatttttctgccctggtcttactttggaggtggagtaactgtgtgtgtgtgtgtgtgtgtgtgtgtgtgtgtgtgtttcaatttctgaattgaaaaaaaagttcatatgttcatatttaggaaacacttaaatataaggaagaataaacatttgctcatagtttcatgtgtagaaactgctcttcaccaagattgtggctatctatatgactgtcagcaatatacgaaactacccatcttgctcacacatgcagtgatctcttaaatctaaatgctaatcagcaaatatggcaaagttaattgctgctccacggtgtgtaacgtaaaacaaattcttaaatttgctgaattttttttgcttccaccacaattatgagagttcctcattacagttcttttgttaacacaaatgctaacaaatgctacagttcttttgttaacacaaatcctgcagtatttaaggtagctcttttgtttccactctgcatgtgtccctttattagaattgacaccctgatttaccatcattgaattatttattctaaggtgacaaaactttggaaatatttatctccaactcgtttgcacgcatttaccaaattatttttttctgtaggtactctctttataacaatttttgaatttaaatttatctctgatctaaatttctcctgtagaacatttatcttttaaatgcaacaatcatttaatagagttgataatgatgtttaataaaagtttgcccactctgtgcaagatatactttttaaaccaaaacataaaatttataattctaatttattttttaacttttttttcctcagagtaatgtgaaatctttttatcgaactcttatcaccttgttggcccatagtagtttaactgtggttgtgtttgcactttcaatattatccagtttgacattaaatgaagaggtgggggaaaaggtaaatacaatttttcaaatttattctgaagtttatagtctgatattttaaaagtcattgagacttttttatttttaccttttaggatggtgtcaacttaattttttgtctaatatgctttttctaatttgtccttaagctattccatgctcgaaacattcatcagacttttcaactaatatttaatattctcataaacggtgatggcactctaactagaaagtattcagttgacctactgatggatctccttaagaatcctaaaattgctgattatctcaccaggtatgactcacttcagtcaattttagaacttttttatttttaaaccaagatgtgttggttataaacagaattgtcttcttaaaatataataaacttggattctactgattcacagtagactaaaatgttttgatgtgctttactcacactcttttttctttcctgaactgaaatggaaagtataacaggtcattgtctatgtgtgtatttcagtctttgctttagatcaatagggttgtgccattctccaaaatatagacatcttggctaatttattttaaaaccagttttaaaacgtaagtagcattacgattatttgaaagagtatttttattataggaacaataaaaataaatatttctacataaattataaataaatgaaacagtgttgaaacattgatgtcattatgtttgtgtctttattttttgtataaaaatggataatgtttcctttggtgtgtgcctcttttcataggtaaaataggaacatatgtcctttctatctcagtgtatttcatatgatcatttatgttttgagatcaggtagtaattgttttccaacaagcttgtggcctttgtgcattctaacttaaattttgctggggcctatgctgctttgtcatcctaaattaggaaataattgaaattgtttcaaagagtttcacacacaagaaaacatttactgaaccccacctatgatcaggcacttagcagcaataggatttgaagacacagtccctgatgtttaagaaacatagaatctataagttttattttaatgaaagctaagcactagggcaaacttgaccattgttcatatggctcagctgatactttgcaaaaccaagaagtattcactttagcatttcactttttcttctcttaagaatctctagataggtgagctttttcttccagagtgccttcccatgacctgccttctcttcatctgttgtgagattctcccaatatccatgtatatctattctacccaccagatagtgcttattcagcatcttcatagtaaacagaaaaattcctttgaataaacctcgtctggaagactaaaagataatccagtttagcattaataagaggtagcttaatcatttattctgtaaatctctcagttctattatctattttatactctatcgtagaatcccagaatcacctctggcaattcctcttgtttttctggtatgccattgaacaataacccaatcctgaatctcttccaaagtctaacttaactgcatggttactaattacagctttagaaaatcacacaactttacctgggccagacctcttatatttacttgtcagctttctcatttcctacagtggatctttcatatttatttatttatttatttagagacagagtctcgctctattgcccaggctggagtgcagtggtgtgatcctggctcactgcaacctccgcctcctgggttcaagtgattctcatgcctcagcctcccaagtagctgggattacaggcacacgtcaccacgcccagctaatttttgtatttttagtagaaaacgggtttcaccgtgttggccaggctggtcttgaactcctgacctcaagcgatccacccgcttcagcctcccaaagtgctgggattacaggcatgagctgctggcctggccggtctttgaaattttttgtttttctcttgctaccttttatgcagaagatgaccttatctttgtttcacagaaaataaatatctaaatggagccccatttgattggagctccctgaaatccttgcccctggacaaacgtacctatgtttataccaaattcttacttagtttcatccagtttcactcataaatatgtaccattactctatgtattgcctcattttgtcttttctgaagcagttgctcctctctcttcggggcctcctattcagttgacccttcccctttaacttacaaatatgctcaaaactttttcttcaaccagatatcccttttaaaatctttgacctaccattgcattcaaggtgaatatccagattctcagtatagcccttcaaaatctgatccctaacaacctctcaaccttatttcttcacacattttgtttttttgtctaatatcagacaataaatagaacttccagctcactagaaatgcccttttatgtatccatgtgctatttcctctagagtgttccctctggaagactagaatactttctctcttatatgcctaacttctatttttgtttttaagactcgagtctgggtttaatactgagacaatattctttgttccatagtgtctcctacattcctccattatagcattgtattttatattaccttgtattatctctttctgtcatcttcagactgtgaactccctgtcagggcaccatctcccaaatctaggatacatcagtcacatagaatataatgctaggggtcccacagtacctcttggagttgtgtaacgcgggttgctgccccttacttctttatttgcagagacaaatttaatgcctggtaattttaggtgctttataagtaagcagctgtataatgtattaggatattcttctgtcctttgaatttttacaaagtgaacacaatcttaaaaaaatagagcaattgagacactgaaaattttaatagtgatgtgtattcgtggataaagaaatttaatgatttatttattgccacatgaatcactatgttttaataaatgacacagccaatttatgtatatcataattgtaagacatatgttttaagtataaactttacaggagtgtgttctatattagaagcccaaataaatagatgaaagaaaatacacataaattttatatttatcttgtagataaatcccttttgatgtatcaattttatatttatcatttgatgtatatttttattctaaacctagatatgagcacttttcttcatgtcttcaccaagtattaggtcttcttaatggaaaggatcctgattcctcttcaaaggtatgtaaaaacatgacttttcatttaaacttttaaaaactgcaaaatgccgaaacttttaaaaaactgcaaaatacagaaaaatccaaatgcacagatttctgtatttttataatagggacacaattatgtagccagtgtctagatcaggatgtagaatgttaccagtattctagaactcttcttgtgctcccttttagtcagtacctaccccttcctattccttacctttaccaaggatgactgcttggtaaactgctataaccactatactgacttctaacagcatacatatatatgtacacatatatatacacatatatgtatatatacgtatatgtatgtatatatacgtatatgtatatatgtatatatactcatacacatgtatatgagtatatatacgtgtatatacacatgtatatgagtatatatacacgtatatacacatgtatatgagtatatatacacgtatatatacacatgtatatgagtatatatacacgtatatatacacatgtatatgagtatatatacacgtatatatacacatgtatatgagtatatatacacgtatatatactcatgtatatgagtatatatacacgtatatatacacatgtatatgagtatatatacacgtatatatacacatgtatatgagtatatatacacgtatatatacacatgtatatgagtatatatacacgtatatatacacatgtatatgagtatatatacgtgtatatatgtatgtgtatatatacatatatacatatgtgtgcatatatgtgtatatatactcacatgtatacatgtatatgtatatatgtatgtgtatgtatacatgtatatgtatacatacacatgtgaacatatatacacgcatacatgtatatgtgtatgtatatatacacatgtgtgtatatgtatatatacacgtgtgtgtacatgcacgtgtgtgtacgtacacgtgtgtgtacgtacacgtgtgtgtgtatatacacatgtacatatatattttggaactttgtataaataaaagcatataatacgttttctatctagactttctttggttcaacataatgtgatgagattcactcatatttcatatagttgtagattgttagattgattctttttttggacaagggagtatgatttattggtgagcatgaataaggggacattacagtgaacaccctcacgaatgtagtgctcaccacttgtccgggggccacatttgtggatgtttttgacctcacaaccatctgggatgagccacttctcagccgccatgtcttcacatttatccacattaaatttggtaaagccccactttgagatgtgggtctttgggcagccagggaccttgaacttggcgctgcatggggccttagttgcatgctccttattttgcagatttgtgtggatggacatgatgacttggccactgtgaaccctggtcacggtgccctgggggctttccaaagacaccttgcataatagctctcagaagcctagatgggggacagcaggaggtcagagacatgaatgtacattggaaagggctgtctctcaggtttcttaggccaacccatacaagcaacaggccatgtatactaccaaggaggcagctgtttgcagccattgcacactgggccccaggaggaaaggagcacaattggtgttcttttgtttatgaacatcagctattataaagaaacctgcatttaccattttctgcatgtcttttggtgagcttatggacagcttgttttagctttatatctaggagtggaatcactgtgtcataggatatacgtaagttcagtagtcactatgaaacagttttcaaaaaaagtcagttggaccagtttatgaatatttggtcagtctgcattcttgccagcagttgatatttttcactttttcattttagcaattctaatgtctatacagtagtattgcattataatttaaattaatattttattaattaataaaaatatcattttacatattcattggccatttgtatgttctttgacgtgtctgtttatgtctcttgctcatttgtttaatgcgttgtctttctcttataagtaggaggagttattctggagtcttttgatgggtatataacatgcaaatattttcttccattctgtgagttgcctttttactcacctaatggtgccttgattttaacatagatcaatttagtgtttattgtgttccatttgggaactcttggcctattacaaagtcacaaagatggactccattgtttttttctaaaagcttcctagttttttttaactttcacatatagatctgtaatcttcctacaagtgacttttgtgtctgttgtgaagtacgacttttccaggtcagcctttaccttacaagtttttacagaagaaaaaaattagaatgactttgaactaatcatttgcaacaatgatctaaaagatggtagaaaggttgaaacagtacaaagtttgttacttaacaatattttcttttttatttcgaaccctagaatttctaaattcctttctcatgtgcaatatgagaactatttctaattagtatctaaatggatcttaagaaagtgactaggaatctgtaatataagtgctaaataaggattcttggaatagaaacacacagcaagggaaaaatctagtattcgaatctaaaggtattaaactgtctcagggaatttaggaggtcaggtagcacaggggagtagaagcattctatgggtatcaaaacctgaaagagaatggaaaagtaaaaaaataaaaataaataaaaatttaaaacttaattttttaaagtaaaaaataattcgcgttatgatagaagtggggagaagtgaaagcaaaatacatcttggtggggaagatatagttgagtgtctttttttaaatatgtaatagcgtatagtgtctttgattataaggccagtataaccttgatagcaaaacctgacaaggatactacaacaaatgaaaattatagctcaatatctttcatgaacatactgcaaaaattctaaaaacagtagcaaatcaaaatcagtgacacataaaaaggatcatgtcttattaccaaatgaggtttattccaggaatgcaaagatggtttaacatttagaaattaatataatttcccacattaacaaaaaagcagaaaaattacattatctcattaaaggtggaatagcatttgataaaatttaatacctattcaagataaagattagcacactaggaataaacagtaacttcctttccctgatagagtaattaccaaaaatctactgcattatctttttaaatggcaaattattgaaagctttcctcaagattaggaataagaaaagaatgttcattatcaccagtgatgttcagcttagtattggtggtcccaaccaacctaataaggcaagataaattaaaaagatatagagattggaaaggaagaaataaaactcactattcagatgacgtgagagtatagaaaatctaaaatctattattaaaattaagtgaatctatttaacaagttggctggatacaagatcagtaaatatatattttatttatattctcgtgacaaatagaacatgaagtttttaaatgatgctattaactgatttttttaaatgtcaggtgcttaggggattagtctaaagacagtgcagtattttgtcataatgatagacagcccagtggaacataatggagcagaaacaaacccacagcatatggtcttcagattgacaacagtagagtcttaaaagtatggtcatttcaataaatgacgctgggtcaattgaatatacatatggggaaaaactgaaatttgacccccttcctcataccaaatgcaaaaatcagtataagacaggttgtagatttaaatgtgaagagtaaaaataaggaacgttttagaaaaaacacctaaagagtatcttcatggccttggggtagacaatgattttcttaaacaggaaacaaaagcactaactatacagtaagaaagtcgataagttgggctacattaaaattaagtttctatttatgaaaagaccactaataaaagaatgaaaagtcaaagaatgggaatagatatttacaatgcatatatctaacaaaggactcttatccaaaatatattatttttctacattgtatgtatatatccgaaaaaacacagagccgaacagatacttgagcaaaaaagttgaattggtcaataaacatgaagtgatttaccactttatcaatcttaagggaaatgcagatttaaatggtagtatcataccatctgacacccaccagttgattaaaatgaaaaataaggaaaatagcaaacatactttaactctcatttagtacttacagaacaaccaattatgaaaactggtatctattaatactgggcatatgtataaactacgacccagaaatctcacttataggtatttatcccaaagaattgtttacatgtgtacaaaatgtagtactgctcctaatagctaacaatgataacccaaatgccattaacagtggaatatgttcattttgggaaagtcatctagctctgcactagtaattagtttttttacttttatatgtgtacattaaaagaaaactaatgtacatggaaagctatctgcttctatgtttataacggacatatggtaagatacacaaacaattggtaacattgcttgcctacagggtttgtcttttgaaccatgtgaatgtattacctattcaaaaataaatatagtcatgcattacataatgacattttagtcaatgacagacacagacttcttattgcctatgacattatggccattctaacatggtggtgcaatgcatcacatgtgtttgtggtgatgctggtgtaaacaaacctactgagctgccagctgtataaaactataacacatattaagattgtatacagtacatagtattttgataaacgtgttaccacttattctttgttattttagagtgtacttctacttataaaaaagttaactgtaaaacagccaggcaggtctttcaggaggtattccagaagaaggtattgttgttattagagatgacagctccctgtgtgttactgcccctgaagaccttccagtgggacaacatgtggaggtggaagtggtgttgattaccctggccctgtgtagacctgggctaatgtctgtgtttgtgtctttgtttttaacaaaaaaagtttaaaaagaaaaagcctacattttaaaaatagaaaaaactgatagactacagatgtaaataaagtatttttgtatagctgtacagtgtgtttctcttactacaaaagagtcaaaaactttaaaaatggataggtttataaagttaaaaagttctgctaagctaaggttaatttattagagaaattttaaaaaatagtgtagcttaagcatacagtctttatgaaatatacagcaatatacagtaatgtcctaggcctttacattcactcactactcagtcattaactcacccagagcaacttccagtcctgcatgttttgtttatggtaagtgtcctatacaggtgtaccgtttttgatcttttatactgtatttttctatgtttagatacacaagtacttacaattgtgttatagttgcctacagtatttagtacagtaatattctgtacagttttgtagcccacgggcaataaagggacgtagtaggctctaccatctaggtttgtgtaagtacactcttacgatgttcacacaacggaattaatgatgcattaagcaacatatgcatcactaagtgacacatgactgtactacagtttattaaagattatcatttgttatagtaaatgctaatggactggattcttttaaattcagatactatcaagttgattaaaacacaaatcccaattatatatcatttgtaagaaacagacttttaaaaagttggaaatagagagacaaggagatcttaagaaatttttttttttttagtgataagttggtagtatgtgaaatgaggtggaatttatcttaacatctaataaactggttgatgggggatgttatggtataaggcccagtttataaagtagaggaaaaatggggtacagtaggagagctaagggtcataatgccaaccgtatgcaaacagtgtggaaataaccatcctgaaggttttatattctatgctacagtatcctttatagcggttattgaattttaggattataacaagtattactaattctaattttattttttagggtttttttggtcatttataaacaaaacaggtttctgtttaaaaataatttaagtactatggaaggagtgggaggagtttaacgttggctgaagttgaccttccctctgaggttctcacagtcctgcttatcaggagtaaccaccattaataagtttattttataatcttctagaacctattcacacatttgaaaaataatattgaaagaaaaaacttaagttttgttttagaatattttctttaaaatatgtagcattttcagcttcatcatacacttgctttgtatattaaagttctgtgaaattgatgtttaatgaacactttatattgcacaggttttagaattacttcttgccttctgttcagtgactcagctgcgccatatgctcactcagatgatgtttgaacagtctccacctggcagcgccactctgggaagccatactaaatgtttagaacctactgtggctctactgcgctggttaagccaacctttggacggatcagaaaactgttctgttttagcattggagttgttcaaggaaatatttgaggtaataggatgactgacagattgacttttctacttttgtgactctcagttaacaatttgtcttcaaaaacattctttgtaaacttacagttcatacacttgaggaaaacatctcaattactaacagtcatactagactcgctaggtttttttctgccagtcatatatattagtgttttccttttttttcactgagtagtgtgtatgtatatatatatatagtgctcatttcagtgtaataagtaaagatattaaaaagatttatataatttgttgcctgactactggggatagttacattgtctctccattgcaatagatgccatctaccaagtttagtaggccattgaatggacaatagaggcatattggattcagtcagtgaaatggagtagagcatgccagataatgtgctaggcacttaagatacagacaaaactccacattctggtagatcttactatctgggcaatttaatattctctactattctccctgtttataaatccattctgtctaacccaatatctcctgaaagtatttcccttcacataactgggtcttacacacaaacaaatatgtgtatgaagtgattaaatatgttcattaagaattattcacaaaattttctattttatcttggtcttgattatttaacaatcagttttaacatttaaaaagccctttgagggtcttgagggaaattatttgtggtcataaactattaagaccaatgtctattatttaattattgttattacttttagcagattcaggatatttgttttcagtagatacttttagtttagaataatttttaaatcacaaagtctgtttaaaaaagtcttatttgtaaaaccttactgtctaatttgagaaaaaagccatagccctcaaaactggttagaagtataaattttaaataaaaatttaaatattcacaggagacttaggtcaatggcatattgaaggaaatataaaaaatttaaagagagtgttacaattcagtgatgactttttctgtattgtatattccatctttgcttttaatcatttgtgatggataattctccaggatgtcatagatgctgctaactgttcctcggctgatcgttttgtgacccttctgctgcctacaatccttgatcaacttcagttcacagaacaaaatctagatgaggctttaacaagaaaaaaatgtgaaaggattgccaaggccattgaagttttgttaaatatcctttactgtcattaacgtgaaaactgtataactaaccattcttttttttctagtattgcattcactgcattttgtctttatttgtaatttgtcactttatgctcatatttatctagaattactgaactaaaatttgaactgtagaaaaaattctcaatgagtgaaaaagatccatgattttttttccttatttttctgtgtgaaacttttaagttaaagtacattttttaaaatgctgtttaagcttgattttgacacttgtatcacaatttgacatttggtggtaaattctaaaatgactattctgttactccatgttactgttttctgcttgatgctaattatttcccctggacggacgatcagtagtgccattttttggtgatgtgtattcgtggataaagaaatgctgatagagttgtcatgattttagctcagttgttttaccttatgttttaaaaataaagccttcataattgctttaataatggttataagaaaagacaagtatatcaacacaaattcattcatttaaaaagaaaccttttagtttcactgcttaacttctatatactgattttctaggtcttccttgtgtttactttttcatagaccaactaattctgagttgctggaagtcccaattttaaaatatttcattaatacttttttactatgagcaaagagccactgtatctcaaccagatctcttaaatgtatctagtcaggtttccttgtatctcagagcaacaagaatatgttctactctgtcctagagcaaactccacccctgtttaatatcctcttctaaggtactgctccttaattttcttcctttaaagcagtgactttcaaccctgatttcctacctaaaatcacctggagaacatgtaaaaaaaaaaagaaaatcgatgccagaaccttacttcaagagtttctaatttaattggagtgatgtgaaaccctgaaatcattaggtggtgtgtgtttgcatgttggcttttttgtttgtgattgtttaaactacctggttgattctaacatgcagctaaagttgagaaccactgcagtagggatacatgattgcttgaccttggagatatttataattaataaagtggggccttctcattgaattggaccacaacttttaaaataatagctatttacattaatttataatatacaaatatgacaaaacaacttacccttattcaataaatatttattgaaccattgagattcttgctaacaaaaaacagacatccaatggaaagatatcctcgctgttttaaccattgagtcagaaacctttggtgccagtccatctcttaccacttgctagtcatttaaattgtgtgagtttcagtttccttgtttgtcattgagctaatttaacaataattatactggatgacagtgatgatataatttgtatgaaatcatcctgaatgttatcttttacacataaagtgagaatttttttgttgtatatcttaacaaaacttaacctctctgtggagatgatacactaaaaatgcatattgcaaaaatcttgacaactgtcaagtgtaccactcttatagaacaacaatttacatatggcaagattgacctgggatttggaacaaaggttgcagattctgaattatggtgagtatataaactctaatgacaaaatggcaaggcagtaaaaaatcgaaagatgtggtgattctcatccttttggaggaccatcctttggttataacttaagatataacagattaacaaacatattttcataatgaattttttgtaaattcattcaatttgtagattgtgtgctttttgaagaaaggtattaacatttgttgttttttattgtttaggtttgttttgtcttgttttaacttactataattatctaagggttctgaacatttctggagctcctttttgacattgcctcagtaatcaattttacttttttaaatgaaaagcatgaaaaaacagaagagtagttttattacaaggaaatcagtcactgctaaaggctttttaataacagacaactctccttccttggcaggtcaggaattatggttaaaggtggattttcactgatggtaataagatattactttataccccttccctcctcatgaattaagtccatctaatctttactgaggacctgctgagtggtagacactatgatttgtttctgtttccacagatgtcacaattgtcagtaattgtggacctttagagtaagaattatctgtttttatatttgtatactactttcaggtacaaaactcagaacatgacctagtgtaattcattcattacgtattagatattctatattgcctaaggttaccgtctgttgttgatattctagtgacaaagctaagaattaaatgaactgtgtttcgaaactactacttacttgaaacagaaagttgaagcaggttggtagtaaaagaaacactgtctaaactaaggctattaatgccagtttgttctctttggatcttgagttataagaatgttgattgagatttttacttctcaatagaaacaggactttatcatcttgaatttaaaaaacacaagtgttggtttttttcattttctttagaattttggacagaaacaagctctaagaaatttttcagttatctaatttaaatgtgatttatctttaaagcaaacttgctgctgatgtaattttgaaaactcttgatttgattaacaaacttaaaccattggttcctggtatggaagtaagcttctacaaaatacttcaggtgagtttaaactcttcaaacattgaagtttattcatacataaatggtcctaatataagtttctgttttaatattcttaatctttagaagataattctcttagaattggcaatgagaagaaagtttaaagttgttgtcttaagcagttataatagtctcactgcacagttattttatatactttcacaggaattgaacataagtgctcatgacactaatgtagagaatgttcacaatagtgctgcttcctcagccttttcctttcttgtgttgtatttgtatatttcttcatttgtttctgttggcattggaggaagagtgatatttgttttagggtttttgtttttggttagggttgatgtagggtattaaggggatagggagacagctggaagaaaaggattgtgataattagaagggctgtgcagaaaatagctaactcacaaatttcaatgataatagtagctgaatatgatctctagctgttatcaaaaggcaaagtacaacaaatttagttcaaagttctaactggcttttatttatgattctagaatttggcagcctcattctataaaatagaatgaatcattcccctgggctaagcagagaaggttgactttatagaccagaaaagggctgaagaaagcacaaatagggaactaaaagcagattggtcatttcaaagttacttttcctatagaattataataaagggggcttccttattatactaactcaggttgactgaaatctcctggttttttggaaaactggcccatttcaaagtgcagtttgattacatggcactcatccaagtgactcctttctggtttgatctggtctgctaaagcatagtggaggagactactccaaaatattagcctcttaaaaactttgtgtaataatatctacaacacctacctttacaacagatgtttaacaaaaatgagtgaattaaattactgcagtagcttaacagagacatctctagtgactgtatagacagtgtagaagccaaaactgaaaccttaggcagggaccactggcatgttttgagattaagggactgagttcaaatgttgactctactggttcttagtacaggcttgagtaagttatttcacctctctcgacttcaatttcctcgactacaaactggaaataatgaggcttaccattgagggttttggagataaagctctgctcttatcacagttctgtgacactggattatactcaagtacctacaaggtactcaatattttaattataagggatttatattttaatattttcttcactaatatctcaatgtatttttaaaggagtcaaactgatgttatgtccattatttaagatgtttttcataatacaggttgagcatccctaatttgaaaatctgaaatctgaaatgctccaaaaaacaaaacgttttaagtaccaaaatgaggctcaaaggtgatactcaaaggaagtgctcactgaagcattttgggtttttggattagggatgcccaaccagtaagtacatgtaaatattctaaaatctgaaaaaaatcagaaatttgaaacacttctggtcccagacattttagatatatgttgatgacttggggcttacaatactaatgtaaaatatttactgacataaatgattgaagtaactgtattttttcgatctttaaatttaaatgttctaatttaatttgaattttactttttattttatagccttaatttggaagtgattggccatttttttcttttaaatgatagcttggaaaaaaacattaattctacacatcagtcagttgtgggttttttaatccacgaaaatatataaggcataatttttataggcacatttgaaagcattcaaaacctttgccagatttttttaaactgttcatattgattgcattgcagtgtaaacagctataacaaggtataatatattcaaactatatagactataatatattcaaacattagaaacattttagaatttgcctagaattaagatttacatatatttactcacctcctatctaaaagagctgacattgtttattctttctgctgcttcttttttggtttctgatttatttaggacccacgtttgattactcctttggcttttgctttaacgtcagataatagagaacaagtacagtctggactgagaatattattggaggctgctccactgccagattttcctgctttagtgtgagttgtaatcatttgcagtgtatctcttgtggtgttggaataccctgctatgtctctttagtcctcagtatagatacacaagcaaattagtgaattgaagacttcattgtaatagtaatttttcaagtgatttctaaaaatgtttgattcttataaatgaaaagttcagatgtatactcactcagggaaaagctagatccaggcagttaaatgttcttcaggtactatccctctatgtctctagccacttctttttaatgataacttctggacactcttaagcctacatcctcccagtttagttcctccatagaaagagcttttccttcctgactgtttaaggaaaaggtctaagcattagtcattgaccaggcctgggttatccatgagaacgatgtggactaaaagttagttgggataggagaataggagagttcctaaagaaaaaaatctgaacttttatcagaaagtggaaaaatgacaaccaggcaaaattttctactatactcgttactttcaagcaataagaatatttgcaattatgtttgaaaaaaaattcagatttcagggctctctgaactaaatgtctattaggagtctggtttaaaatttttttaagtcatttatatgtatgaatttgtaaaaatggtttgaataatttgaagtagttgataaacaggtaagatattccctgtataccgggatcagcaaactggccagtggacaggcatctgtttttgtaaatagttttattggaatatggccacacccactcatttttatactctgtctatgttgctttcactctataaaagcagaattgagtaattgtgacagagaccagataggtccttgagtctaaaatacttactatcttgacctataagaaaaagtgctggtccatgctatatgctattcactgatttagcgattccacttttcagaattagcaatttaggtcatcataccttaagagttaaagtatgggatgtaagacctagagaacatataaccaaaattcccttaattttataataaatatttttttaacagcaacaacaaaaatacacaggaagcttttcaagttacaagttaaaagtggtctgtaaagctgctctattttgtgatggcctgcttgcataaactggtaatctgacatgaaacaaaaccttaagagcttcaaaggggaatctgcagcctcactgaacatggaagtcttatcctctgcctctgtgtgtgaggccttcccaccattttgactgtgtcttggcattccctgtcttatttgtgttgtaaataattttctctttgggcattatctcagatgtccattttatgcttactatttaatgcccttatttgacattatcttgggcgtttaataaactgaatgtatattatggatgcattggtaggtagggtttttgtgtgtgtgtatttacttgtttgttttcgagacagggtctcactctatcacccagactggggtgcagtggtgtgatcatgactcactgcagcttcgacctctggggctcaagtgatattcccaactcaaccccctgagtagcggggaccacaggcttgtgccaccacaactgcttaattaatttatttttttatagaggggtctcaccaggttgcccaggcttgtctcgaactcttggactcaagtgatcctcccaaagtgctgcggttacaggtgtgagccaccatgcccagcctataataaattaggctgagtgcctgccatcttgcagtttgcactttagttaagagataagtgaaaaaaatattttgttttgtggtagaaagcgtgttccagataaaggaacagctcatatgaaggcctgaggtaggagaaagagaggattttaaagggttagaatggaagtcaggttggtgaaaagtatgtactgagtgagaaaggaaaaggactaaggacgtaaaggccaggtgatatcacccatgataagaacattattctgaccagtaccaataactttgtacttattacagataatccacactcataaactagtcttacaatgcctccaaaccagaggtgaagctgtcattataaaaggttagaaacagaaaagtgggtgctctggaaaattcagaatatttcccaagacttcatttcatcatggtctccaagattatttgaagacttctattcaaaaaaaggacccattcttaaaaattccctaattctgcactaagtctgccttttcttctattttcgtataatttttttttcctttctttgactcccattcagacttggagaaagtatagcagcaaacaatgcctatagacaacaggaaacagaacatatacccagaaaaatgccctggcaatcatcaaatcacagttttccaacatcaataaagtgtttaactcctcatttgaaagatggtgttcctggattgaatattgaagaattaatagagaaacttcagtctggaatggtggtgagtgaaaaaatagcaattataacctggtacatattagctatatgtcagtcccaattataacgtgtatctaaacactgtcaggtacagatttcactattgaaaccttaatataagaaataacaatattctggaaaatttggaaataagaaaaatcagtcaaaatttcaacattttgccgggtgcggtggcttacgcctgtaatcccagcattttgggaggccaaggagggtagattgccagagctgaggagttcaagaccagcttgggcaatatggcgaaaccccgtctctattaaaaatacaaaaaattagctggacgtgttggctcatgcctgttgtctcagctactctgaaggctgaggcaggagaatcacttgaacccaggaggcagaggttgcagtgagccaagatcataccacttcactccaacctgggtgacagtgagacccatctcaaaaaaaaaaaagaaatatttgtgacttacctgatgtagcatttgtttttattttgttactcatcattaagttttaatgatttagttttgaagtaggcatttattttgtcattgtgtcaaaatattttattaaaattttaagtttttttactcttaaaatgtaggtaaaggatcagatttgtgatgtgagaatatctgacataatggatgtatatgaaatgaaactatccacattagctgtgagtataagcttattttaacaatgtgtaataagctttaatagatgtattcctaaaatgaaaattaatgatatgttttcttgtagtccaaagaaagcaggctacaagatcttttggaaacaaaagctctagcccttgcacaggctgatagactgattgctcagcatcgctgtcaaagaactcaagctgaaacagaggtgtgtagaatataaagacacatctgatttgtagaaaaattaataagtaaaacatgcaaaatattagttatgtatttgttactctaattgaagtaaattctccttagcatttgacatgcctccttccttcttcctgaaattctgtcctctttaattttggttacatcgttacctgatttttttttgctaccttgtattattttcctatgttatttattttgtacctttaagtgttggggactctgggacttatattctaaacctttttcctttagttatgtgttctgtggtttcaatggttaccaaaatagtaatgttcctaattttatatgtcaagcacagatcattttcctgagcactatgtgcctatgttgctccatttaaatatacagcaaataccacaaactcagcataaccaataatgaactaatcacccttccctttttaaaattattcttatgtattccctcttctgtttttagtgttctacaaataagaaccctggaaatcacagtttttacctcctataattattcaccaagtccagttgattctaccttctaaatattactcttttctgccctatctctgcttctaccactatttgttataggctggatccttttcattttttgtatgaatcatagcagagcaattagtcttcctacctgtagtcttctaccctcttctcagatactctacagccagtcatctttccttggttctacccccttcacctagccgctcccccaaggatctctaaggcagtaaaatgatcctgtccctcttgtgctgagtatctttcacagtagctgctattgctttcaaatatcattaaaattctttagtttggcatataaggattctaactatataggcctcaatccacatctttcatttctgcgcattctttgcagtcagccatgttaggccactttgctttttctgaaacttgacatattctcgtatttccttgtcgtggcacttgactttccatgtctggaacaccatttcctctcttctgcctaactcataatccttcagatttcagttaaaatatcctcattacccagaagcctactctggtctccttcccacacgtgtttgacgatccttcctctgtgtatcaaacctacgcttatctcttaataacatttttcaaaccacgtggaaattcttttttccctcactcatggtatcaaagactgcttctatagctccaggccctagcatagcacttggcacataataggtgctcagtaaatttggcattgtattatgtacatatataatgtataccttaagagtgaacttactgcagtaatatgaaattcccagcagatacaaatggaatctatacaacttgatattatttataatgaatgaattataataaagtgttcctggcttttgaaagatgcatcaaaataagtgactagtaaaatgcctcttaagtctcttcagaataatggtattctttttttcccccatatttctttcttttttgcttattttaacatggtttcatttgtcttaactggtatgttgaatttgtcacaaattacaagaaagaacattagtgatattaaaataatttttccctctccccatagcacattcttatattttctgtctgttggacatgtcttgtattttattagagagtttaatattttattcatgttactggaaaagttcttataaaaatagcactaaataactggatacaggttcttcacaaagtcgtaaaaacagagaaaggcttagggttttgtctagcattgtaaaataaaatccaaagggctggggggaaccaactttttattctagcgacttttctgcttttttagtgtttcatatcacataataaatacatgcaggttatggtataggttacattctttgattatactagcttaattttaagtgtttgattaagcatctgtgatgtcgttaagattttgttcttaattctcacctgaaatgagaatgctgatggtgtgcacacttagcagtttagtgttaatggctacctctgaggaccatacctttttaattgaatactgtatgtagcgcgaccttcatgttgctgcagttgtatccatttccattaatttgatcatagtgagattgtttttatcagataatgtattaagttaaaaaaatataacagtatccaacttattagaagtaaagtcctaagtatatgtgactaatacagctttgcatgacccaacagataccagcttattagatacttagtaaacttttaaattgtaggtatgtgttgagcatatgatatagatgatagtggtaaagtctatcttctttttttttttgaggcacggacacttgctagtatgttgagagaagttgagagaaaaaatgaagagcttagtgtgttgctgaaggcgcagcaagttgaatcagaaagagcgcagagtgatattgagcatctctttcaacataataggaagttagagtctgtggctgaagaacatgaaatactgacaaaatcctacatggaacttcttcagaggtaaataaagtaaaatcttctgtgtaaggttagaacctagaatgaacatgcagcatttcttttctgagacccgaaaatccttttgtaagcatttcatatattctgataacacatgaggtaagtaattagcaagaaacttaagtcattgtgaaatgaagtgttgcttcctcaaactcagtatcaatgttggaaacaaaatacaggtctttccagttgacttcttttatgtattcataacagtcagcagtcatttgggagataagctccacaaggacaagtttgtctgttttgatcactgacagatccctagggcct

SEQ ID NO: 318 - DNA, 32742 bp, Homo sapiens
  source 1..32742: mol_type = other DNA
gatccggtcgggctccggaagtccctaggcaccctaggggaccgttctcggtgacggccggggtgggccaggggtcgaggtgatttgtgggtccaggacgggggttgggagctgcccccgctaacccaccctcgtctgagaggccgcgaggtttcggcctgagatcccgtgaaggcgagaaatctcgcgatttctcgggagaggaatcggttaggagaagggggattcctcactcagctgtgcgctctgatttcgtgcgcttcctcgtccttcatgttggatggccagtttttcgtttgtgcgtcatcctctacctgagaaatggtcgcttgcccctagtctagacacggtgaggagctctgaggagaagaatcttgggccctagattttgaggcggcctgggaggggcctcgtttttaaatctctcctacacccgccccttctgcccggggatggtagtttctcagagtcaacctattggcattatgtggcaaattagtcatgccctgaccaaagtatttgtcacatttattcgagaagactacctcctgctgaccctgggccaggtattgctccggagggtgttactcgttagcgtcagtttttgtaagtgaaggtgtctgtttctctctggcatgattgattgttttataattctcgatgtctacgaaaatggcactattatttgcgttttttaaatcggagatagcttaatattattgcatgtgtatgtaatgaagcgagtcagttactggttttggagctttttgcttaatatttcctaacgtcgaataaagctttaaaaaccaggatgtagaaattgtaagaatagggtacatttccatttaattaaatcgtttatcagaaatcatgttttttcacttcaaaagaatttttttgaattactagatttttgaagacaggtttggtgttttggttttgttttttataaaagtttaaatctgaaagataaaaatgatttaaccagttgggacattcatgtaaaaatctttgggtagcttgtgtgttcatttatgctttcattcattccgtaaacaattatagagcgtgtaacatgggttagaaactgccagtcagggaacagagatgaagtagtatcccctgctgcgagggaactgtctagtaagggaaacatacaaaatagtacttttgaaattcaccacataaatgagaggcaccatgcagtaacatgcagcagtggtaaagagtagagagccaggttgcttacagattctagctccacctttgacgatgtgactctaggcaagttctcactgctgcagaatcttcattaggtaaaatctggccaagggagatacctggttcataggactgttcattcaataagtagttcattgagaatctacaatgtgctaagcacttttctagacacaatagactcagtgaaaaaaacaaaaatactactggcatgcaacttacattttggtagggaaccaaataataaacacaataaataagtaaggaaaatgatataaagagaaaaatagacgttattactctagaataatgttggtaattgataagggaaatgggaaggtgacctcattaagaaagcaacatttggggaaatgcttcaaggagttgagaaagggagccatattctatgggaaaaggtttttagatagaggaaatggcaaagaaagaccctaaagtgggatactgtatgccagaaacaaggatgccatgtggctagtgtagaaagaacgaggaggagaggagtagagatgaggtcctatacggtcttggagatggttaaaaaatgaattaatgtaaagtgtcagctgtcatctggcataattaagttctcagtgttacagtcagtgcctcattggcaaatgaagtgatcagagtttgatagtgttggacttttcatctgtgatgatgtgtcagcatcgtccccattcagaggcccagggtaatgcgcaaagctgcgtgctatcagtgccatctttgttggattttgacttaagcagtcatacaaattttgtattctcttctgtaattaatatcaaatgtctttctcaaaaaatcttcaccaaaattgatgttgtaagtttagtaagagggatcgtttctagctgtgataagtcttgacatttttaatcagagatacttgcatatcctaatttgagaaacaccaatccatacttttaggcctcaaaaagggaagaaaaggagcaggaggccaggagcagtggctcacgcttttaatttccagttttttgggagactaaggcaggaggaccttgaacccaggagttggagccagcctaggcaacatagtgaaacgccatctctacaaaaaatgaaaaaattagccgggcatgggtgtgctcacttgtagtcctagctactctggaggctgagttggggggatcacttgaggctgcagtgagtgtgattgtgccactgcactgtagcctgggtggcagagtgagaccctgtcaaaaaaaaaaaaaaaaaaagagatgagtctgggtcccaatgaccaaaggccttattagccttaaacttggactccatcttgaagtccgtggcaatctctggttttaaactggcacctggtctagtcaggtttgtttttagattgattactctggtagctgaatgaactatgattttggggaggataagactggaaagagggacactaattttctggaaccttctaaaggataaccaggataattgaggtggagatacaaaataggtgacaaattcgagaagtatatatgaagtaaaataggtaggatttggtgactgatagtggatgtgaggcatgaagagagggatgagtctagcagatactaagtttttaggttggatgaatgagaagatacagatactgctgagttagttaatagaaagtattaagggtgtgccaggcgtagtggctcatgccttttattccagcactttgggaggctgaggcaggaggatctcttgaacccaggagttcaagaccagcttgggcaatatggtgaaaccccacctctactaaaaatacagaaaattagatgggtgtgggtggtgcatgcctgtagtcccagctactcaggaggctgtcatgggaggaacacctgaacctgggaagtcaaggctgcagtaagccatgtttgccccactgcactccagcctgggcaatgtgggcaacaggagggagaccctgtctcaaaaaaaaaaaaaaaaaaaagtattcaggttatattttatgttcagtgagattttatatagtttgtcatactgtcttgttccattcttattatgtttatttatcattacgtttattctaatagagattggtttacttagactttctgcctatatatcatctgcaaataattacctcaccccttccagtatttgttgtcttacattattgcattagtgtaagctccaaaatatggaaaatcatgttaactttgaacagcttttttacataatttaatgagaatgaacagtgttttaacacagtataatttgtgctattggcttttgatattcatcatgtttaagagattggcttttatatctgtttcattctaaaaaatgtctgccaaaaattatccagttttcacatttatatattttatttttcactttaaaattataacacagtggattatgttgcctttttgttcttgggataataatagtttacacttattgagcatttgccatgtgccaagcactgtcctaaggactttctacttacctatctaatctttataacaaccccatgctgtaggaactattatgatttccattctagagatgaaaaaactaagataggaaggggaagtaatttgcccaaggtcacgtagacagtagtaacaatcctatgtttttctttgcttcaggttttgatttgctggtattttattcaggattttattatatacctgttcataagtgagcattttcagtaatatttttctttattctcacatcaaatttgaattatatgttaccattgaaaaagaaattggaagtgtttcatctttttttatgctatgggataataagaatcatagaaattatctgatccttgtaggctgtacacagctgtcttgtaaaatcattaagcttgatagcttatttagtggtagatggtagaaatttagcaaatatttgaatttctttctttttttttttttttttttaatatggtttcactctgttgcccaggctggagtgcagtggcatgatcacggctcattgcagccttgacctccccgggcttatcttcccacctcatcctccctgggaacacaggcatgccccgctatgccaggataatttttctattttttgtagagatggggtttcaccatgttgcgcacgctggtctcgaactcctggtctcgagtgatccgctcgcctcagcttcctaaagtcctgggattataggcatgagctaacatgcctgagcttgaatttctagtatagttacggatctgatcatttattctgcctttccttaattgtagatatagagctttttagcataataattgcttctctatattaaaaatttaccgataaaaagttgcattcagcattccagtaattctcttaatctcttagtagttttaaatttccattttcattctaatgttatctatatttttttcttagttgggctttccaagggtttgtccattttattcagcttttcaagaaccaactttcattttattaattctcatttttctttgatttcagaatcaccactgttgtctttattaatttcatccgtatacattcatcttttatttactttgttgtttttctaggtttttaaaagttgaagtcttagtacacctaggtttttaaaagttgaagtcttaggacatctctctctctctctctcccccctcccctcccccctccctccctgctccccccccatatatatataactttcaagtttggggtacatgtgcaggtttgttacataggtaaacttgtgtcatgggagtttgttgtacagatgacttcatcacccaggttttaagcctagtacctgttagttatttttcctaatcctcttcctcctcccaccctctgccctccgatagtgcccaatgtgtgttgttcccctgtatgtgtctatgtgttctttccgttttgctcccatttatgagtaagaatatgcggtatttgattttcttgcattaatttgctaaggataatggccttcagatccacgcatgttcctgaaaaggacatgatctcgttcttttttatggctgcattccttagtatatttttaaataaaaatcatttattttatgccatgtattttatattttggttttgttttgtgtttttttcttcacagcagaaagtaaaggctaatagaccaaaaacttttaaaaagacagtagctaaagtaaacatctccatttcacttaaaaaatgtataatagttttaaccagtcaggtaaatacatttttaaatgctaatagtcatttattcatcaaatgtttattgaatgccagttctttttcaaagagattagattttgttggtgaaatagacaaaccagaataagtactgttaagagaaatagaatactgtggaaacacatggtattttttagggtaaaatattaagtatccacttccttcattcttcaaagattagcataaaatttctctttgtgattttgttgttgttgttgttgttgttttgtaggggagacagcatctcacttggttgcccagactggagtgcagtggcatgattaatagcttattgcagcctctagctcctgggctcaagtaatcctcccactttagcctctgagtagctgggactacaggcatgcaccaccacacctgcctaatttttaaattttttttagagacagggtcttgctatgttgcctaggctggactcaatctgctggcctcaagcaatcctgcctcagccttccaaagtgctgggattacagacatgagccaccacacccacctgtaaagttttattacttgtctgtactttagattttgcatagatattttccgtaatttatagtttcagaaatacacctgatggaagtaaataacacttgctcggcatcttgtaactcaaatttagggctgtctagctcctttatttcttctggaaaaatctagaaagaacatattgtcttctatcctgaatatataatctctagtaaccagggtttaagtaatagtagatgaattagactgaatgaagacttgaattatagctttgacagaactgcagagtttgcagaatactaagttttgtaatatgggaattataccggggtgtgaacacagggctaattgttcattcattcatctcctgtatatttaatgaacacttgatgctaggtccatttctaggttctgggaatacagcaatgaatcaaatagacaaaaatttctgcccaagttgttttcttataatggaggatatagacaataaggcatataagtaaaattacatgaatgatagcggtaagtattagggagtgaaaaaagggaggaggaataggaagtatcaaagtcaggataaggtgttacaattttagataggatggagtactaattgatgtatgccaaataacaaatcacctcaaaacacagtggttgagaccatgagcgtttatttcttgcccacagatttgtggttgactgcagtttgtctgctccaggcctgatttgactgggtggctgtgcttcagccttttcgtggagaggggcagatacctggatttctatttaggttatgttgtgatgttagacatccaggagagattgagtaggctatcaaattactggtagttaaaggagcggtcagggttggagatagaaattgaaagccttgagactaaatgatataggaccaagtatggatagaaaagactttttaggactgaactccctgatatttaagtatttagaggttggagaagtgtggaggaactggcaaaggagacagaagttaactgcaagaagacacaggttctgtcttgacgccatggttgcctacaggtaccagctttacttgtagcatatgagctgcctcttgacttctaaaggagaattttaggttggccaagaaggctgttacaatctacacacgggctccctctttacatctgccttcagaggccttgaggtgtgcagaagggtgggtgagttcattttttaaagcaatattgagtgcttaacgtgtgccaggtgctattctaggcaccaaggaatgaaaacaaagttttcctaacttcatggggcttatattctagtggggacatgaagccaaatctaaaactgagggattattcagtagacataaacggctggtagaacaaaagtttcactggcccagtttctaaagcatgaaatcagaaatcctgcagtagaaaattggcacaggtctaggcatggggtcatttagataaccatgtgcccaatatagctaaaataattcaaatgctaatattaatctgattctaccccttatgcagagtcaggaaactaagtgtatgattagtgtcaactcatatttttcagaaatgttacctttgtcacaaagccagaaaatctaaaaaaaattaattctccttttacaattatttttcctgttttctttcacaagtatcaagtattacagttcagctaaactctaaatgatttgcccaaccatgaagttaactttcacttttcaaacagtttctgctttttctttttatacatttcacagcattcaactttaggttaagagtacaaggtttgaatattttgagtatatattcccccattttcatatcttataccacatctcaaatctaatcacatctatcccagaataagaatgttgccttgccttttttttttaatgcaagtactatccattgtttctgaatccagtgttaagtataagtagagtgtaagtaaagatgaaaatgatatacttttaagttaaggaacagtaatcctggtaattactatttcttgaagacctatcttcaagataggtgcagagcatgggtctttgcttatctcacttttaaatttctggtctttcagaaaataaatactatcaggcttatgaaatgagtggatatctatttcctgaattaaaatgtgaagctgttttcgaagacagtagtgtccagagtacagtatgcacacctcaggggatatgtgaaactgtccattgaggtgtgggaacaaatattaaaacgttttttacttgcttttatcttattctttttttatgttataataattatgcctgcatataatttataagtgaattgatattcttatattttcagcatattctcagatcttttactgttttagggctatgtgatcaaaaaagtttggagatttcatttttaaaaatctttaactttgagagatcatttagccaggtgtgaactattgtccatttcattgtttatttcagtaccatgtatagtatctgaattgttttgttgaatagaaaaactcttagcaaaaactagtgtgactagtgactatgaaatattaggctggcatgattaataacttttatagtattactaagaatgtgtaaatagtttcatttctgagtatgcatatgtgcatattatctagtccagctcataattatacactaagcttatataaaattaaatatgttactagaagtaatgggacatggaagaaaatagaattgcagttggtaaaatttgggcatgaatttctgctcttacggatttattagctatgagactctataagcctcagtttcttaatttttaaaacttattacaataatgtttatcttccatagttgtgtaaagatcagatgtttattcaaggtgcatagcttagagcgtggcacataggagctgatgaaaattaagcttattttcaatgcaacccaaggtaatacactcagttaatactatatgaaaagaaactctttataaccaaaagctcgctctgccttcttacctacacgcttcttacaaatgtatgcttttctgagataacagtgagctgccaattttcttacatggggtggagcaagctggaggtggatagggcaagctttcattggtggtggtagaggcaagtacatgaaagaagtattcccattccctatttgattaccatctctgcgtgcgttatgtctcaggattctcccttcttttctcattatctaacaactataatgacaacataatatttttaaattgctgaaaatattccacctttggagtatgtgcttaggggtagcatatgcttcttccagtggtttctagctacgtttctgaagagtgtggttttagcagtgctatctgtaaatgtttgaaactgatggcttgtttagtatctggatagtttttcaggtaaatcctaacttgtgcatattcattgtaggcacattccaactattcaaaacaaattaatatgtatactataggtttacctgtgtaagtccaaaagtaactaattgaatagatctgaacagaatttaaaacctgcttaagacaagatgttaattttgctttaggaaaggatgtttcccatgttggcagatttgtaacaaggggtgatgagtatacattataaggcacttatttcctggtttaagcagatatattgctaacagtgatctttgcaaagtggcaagagctaacataaacagtgatcttttgggatagaaaatatcttccagtttctgataacttttgcaaagatttttccaccatcatccataagttctggagtttgaataagcaaactgtatgttctttgggagcaaataatattttagctactggtgtctaggtgtatttattttgtagctttaccaggaagttaaacaaattaaaaaatggagaaattaacagtaaattataaaaccaagtaatcagtatattttgttcatactaattattgctaatacaaaataatggtgcaacttgttaacttgttattctttgagtctaacctaatggcctcagccatttttgtctacacagagctcactaacatacgagaaataaagactttcatagtgctgtaaccacagaacaactgcacagtggaccgaatgtttgtgtcccccctcattcagtgttgaaatcctaacccccaatgtgatagtattaggaggttgggcctttgggagataaattaggtcatgaaggtggagccttcatgagcaggattgtaaaaggccagagagctctctcaccctctttctaccatgtgaggatacaaccagaagttagaagtctgcagcccagaagagcacccttatcagaaccaactttgctgacacattgatctcagacttctagcctccggaactgtgagaaataaatttctgttgtttctatagtactttactatagcagccccaatgactaagacagtcatttcaaaagccacaaagaatggctagttattgctgctaatctagcagatgtactcagatcaacaatagttaaaattctgattccaaggaactcctatcacaaaatgtcctgccatgttctttgaaagtgttttcttcagtgtttttaagggttgaagtgaccatagcatcttgatgtgtcaactttgaggagttttttggaattcttttggtaaaatttagcagaaatgataactagcagtgtcagagtctgcttgttaacagacccatgatcttctggagtacatttaattcaatgttgagttaggaaatccagcttttcaaaatagctatcaaaattttaaccaagttgcatgttcaaggtggtggtattacagcattgtttgtaatagcattttttttttttaaagtcaaacctagagacagctgaagtttttaatcaaaggtctggtaaaatgatacatgcatacattggtatatcatgcagtttaaagactaaagtagatgtatatgtgctggtatgaaaaatgcaaggtgctgaacagtgtgcacacattatgttgtcttttgtgtcatgtgatgtatttgaaaaataattttttatcccacttcttaaatctcattaacattcctttccaaacaatagcatttctccttcacagtagggaattagaagaaaagttaattaattttgctgcaaacctaaacagttaaatgatgatgattatgattatgaaaatggtgatgataggaacacttatatagtgcttactacgtgccaggtactattctgtcttttaagcatttaatctttacaaccctatgaaggaggtactgttgtacctcctatggatccctatgttttagataaggaatacccttacagtagtttaagagcactgtaatcactctgtaagggtatgctttgacacacactctgctttgacactcactagctagctgtgtgattttatgtgaaattaataaactttctctgtgcttcagcttccttatctaacgaagaaactcaaataattttgacattaatggatatctgcatactttatgtcattttgctttcttgtagacgtaagtttgtttgtgtctgtacatgttgtataatatcaggatggtcttatttttcttccccagaacaatctctaggtccacttaattaagcttgttaatcttaactcattcatttagctgaatgtttctcaatggagagtaattttatgccccaagggatacttggcaatatctggagatatcgttgattgccacaatggggctgaggtgtgtggatgtgtgggtgtgggtgtgtgttggtggggagctgcctctggcatctggtggatggaggctagggatgctgtgaaacatcttaaaaatgcataggaaaacttcccgtaacagggttatccaggctggaatgtcagtagttccaaaattgagagagcctgatatactgggcataggaaaagttcttaaaaactgtattcctttcctgaaaaagacaaaatatattactttgttttaagttagtagcgtggagaaaagtatgagctttatttttattgttttccacaccgatactcactttttcctcctggcattgtataatctgtaagtgctagagttgacaagggagggaaattcacgggacatccacccacactttgaaatgtaaacttgttggcatattagagtctctatcttggccaggtatttttgaaatcaacccagtagtgccatagatagttgtttttggataaacatagagattgacccttctggtgttaaagcttgaaacttgtatttatttgagtttcttcctcaggaaacgacctttaggcctctcaaaaaaaagtatccaagaactgaaaattaccagatcacttcaccagatgcctctttgcccctccctagttattatttttttgcacattattacatttcttccctgctatataaacccctagttttagtcagtcagggagatagatttgagattgagcttcatctccccagctgtagcacccaattaaagccttcttcctaggcaaaacttgtttcagtgattatctttccaggcggccagcagtaggatctagactgaacccttggtattttggtaacattttagtcaagatgaacatttgagtggatttttataaaaatgtgcctatatacagtttaggaaggtgatagtaacacaagttaaatgtttaagtggattattaaaaaattatgcataagagctgtgcctgctttgacgtgaataaacacagctttaaaaatggaaacaaaatacctttacaactaaaaaaaattgttaaaatttcagtaagtaagagggaaagtaggaactgagagttcaggtagaaggaacagtaaggaaggcatgtcactgtttattaagatatggatggtattaccttatttttcaaccagtaaaacacagcctacagataagatcatcttggttagtggataaaggtgtgctgtaaattgacattgaactttagcttgccctcagatcaaccaacaaggacctaaatagatttctggagaagagcagtctcttaatcccaggaagtcagagtaaatttagtttactgccgacagggaaagtctattgaaatgaatacgctaggggaaactagatttacctttcttttttttccttcatgttaacgctttcttaaaaggtttcctcttctagaatggtaaaaacctttgggttattttagcagctcagtggtgacatttcaggctgactgcttccttttggttgctaggcacttcgcctttctcgcaacagaggctgtaaagtgctactgctgttgctattgctggtagtgtttgccacacatacctgtttagctcctgggaaatgatgagattgatgattctttctcctggaaaacctttcatcacagagattcatctcaggttgtattttgagcaagctgaaaaagccctagcctttcttaactctgttaattcgggatccaagtatctttttgatttgttgattaattttccacccatttctttttcaagctgaacactgaacagcttagcagaggccttctgtcctctcttatctcatcaccagaggattttcctcccttcttttcatccttgctgtgatctatgcaaacagctactggccaaagaagagcttagcagagggggaggactccaagtctgagctttgataaattctggaaatgaggggattgttatctggaaaaggcgtacatttgtattctctaggtatgaaataatgccttaactgttgttactttttattaaaataacacagagaattatagaaaccataaaagtagtttgatcacagttctaaaatcctcagttatgtctttttctatacagctttattaaagagatgaagcagatctgatctagtgtgaatgacaaggtttattcaacctctctgcttcgttattagctgtagtttgtatctttcatcagtatttgaacagagaatacaaattaaaatatgacttggcttactgaatttttgaaatgagtaaaactatagaataacaattatctaggaaaactgtattcattctgtgtaggcaagatgtaatacagcaatgaagtgtttttgttggggatgagcaagaaattaagagatattagaagaaagctcttttaaatgaaatttagaaggaaatctctctctctgtgtatatatgtgtaattttgtgttttaagatatcagtagcaaattgttgcagaattattcttgtctcttaatactttctgtgttacttagagttggtgtgagtcagatgtagaatattggtatgtggtatcataattaggaatacttgttttacagatgatttccacaggacttcttttagtccttataccaggcctgagttgtcccctcccttgatctaagcttactgaaaagatacacagacctcagggtgttttagatgggttcaggttctgcatttacttcttcctgtctgtggtaaattgctttttttggtgggggaggggcaggatatcattaaaacaatgtttctttgagtaaacacaatctgaattcttaataagtgacttacagttgatcttgtggaatatattttattgatttgggaattaccctatgctgaattaccttttagtaatgggcctagctagaaaggctgtaccaatctaatttatggaattgtattaaatatgctgttacagaaatggctacccaattactggataaataagcagttcagagacaacaaatgagaaacttcatccagtcttgtgcttggcagcaaggcagcctacgtccattttatttatgcagttgctgccactttcttttctatttcttcttttgccccagagcatataacaatagttttatatataatttaacactttccgggcttagggtaggatcagaaaaggaagccagcctagcacaaagcactggagtctagaggcttgaactttcagtaagaagattaaatgggacctgttttagaagagttgttcttggaataaatagctatgtaaataaatatatatacttatgatactctagtctctttgttttcatttgtgttgcctcagtgttatttttctttcaggaagtatccacaacatccattgatatttgaaccacagattgtgcaagtgttctttacatcctgtgtcttctattttatggagatgtagaatcatgatttggggaaaaagtagctacatgttatttgtagactaaaagaaaacaaaacagtgctgtcaagattgtattaagcaggaactcatatatacctcatgggaaataaattagtataaaccttttgggaagccattgaacaatgaaatatttgtgtcttttgatctattaattttacttttgagaatgtattgtaaagaaataatcacaaatgtggaaaaagctgtatggataattgagtttatcatggaactatttataatagaaaaaaatgggaaattaaatgaccaactataaggaaatggccaaggaaatcccaatcaaccagctgttgtatagccattaagaatgtttactaggaggataaaataacatgaaagattcttttgatataacattcagtggtgaaaaatgtggggtagaacatcttttatttaatatgattacaaattggtaaaatatacctatgcttggtaaaaaataagcatattaaaggatgagtagtgattatgtttgggtggcgaaactatgattcattttcttcttttagagcagtttcagattttcttcaaatgatcacgttctgttttcatagtggggagaaagagtgtaactttcctatcttcataaaaatattattttccttacagcattaaagggcagtatttaaagtcagttggcaagcagtggaataagatttttgtaaagaaaccttgtgcagcatggattctctaccagatgaattttttgtgaggtaaggccacagtccccaacctttttggcaccatggactggtttcgtggaaaacaatttttccacggatggtgggggtgcggggaatggttttggggtgaaactgttcgacttcagatcatcaggcattagattctcacaaggagtgggcaacttagatccttcacatgggcagttcacaatagagtttgcactcctatgagaatctaatgctgctgctgatctgacagaaggtggagctcaggtggtaatgcttgcccactgctcacttcctgcttgctgtgcagcccagttcttaacaggccatgtacctgtacttgtctgtggcctgggggctggggaccccagaggtaaaggataggttgacaaaaaccagctgcatttgttgtattcctaaagacataatgtttgttttttccacgtaaccttgggaagccagtatgaacaggaaacccttatgcttcaagacatttcagcaagtttggttagtgggtgatgtagactgggtgaaatctaattttacaaaagttcactagggattacatcctcactgaggagctaagaattgaaaaatgtgccataccttattgttcagtcattctcacaaaaatgttttatgatttaacaagtgcttacatagacttactatgtcagcattgtttttagtgtttttacattatgttttacacataaacctcataacaactctatgaagtgagtgctgttattatccctattttctaaagggtaatttaagcatgatgcagaagaccctgctgagtggttcagtgggccaaggccaaatgacattctcttttctccaagcagggcaagttcagcccacctctacctcatataatactaaacagggtcgtattggagatctccctccaggcttgaactatctcatataataagcagtgtgacttattaatttattttacaaaagcatttactgattccttggtgcttagggaataaagactaagacaatatttgtgtacctagagatagcttattatatagtgggaagatatataaaaagtaattatatctttaggcaaattgcataactattagagattctgtggctgtctataggaagaaaaaataattattccacaaagtaacatttgaactgatctttaaagaatgagaagcattgtgatgggtttacaagcaagggaggataaaaggtcatttggctgagctgaggaaatagcaagaaaaaatacttaagaaaaatttttggggtgtattttgactatgttgctaagaggttttggctttatttgtacagaggaggaagtgagggtaagttggagttacacatcaaaatttgtaatggagcctatagaaaatatagcagcccacatggcacttttgattcagaagacatgaagtaggttttgggcatctggatgtttcaaaagcttcacagttgattttaatatgtatctgggattgagaagtattgggttaaagagggaatgatcatgaaatggagtttgctggtagagtatacacttgagaacatgttatactctttctcaaaccttgaaagacttcagaatactgctgcagtatttttcattccttgatagcacaaagatataacttgtgttttgctttattttttgtagggcaagtggggcttggaagtggaggaaaagacaggtttctttttaccgtggcaccttaaagagcactgagaatcatattgtgaaatgttggcatgtgtatatcatcttttgtagaaactttcactagaagtttgaaaatggacaataccattttatttatctgtcccaatttaccccaacaaaatcaattagcatatattagatgataaatggttgtctgtcaaatgaatgcataaatgtaaagtcaaataagagaatatttataaagtacaattctgaataaatcagtcaatataaatttctcacctcagtgttatctctgctggtgtccagaattaacatagaataaatcacctatgaccctatattatggtgcctttattatggttcctatacaatggttctgtatgcaggcaaaagcaacattacaaataaaattttcagttcagtatataatactgcagtgtgttcacattttgagctaaggttaaaagcaaaacctgtcaagtgatcccttattactcaaatagtttctaaatatgatacttttcctcagttaaaaatattttggaaaactggacaattgtaagtttaggaaccccaaacagaaaataagatgatctatttaagatagatctctccctaacctgtaatatcttcataaacacacaaaacatcaacctttttaagacctcttttccctttaccttggaacagtgctataaggtttttttcccattagtttggtctactgcatatctgttaaggatgcagtgtttttcataattggcttgctgttttctctaccaccatccagtaagggcatggccaattcgtcttctttaacatgagtctctaaagagatatggcacctaccaccattaccagtctttgatacattttggttacactttcagacaataattcaattgttagattctttactactacaatttgtgttctttgtgagaagatgctcttaatatacctcattttcatttaaaataggcatcctgctgtggaggatcagaggaaggaagaaactgagaataagctagaaaaatcatctggtcaactggtaagagaaagtttaattttcattaactgttagttaattgataattaattatatatgcaaatgcagtaatacatctagtcagtttaattacgtgttaaaattttttgagtgagcctactttcctaccttcataagtaaaatggtcacagttaaatcttgctttgatgattgatactgtatctcaaggttgtcattctaaataccattcctcaccataactaaaaattagtaaaaaaaaattgaatggaatcatccagaaataacccaacaatcatttttaagaaatccctcatttgttttttgaaggggaaattaaagcaaaacaaaacctatatacatataaagaaaacacacatacacacatacagaattttatttactaagacgtttgagtcatttctgaagttaaacttattctttatttttattatctttatggttagaacttctaggtctaaatgaaagagaataactctgaattatacataaaaggcttttattaccagtgatatacttttatggtagttaaaactagttgtatgaacatcatatgttcatatattttgtgaaagactgattaagagatatttgttaggttctcattagtataattttaccttccacatagttttatataatgattgatgtccacttgttaataagtgtattagtctgttctcatactgctgtaaagaactacctgagactgggtaatttataaagaaaagaggtttaattgaatcacagtttcttaggctggacaggagggggcatggctgggtagtcctcaagaaacttagagtcatgggggaaggcaaaggggaagcaagcacgccttcacgtggcggcaggagagaaagagaccaaaggggaaggtgccacacacttttaaacaacaagatcttgtgggaactcttatcatgcgacagcactagggagatgatgctaaactattagaaaccacccccatgatccaatcacctcctaccaggtccctcctctaacactaggaattacaattcagcatgagacttgggtaggcacatgtttgcaggaacatgggtaggaaagtttgcagaggttatcctgtaacttaggaggggaaaatatataaacataaaataagcacggtattcacctgcatgaggttatcgctgtaaaaaatgctgcagaggaagtatgctatatgcacatgtatgtagggttgtacagttgagcaaaggcaagaaccaggggactagatccagaaaagacatttctagatgcagaatcaggaatacaaaaagcaaggaaggtggacactttgacctgaattttgtttagatatttaatcaattttgccaaaatggattaagcatcaaatattttttgacaactaacttaaattaaaagtgtggaccaggcatggtggctcatgcctgtaatcccagcactttgggaggctaatgtgggcggattgattgcttaagctcaagagtttgagaccagcctttacaatatggcaaaacattgtctctgctaaaaataccaaaattagctgggtgtggtggtgcatgcctgtatttccagctacttgaggggctaaggtgggagaatcacttgtgcttgggaggtcaaggctgcagtgagccgtgttcatgccactgcactccagcctaggtgacaaagcaagacgctgtaggcatgacacttacaatatttcctgttgaaaaatttttattcatgctataatcttgcccatgtataaatttgttaattagtatccgatgattctacaagtacttttgagtagaattgacctttagtttgaattatatgcactactgatattggtcattctttataaggggtttttctagttactttgtagaattttgttttaactttttgaaaaatttcaaacctttagaaagattgcaagatagtaaaatgaatagtagtacaatgaacatccttcatagagagttagtaaacggttaacatttttctacataaataatcttatgaaatgctataaaatctaaggtatatttgtggaatatagatggggatggaggaatcttaatttagtactcaaacccattttttacaatgataacctcctacaagtggataccgaataccatggttattttatgtttatatattttcccctcctaagttactggataatctctgcaaactcttttccttgtggcaatgacctaggggagagaagggcaaaacaccatagttgagattagacagatagtcctgcaatggactttattggtttctacttactttcctgtgtagctccaggtctgttagagaactgaaagtgagttagcccatacaagggcatttcagcatctcaagctctatggggcttctgcaataagaagttcttattttcagagatcaacagcaacataatcatattcctagaattcccacagagtataagaactctggtttcttgttaaggtttgaaggaaggccatcatccatctgttctaggccatttatccatctctgttgtccactagttcttcacaactaatgttagtagatattccagcaggacttgattgtgtagttatcagttaacaattactgtgccttattaattctgtaagaataaattcctgaagattattactatttatacagctctgactgaattgagatgttgagtcattctactttactactttgtttacaatttgaactattaacaactattcattttcaagttgctgtgtgtttaatagctgacgcatcagtcatataatgtaaaaagcacatttagatataattttcatgttacagagaataatatatgtaatattttaagttcctagagagcagagaacatattattcttccttagattttttataattctgtcatagaagctaggagaacaagggaaaatgagctttgttccttttttaatgctttggctgatcttagaattaagagtgaatgagaatatgcaaactgtgtaaatttttaatcaataatgtcttctagaacaaacaggaaaatgacatacctactgatcttgtccctgttaacctactattagaagtgaagaagttattaaatgcaattaatactctaccaaaaggtgtggttcctcacattaagaagttcttacaagaagatttttccttccaaactatgcaggtaacgtcataagttgttatttggggcagaagtgcagctgtctgtatatgacttttttaattaaaattctttttaaaccacacagtatagccaaggtcttgaaaaaaatctccatcttacttcttgtaaagggctttgttgtcaaccttgactgtagacttctaaaaagttgaacaaatagagtcatttggtgctagccttttaagaataatggtaggaatgtgggttggtagcttgtaagctgttgactacaaggtctagtgtttattccagtcctgctaataacctgtaacatgccagtctgggacaggggactgcttttgttctcctaactcataaaatgttaacacatttggccaggcacagtggctcacgtctctaatcctagcactttgggagaccgaggtgagtggatcactgaggtcaggagtttgagaccagcctggccaacatggtgaaacttggtctctactaaaaatacaaaaattagctgggcatggtggcacatgcctgtggtcccagctacttgggaggctgaggcaggagaatcggttgaactcaggaggtggaggtacagtgagccgagatcatgccactgcactcctgcctgggagacagagcaacactctgtctcaaaaaaaaaaaaagttgacacatttgtcaaaaatgcatttttaaaaatcatatccaaatatttggaattatttgtataataaatattctggaagctatattgtagatttccatcttgaaagtagtttttctgtataatttgtggtaactttcagcataagaaagataccatttcttaatggagttttctgaagttaaagaaaattatatactcttttctttgtggcaattaactagagaagagaagggtaaagcaccatagttgtcttgagaaggctacatttgtctttctatgaaagaatatatggttatttccatgaaacacattaatactattatgattaaaaattccaacaaactgaagatattcataagactttatgcacaattataaccttaaccgagataatttaccacagtataagtgaattctggctagaaattgatagaataatgctaccatttccctcttatcttttggaaatcacttagaaacaacaagacagaaatcagtggccttcagatatgcaaaaaatagcaactagaaggtaaaaatagaagaatagtacagtcatcttttggtatctgtgggaggttaattccaggacacccccggtacaaaaatccaaggatgcccaagtctcttatgtaaaatgacatagtatttgcatacaacctgtacacattctcccgtatgtgttacaccatctctagattacatctaggtattacatatctaatacaatgtaaatgctatgtaaatagttgttatactgtattgtcttttcaattttttaaaattattgtattctttctatttatttatttatttatcaaatattttcaatccatggtgggttgaatccatggaggcaaaacctgtggatatggagggcaaactgtacttatttataatgataacaaaagtaaaatactgagtaaaatacttaagaaatgtacaagataaactagtatttctttaagcttgttctaaaccacttacatgagaatatctgacccctgtaccagttctaaagaatcaaaatctctggggataggtctttgaatttgtgttttagtaagtacctaagcactgattgtactcacattaaatttagaaatcaatactgcatattaaaacaataagtaaaactttctaaaactctattaaaggtaagaaatgaggacctgaatggaatagtacatgtaggaagacgcagtatgttaaagcagtcaattttctataaattaaaatccacaaatatcgcatgattccactaaaataatgggatttttttggttagtgtcgctaaatgctaagtctaaagttcacatgggaaataagaggaaaaatagccaagaaaattatttaagaaaagtatgaaggagtagggctgggaatttgcccacttaaacattaaaagttgttatgaagctctaataactaaaagattgtgttacttgttctttatacctcagacatatctagaaaatagaagataagttccagaagtaggaccaaatatatacagaacctttatgaatgataagatgataaaaatagataatactaaaggaaaaagacaaatcaatcccagtgggatattttaacatacttctcttataactgatataacatggacacagaattagtagacctacagcagacttgctctaattgagacacacatgtataaacactgcacccaacagtggcagattatgcattcttttaagtgcacacagaacatttacaaaaattggccatatgctaggtcacaaagcaagccccatcagatttcagagtatcaaaatatacagagtatgttctctaactactcttcagttaatctagaaatcaataaaagagataatctagaaaaccgtatgttcataaggtaagatatatacctctaatctaggtaaccaattggccaaagaagaaatcacaatagaagttagatacatttttgaactgaataaaaatatatatcaaatcttgtgttattagataaagctgtgcttcaaggagaatttatagcttgagatgtaaatattagaaaaagaagcaaggttgaatatcagttatctaagcatgacattcaagaagttaatggaagaacagcaaattaaaagcacttgaaaaggaagtaataaggatagttaaaactaatgaaatctatttaaaacataaaatagaaaggatcaataaatccaaaacttgcttttttggaaagaccaatcaaattgacaaatgcgtaataagtatgtccaaaaccgaaagcaaaaatatccaaaatcatgaatgaacatgaaaacataaatacaaatactgtagtcattgaagataatagagataattctgctacttggagtagctacctggtttgtctcatagcaacctgcctctgtgaagaacttgaaaaactggacacatttttttctagtaattcttatttttgcttttctagtaaattatttaattcaacctgggatagaaatgattccaacctttacttagttcttttgaggaagggtcagtttctctaccttttgtagcagattctgtcattgcccccccataccaattggaccctacctatattttcagtatgctctggacaattctagttttccatgtctatatctctatgcctcagggcctttttttctagaacaggagaaagctacttctcatggcagctcagaagacccaaggaattaatattcccccatcaccccagaaagcactcaatcagtaggtcttgggagttattatatgaatatcccagttgcctcttcccttgagttggttaatactgaggtttgtatttttgagttttccaaaatttccccgttgtgataaccgcagtggcccaccatgggtaactagcataataacacatcctttaattaaaacctacttttccttcactttattacttctccactttcctaccattgtctctgtacctcccaaataaactatttccattgaaatcctttaattatggtctgcttccattggaacaaaaacagggcctcaatgaaaagaatgggctgtttaccagggctgctcctccttatagaccatgcactccaattttcccccaagccttgcaaatctgctgaaggctgtgccacaactgaatatggcaattactttaatgagaaaagtagctccaaaagtcagtcaaaagtcagctctccagagattgcctttcagaggtttttattttcattgtgttagtagttttccattgctttcagataattagtttttatatcttgtcccgttgttttagttattctcattgggagactgatttgaaaccacctaggctgtttgacagaggtggaacttcagtattatgttttgtatttctattcaaattcaagagatattgtttgagcttggaatgtaggtgaagttcttggctagaaatgtaaatttggaaactgtcagtatgtagacactatttaaaattatgatactgggttactttacctagagaacatgtattgatagagaagaggctcattaaattgattgctagggagactgaaataaagtatctagtcagctaggaaaaaaacaggaaaatgttatatatggaaaccaagttatggaagtgtagattaaattttccatgcagattatacattattaaacagattatgtaatataaaccaagccgttgtgggtagaaaacattggggaatggacacaaagacatagtcctacctttcatttcaaccatgtaaataaactatagtacataataaagcatgcattagctcagttgcaatcagattgcagcataaaatggtttacccttgtattggtattaatgccagcattcctgtttaccacaggttcagggctggaatattttagctatgtcacacaatagaaggtatgagagtgaactgggattaccattttcctctgaagtaggtgtggatgttgccaaccctttggcaggtataggaatgcctttttaaaaaatgttttaaagaggctgggcgcagtggctcacgcctgtaatcccagcactttaggaggccaaggcaggcggatcacgaggtcaggagaccaagaccatcctagctaaaatggtgaaaccccatctctactaaaaatacaaaaaattagccaggtgtggtggtgggtgtctgtagtcccagatactcaggaggctgaggcaggagaatggtgtgaacacgggaggcggagcttgcagtgagctgagattgcgccagtgaactccagccagggcgacagagcgagactccatctcaaaaataaataaataaataaataaataaataaataaataaataaaataaaatttaaaattgttttaaggaaatagttacaaacgacattcatcggactacttaaaagcaaacatatgagaacagtgtatctggttggtatggattttttttttttaaaccgtctttatctctatttttaaaattttctccaatgagcatgaattatttgtataatgtaaacatatgtagatgtttgttcagacttatagacatttttaactgaataattttccacagagagaagttgcagctaacagccagaatggtgaggaaattgttcctgctttgactttacgtttcttgattacacagctagaagcagcacttaggaacattcaagctggcaattataccgtaagtgttttctttttggaaatttgatataatggacttggtcaacatttctcagtgagaaaacagccaatgcatgcttattttaaggtgtgggccaatttttatttttttcttttacctctagaaaagggtatgtataaattgattgccttcctgtgtcttgtactttcttatatgactggtagatgacttatgtatgtcttgtactttctcatgtgactggctctgtaataagcctattctagtctccttccctaccacaaaattgttcatcttaagagaaacttgaactaatagaaatgggctttcccaatcagaaatggagaatcataaagttaaaaaaaataagccaagtatagaaggacaaatactgcatgatgtcatttgaatgtggaatctaggagctgaactcacagaagcagagagtacgatggtggctaggggtaaggggtcaggagtacagactgaagagatgttggtcaaaagatacaaaatttcagttagatgtgaagaataagttcaagagatctattgtacaacatagtgactatagttaataacaatgtattataatcctgaaaattgcctagagtagattttaagtattttcaccacaaaaatgataaatatgtgaggttatacatatgttaattagcttgagttagtcatttcacaatgtatacatattttataatgtcgtatatgataaatatatacaatttttatttatcaatttaaaaaagaaaaaatattctgtctttttaaaccataattaatcagcttctctttcttctgagatttctatatttgtaaaagttggaatttctcttataggtaaaattaacaaaatgtatttatgtgtttaagatcaaatgatactttagaaataaatagggttatcttcaaaaaaggactacccagacaccaaaaaagggagcctaagacattaaatctcatattataatgatgtacaaagagacggaaaaataatacttatttaggattctggggattagggttcttacagggtgagttacaccattcagaaggagattctagttggattccaatgaggaaacaaagaaaatgggggatttgcatcttgtaatcctgagaacttgggggatatggcagacctgctatttctcccactgaccagattgccagtcagtgaaacaaatcaatgtgaaatcagccttaacaggtacccattgcttagccttctttacttagacattacttcaaagatgagtcttagactaggaaatggaagagtttctcccttggtagctctaggtagtacttgtgagcagaagtggcattgtgatgatcaaagcagtctattgctgtatctaaattactctatctgtccttcaaggccaccaaaaagggaaaagacaaccttgtaggagacaacagtggattatgtattatgggggtgcagttgcgaatagcatctctatattaattttattctagttcttggaataatctttgctgatggggagaaggtaggagaaaaggacaggggctttaggttagaaatgtacaacttgcatctttaaattccagagtttttcctcctctaattatagcattaccacaattctgcatcttatcttgttcttagaaatgttttatttagaattatattagctagtctctgttatgttattcatgaagctgttttcttttaattacaaaataatagctcacacttctttagtgtttgctgtatgacagccactattctaagcgctttgtaaaaattagcccttttactgttcataagtaccccatcttagggcacagaggttaaataacttgctaacttgaccaggtagtaagtagtggagtcaggtggctctagattctatggtctgaactactgcctcttcagggatgagaattttaaggtgggaaccacttagatgttatgaggagtttatatttaatagactcacttagtccatcaagaacaaacacacgtctatctccactgagatcagtttgaagccaaatttataatcccagtcagttatctcctcaatgaatactgttggtcattagaagcatgcaaggtgagagtatacagttagatcagtataaacagaaagcttatgggccgggcgcggtggctcacatctgtaatcccagcactttgggaggccgaggcgggcagatcacgaggtcaggagttcgagaccagcctgaccaacatggtgaaaccccgtgtgtaccaaaaatataaaaattagccaggtgtggtggcatgcgcctgtaatcccaactactcaggaggctgaggcaggagaatcaattgaacccaggaggcagaggttgcagggagccaagattatgccactgcactccagcctaggtgacagattgagactccatctcaaaaaaaaaaaaaaaaaaaaaaaaaagaaagcttatatcctatgggtatttatcattctatgtacctagaaaaatcttgtttatggtatggggaaatcttgatgaaaaagggtaatgtgacaaaagatagggttataatcttcagtcaatatagagcttatgagcagaggagtccagggttctccagagaaaccagactggtttttgctgtgtgtgtgtatgtgtgtgggtatatgtgtgtatgtgtgtgtgtgtgtgtgtgtgttttgttttatatacataaaacatacaaatacttatatacacatatacatatacatgattataaggaatgtatatgtgatttattatgaggaattgcctcatgtcattatagaggctcagcaagtcccatgatctgctctctgtaatctggagacccaggaacgcttgtgatataactcatcccagttctgaaggctaagaaccaggtataaatccaaggatgaaggcagaagttgagatgagatgtccaagctccagcaagcaggccggaagcaaaaagggatgaattcttccttcctctactttttgttctatgcaggctttaatggattggatgatgcccacctacattggagagggcaacctgttatacccagtctaccatttcaaaggcaaatttcatctggaaacacgctcagagacacacccagaaacaatatttaatctgggcaccctgtggccagtcaagttgacacatgaacttaaccatcacaaatacaatggacagggaggtcttggtgtacccctcacacagtttccctaaatagttacataattacattactccagaacatattaaaaaaaaaaaaacaggaaattgatgttggtccatggggctttgtgtctgggttctccaagaccaccctcatgttcagagatttgctagaaggactggactcagcatatggttatactaacatctaagatttattatggtgatgtgataaggatacatagtagatcatatggggaaaagacacaggtgaagtctgacgaaagccatctgcaggttcctccatattttctcccttccatgagaagctacacagcatatacggccacctccagcaatgaaaatgtagcaacatccacagtgtttctgcccagggaagcctataagagactcagtgatcaatatttttattgggcgttggtcatctaggtacctgctgcctggcatgtatcaaaattccacacttccagaagaaaatcccaggtgctcagcataaatcatagtgtttgcacaaatagtctagacatagcaaggcacctttatcagttagggaacactgccaaaattcaagttcccagacatcagccaaagatcaactttgcaagcaggacttaataaggataacagcctcaggccagctaggttagctttttaatgcccaggcttgtatagttctgtgccattttatcaaatgtgtacatttatgtaactactgcaatcaagataaaagaactattccaccaccacaaaaatctctcttatgacttttatggtcacacccacctctctccctctacaattcactgatccctaatctatctcatctcagtaattttgcatagaccatttttatacgaaggaaatatccacatggtttaatttttcattgaagaagtgatgagctttatgttcatactattttgcagaatccatgtgggagagtaaaggattttgatttaaaagatcattgtttttgttttgttttgttttgtttttgttttgagatggagtctcactctgtcacccaggctggaatgcagtggcacgatctcggctcactgcaacctccacctcctgggttcaagtgattcttctgcctcagcctcccgagtagctgggactacaggcgcgtgccaccacgcctggctaattttttgtatttttagtagagacagggtttcaccatgttggccaggatggtctcgatgtcctgaccttgtaatctgcctgcctcggcctcccaaagtgttgggattacaggcatgagccactgcacccagccagatcattgtatttttaaaggtggatggtagatacttcagtgttcgttatattattatttaatgtgttcttgatacctaaaatattacataataaaagagacagagtgaatgagagtttttgaaaggtttaatgtaacaaatttttatacttcttttttaccagtttttaaaaaattttatttttaatttttgtgggtatataggtgtacattttatggggtatgtgagatactttgatgcaggcatacaatacataataatcacatcagggtaaatgggctatccatcacctcaagcatttatcctttgtattacaacaatccatttatactgtttcttattttaaaatgtacaatgaattattgttgactgtatactcatttcaacagatgctgaaaaagtagggttggtatttttgtagagatggtgtctcacactattgcccacttaggttaaaatggcttatgtacaaaatacaggcaataacaaatgctggtgaggatgtggagaaaagagaaccctcttacactgttggtgggaatgtaaattagtaaaaccactatggcaagcagtttggaggttcctcaaaaaactgaaaatagatctaccataggatccagcaatcccactgctgggatatacccaaaagaaagaaaatcagtgtatcaaagaaatatttgcattctcatgtttattgcagcactattcacaatagccaagatttgaaagcaacctaagtgtccatccagatgaataaataacgaaaatatggtacatatacacaggggagtactattcagccataaaaaagcacaagattccccccagcactttgagaggctgagatgggaggatcacttgaactcaggagttcaagatcagcctgggtaatagtgtgagaccccatctctaaaaaaaaaaaaaattaaaataatgagatcctgtcacttgaaacaacatggatggaactggaggtcattatgtgaagtgaaataaaccagatagagaaagacaaactttgcatgttctcactcatttttgggagccaaaaattaaaacaagtgaactcaaaaaaatagctagtagaatgatggttaccagaggctgggaa

SEQ ID NO: 319 - DNA, 3481 bp, Homo sapiens
  source 1..3481: mol_type = other DNA
cttattttgagactaattgaagatactgaggcccagtaattgaatcatatagattgctaaaagaagttctgagaagaaatgaaatacaaaagcttggtttctaaggctgaatatcatgagaaactatcatgttatcctgtgtgagtgagctccacgaggccaggtatcttgtctcttttatggtcaactgtatctccagtatctaggagagtttatggtactataactagcacatagtgagcacttaaaaaaaatcaggtgctcaaataacacggtttagtgaaggaattaacgggttcatatatgtgaatgtgtgtaaagtgggtgcaagcatgtaattaaatggaaaactggtcatatttagttagatgttactaaatttatttttatttgccatttggatcacatgattttctcctttaaacatcccagtgacattataaatgtcttatgtagcaaggtctttggcttcaaatgccttcaccaggaattaagagtttagtacaccatcaatgaatagaatttacaaagtaccctttgggcagaatcattaaggaattaaggaaagttttttaacatattgagaaataacacaaaaggttctgaaaataaaggataatatgaatatttcatctttgtcttagttttggggggtggggaacacagaagcaatatttcatttctaaaaccatgttcccatgaagctgagcagaaggactgcttataacataattttccagccaaattcccaaagggcccccaacaggctttctcaatttgtgggcgctgtcctctaacaatctatttctttccagactctccttggaaaccaaagatttatgtcattctcttcatattttaaaatgaaattgttccaggttaaagaaattatgaaaactgaaagcctgtctttatccaagaaccaacactgcctggacaaataacttatgaatacatcctattctggaggtatcatcaatgactttgcctctgtagcactcttaccattatttggacatttccagaaatcaagatccacttcagtttgtgaagatgagctgtgcttagacataggcttaaaaagaaaaggtaaataaatattctgtcaggttatatagagggaagcagaccctcccttttataaataacgtatacatttgcttaaactccagagtaaaggaaaaatctcatggactgaaaacattttttaaaaaaatgaatattcactaaacaatcctgaaatgctttttgctctctgaatacattcaaacaagtagatatcacagcatttcattgatagcttatcaaaccacagaatagaacaggaggacagaatacaaagggcattcttaagggagcaccatcatgattgttctgtaaaaacatatgaacatattgctataaactcatcttcacaggaagtcacacagcttaataagcacagacctgcaagttaatattaaaattcactttgatttcagcagcagcaaagctgatccaactaggagctattacataaaacccttattgtcatattcgtcatcaccactctcaatagagaccactgccagcaccaagaagccagccctcagttcacctcaggaaacaggctacacagacggccgtcccagtaacaatgcagcagtgagatggccctgtttattttatcagaatggcactcccttaatttttcagttctctttattgatgtcctttttcatgtacaggtctattagattctacttcctttactgtcctcccaggaattggtgcttgccaactacaataagttgttttgacaacttgtctagctatacaatactctgtttccttccctctacagtctttttggcttcaaatgagtgccttcaaaatatagcagagactatccaaccaaactatgctacaggggggaggagctttctatgtgtaagcaatgtcctgcccaaactacaatctttcatgtgctcatagtcctctttcttttcctatttatttttatggataaatcccccttgctatcttgtctactcctatcttaataaggaatgactgccgtgactacccccatctagctatgccattcaccgccagcacctctgctctcctcgtgtgcttcaagaagaactgattagcactttgcataattaacctgattagcactgtgcataatcaaactgattagcactttgcataattaaaaagaaataataataataacaataataagcactaagtaatatcaaaagctgttagtcccacagccctttggttacctccaagattagttcagtgcagcatattttgcaccttcacattgaaatcttttctttaactcaaaagtcaagaaaataaattaaaatgcttgcaatccacagactcgttatggttttcatatccataccagttaccaaaataatcagtttcttacccatacacatctccctcagtttgggtcttacatattttacccatgttaaaatggagaaaatggggatataaaaccaagtgaatgaaaaatatttagaataacattagaaaacaagatatatgatgcgtatagaagcatagagagagttatatagaactatataaccctcccttgtgttgcttctgggtgacaatgaggcatgtggaaagaactggacaacctatcagaaaaacctggctatgacatttcctggctaagtgatttaactttttggaacctcagttccctcatctgcaaaattaaaataataacaccagttctgctacctcaataactgtaattaaaataataatttaggaaggtgctttgtgaactgcaagacactttacgtacatgaggtattccattctaggtccctaaatctcctatcccccaaattttatttcacaccatggacaatattatacattatgaataataaattttaggctcagtgcagtggctcacacctgtaaccccagcactttgggaggccaaggcaggaagatcacttgaggccaggagttcaagaccagcctgggcaaaacagcaagatccccatctctacaaaattttttttaaaattagcggggtatggtggcatgcacctgtagtttgttttttttttttttaattttttattctcataggttattggggaacaggtggtgtttggttacatgagtaagttctttagtggtgatttgtgagattttggtgcactcatcacttgagcagtatacactgcacacaatttgtagtcttttatccctcacaccctttccccctggtccctaaagtccattgtgtcattcttatgcctttgcatcctcatactcagcaggctgaggcagaaggatcgcttgagcccaacagttcaaggctgcagtaagctaagaaggtgccactacactcctgtctgggcaacagagcaagaccccatctctaaaaaaataagataaaataaaaatttatatttataatgccttaaaattaaaaagttataaagtc

SEQ ID NO: 320 - DNA, 32742 bp, Homo sapiens
  source 1..32742: mol_type = other DNA
gggcgggccgggaggtttgagtttgaagactggcgggaagatgtccgcagctgttgccaggccagggttctcccgagagggaggacgctgggactgtggcttgccctgatcggccgagaagagtttgccatgaatcttctgcgtcggagtgggaaacggcggcgttcagaatcaggctcagattcgttctcgggaagcggcggtgacagcagtgccagcccccagttcctctccgggtccgtgctgagcccgccgcccggccttggtcgctgcctgaaggccgcagctgcaggtgctccaggaacccgggaggccgcgggcaacgggggcagctccgccgggccatgggtcgggaggtgtcctcaccccacgggacttgcttcgttgcataccccattgggcttctactccccttctctgtgactggggcctggtgtggcaggtcactttctgttcagacatacgcgtgttttcagtgatcgcctggtattaatgttcacgtggcttctggatctttcgacctttagagaaacaacttcctagttagcttcatcccatcatctgttgggcggctcgttcctggtagtacccagtactccttacagacccttaagacaggattgttgggcctggagtacggcacaggctgttcggcgtccaggggaaggctggaagggattcgtaatgagattggttgggtgtcccgtggatgtcgacccagttttttaaaatcgttagttgtgcagtcgtcatggaactaaaacttactataaatagaaactcacctaacttagctttgtaatgcttgcatattgccctcctcccccaactacacccgtaattccaacactctttatctactgtgtattgcacgcttttttgttcgtttgaggcttttaaggaatttttattatatgcagtaaataacaatttattacttttctatacatggtcaatttctcataagattcttgaagtcaggatgtgctttaaagagcttcatttcaacacataggaattccaacacacggtgaagggctaactgtaaaactcatatattagaagtaaattaaattttaattttttctttttcctaaaaggagaatgcaagcctacagttcctgactacgaaagagacaagctactattggcaaactggggacttcctaaagcagttctggaaaaataccacagttttggtgtaaaaaagatgtttgaatggcaggcagagtgccttttgcttggacaagtcctggaaggaaagaatttagtttattcaggtatccaaatttatgtaaactaattactatttttaagatatgaatgtaaagaatactctattgaggtagttgtggttcgtttaaaaggtgaatgaggcagtgctttataactagagaaaatcgtacaatatgtgtgaaaagtggagttttatttatatttaaattacaaaagttttattgtttgactggggtggagggaagcaagaaaaatgacaatttaaagagtgggcaattctgcctgccattattctcaacaaacatatatcccagtgagtgtgcaatgggagatgtaaatctgcccttcccctgtttgatcctggttgcttttcagggtatgagcattatcattacatgtttgttaatttaccttttttttttcttgagatagagtttgtctccaggctggagtgcagtggcgctatgtgggcttactgcaacttccacctcccaggttcaagtgattctcctgcctcagcctcccaagtagctggaattacaggtgtgcgccaccaggcccagctacttttttgtatttttagtagagatgggatttcactgtgttggccagactggtcttgagcttctgacaagtgatctgcctaccttagcctcccaaagtgctgggattataggtgtgagtcaccgtgcccagctatagattgacctgtttgtacagggttgtatatacaaacaacaagtaatatactttatataaaatttttatgggttttcttttttttttttgagatggagtcttgctctgtcgcccagactggagtgcaatggagttgtctcggctcacggcaccctctgcctcccgggttcaagtgattcacctgcctcagcctcctgagtacctaggattacagatgcccgctgccatgcctagctaatttttgtatttttagtagagacggggtttcacatcttggtcaggctggtctcgaactcctgacctcaggtgatccacgcacctcagcctcccaaagtcctgggattacaggcatgagccaccatgcccggccctatatgggttttcatgggcaactatggcatacacaatttttaacgcatgcttactacactgactttaaatctaatcatttggtaagatgcaattcctttgtgtcagttttctccgaaattatgagtcacacagatttttcattatggctgtaaggacgaattaaataattatcagcagatataagttcaggcagtggaattagactggttggatttgaaaactatcacttactggctatgcagcctcacagattacttaggaagagtgagagagtgtatatgtgtttgtgagtatgtgtgcctcggtagtacttagagttgattaaattatttcatatataaaagctcagaacagtttttggcacatagaaagtacttgtattgtgaaaaggcattacaaaaaataaaatacttgtaaatgctaagaagtcatagttagtggcagtggcataattgcttgaccatttcaattgcttgaaactgaaacttgggtatcattcagaactctggtcaccagcttatacaattaatcaccaagtcctggtgtctgttacctcatatatctcttgcttctgactcctttctgtttttaggtccattacctggtacagctcattatcatctttcttctagattatgcaatagctttgaaactagttcattcttttcctctgatcttgccctgctcctgcagccaaagtggtcttttttttttgatggagttttgctcttgttgcccaggctggagtacaatggcacaatctcagctcactgcaacctctgcctcccgggttcaagtgattctcctgcctcagcctccggagtagctggaattacatacaggcgcccgccaccacgcccggccccaaagtggtctttttaaaaaaaatttttgtttaaattttttgtagagatgggggtggcactgtgttgtccaggctggtcttgaactcctgggctcaagtgattctcccaaagttttgagattacaggcatgattcactgtgcccagtccaaagtgatctttataaagtacaaatatgatcttgtcactccttttcataaaactcatcagtcacactgcattgctttcaggacaaggtttaaactccttaaatggtgggattataaacctttcttgtggcactttcatatctcttcttttatacccctggggtactttatactccatgcttactaaattaccttctgtgtcatctgaacatgccaggctttcttctaggcctttgtaccatatgctgtttcttaggcatggcattcctttcctcttcctttcttttttctttttttggaacagagtctcactgtatcacccatgctagagtgcaatggcgtgactgcaactcactgcagcctcctcttcctgggttcatgtgattctcaggcctcagcctcccaagatgctgggattacagacatacaacaccttgcccatcgtggcctcctcttgctttcttccttaccttctcataaattctgtttcatttccataagattccttgcaacttttttccttccacttcttttttttttttttcctttttgagacggagtctctcactgtcgcccaggctggagtgcagtggggtgatctcggctcactgcaacctctgcctcccaggatcaagcaattcttgtgcctcagcctcctgagtaactgggattacaggtgcccgccaccacgcccagctatttttttttttgttatttttatagtaatagagatggggttttaccatgttgtccaggatggtttcaaactcctgacctcaagtgatcccccggccttggcctcctaaaatgctgggattacaggcatgagccaccatgcccagcccttttcttcaacttcgatcatagctcctatcataataaaattgttcatctacttcctcaaagcaggccttttacccatttggtacttaaaggaaaggatctttaggtataaactaggtactcagtagtattcatcatattgctgatataaagatttatttactctgtttttagttgagactattaagacaggtggtttaaagtaaagggcatttcagggtataaagattttaagtgctattgggcccttagtgattggttagccttaggctctgtagtactacacatggcttaaaacatttattaatgaattgtaccgaatattacttttttcttataatcttgtggaataatcatgttttagctcctacaagtgctgggaagactcttgtggcagaattacttattttgaagcgggttttggaaatgcggaagaaagctttgtttattcttccctttgtttctgtggctaaagagaagaaatactacctccaggtaatgttttttactaagtttgaaatagtgaaaggctcattattggcagtcttggtttcattcatttgaaatagaattataaaagcaagtggaaaacaaagtttcttcattgtgccctatgtagctttaagaggctactgccaaaagcattaaaaatttacagcaaggggctgggtgtggtagctcacgcctgtaatcccagcactttgggaggccaaggtgggcggatcatctgaggtcaggagatcgagaccagcctggccaacatggggaaaccccatctctactaaaaatacaaaaattagctgggtgttgtggcgcacacctgtaattccagctactcgggagactgaggcttgaacctgggaggtggaggttgcagtgagccgagatcacgctattgcactccagcctgggcaacagagtaagactctgtctcaaaaaaaaaaaaattaaaaaaatttacagaaggaaattaaaagaaaattattattgcattaaggagaaggggccatcaaatcaaaagaataattggtgaaaattgtgtaaaaatttgtaaaccttttcttaggaaataaacagaatatttaaactagcatataaacacgcacattaagaatcagcatttaactgaacagtaggactagactgaagcatagaaaggaaagagtgtttaaggaagtgtatcctgccctaattgaggactatttaggaatatttaggggatgaaggtcaagatccattggtgcttaggtaaagctccaggtatgtgatctgttcctctgttctgcaaaaatgactaatagtagtttacatcaatatgatgctcacagtttttagggcattttcacaaatacaatattttattaaatggaataaatttactgttgtgatttctgcagtgaaaaatatgtgcttttgaaatggaaagattgttatactgattgttaaagaaatgtgggttctagtcccagttttgccactaactatgtctttaggccgggcatataactggctgggcctcagtttttttatttgtaaaattaggatgttaacccttagccctgtgggttaacttagtaaacactcaggaaaattttattgaatgaatagctctaaatttctatggttctataaatctttttaatagttatttcagaggcacagtagccaacaaagctggtcatacatggtaacatcactcaacttagacccaaagtaacgaaatgatgaaaggatcctttttattgaaaggtatgttagttaaaagttaaactaaaaaaaaaaaaattattattaaagtcccactgaatttgacttttaaaaacttttcttccaattacattaaaaaattggtcattagtaggataatgagactattttcctcatgaagtataaatttgtttctttaagtgttatagctagtttcttgctatttattagattaaaaatgttagtgcttaaggtagtttttctccaattttaattcctctaaatagctcttagaagtttttagattattatgctgtcattaaaatggcataattttatttgactcttaacagttttgtcagttctaaactttatatttttagtatatgatctaaaaagaaccagtgtgtcctggccagaaacaactgatgacagtaatctggtagatgtctttagatacttatgtctatgttctgggatagaaccagtttataactcttgaatttcaagttttttcacctgtattgttcctttttactcaattcagagtctgtttcaggaagtaggaataaaagtagacggttatatgggcagcacctctccatcaaggcatttctcttcattggatattgcagtctgcacaattgagagagccaatggtctgatcaatcgcctcatagaggaaaataagatggatctgttaggtaagaaagttagaaaataagtaaatactttctattgctatttttgatggaatgaagtggagctgttgtgatttctctaggtcccatttgttttcctattgtctattatctacttctggaggcaaggattggcatctgtaatgttaggaacgctgtgtttataagttttgtgtcctgctgctgttattgactccgttacgttgcatttttgtactttacaaaacgtagattatatccttgagccctcaataatttctccttgcttctttcctatctaaactctaccaggaatagaaggaggcctgctgggccagatctgccattttgtggttagtgtatatgggtttttgttattatattctgctgctatgatgtctattttgggcttggacccagagtctgtcatttagcatggaaatggtaggaagctaaagaaactgacactctatttgagcttgggattgtgggaagattttctatcttaatgcatttttttgccattatggaaaggccattatgtagaggtagcaacaggaatagaaggattgcagcagcagaagtagcaagaatatcagctaattattgagaagctggtgaacttaaaaataccatggtaaagttatggtagggtaggggtggagggtgggaatcagacataggctatgctccataaagcttggagagagaaattgcaattgatttgtatcagaattgtcttattacttgtgaccccattggactttaaatatttgagagttgcaatagactcgtagtaagtgctatttccaatgtacctagcacagtgcttggcacacggcaggcagaatacttttttttttttttttttggtgaatgaatgagtaagtgctaaaataactcatcagacagtacaattttggagacagcttattgataggaaaaagaacatcatgtgtcattaggaagtttcctattgtctccttaaattccttttcaccagaaagttgtcttttggtggggagaatttggggtggggagaataccagtacatgtggaaactatgttgttatgaaaatgtttaactaaagaaagtattagttgatactgaattttcagtaattcttaagaattattccaagtatatacattggttaaattctccaagtagtgaaggacattgtgatcatatttatgttttgcagtatgatgactcactagcttaccatattaaaaaaaaactcttaaaattgtctttttcttctggaccctcttatgttttttctaagctactttctaacatgagtatgtatgttttcccactgaaaagtcaatacattgaaaactgacatagatgtctttgatatttcattgtatgtttatttcggtgaagttgccaatttagaagagtaatgagaggcagttttccctgggtttgtttagccctgagtaagctaataattgatttttagatcagtataccttgtagtacgactgcctgtaatacctgaaacatcttggaaaagaattgcccattataaggaatatgatttttgatttatggtttgaagtttgcatcacttgcaatgtattatatagtgtattatatcttatatcactgtgtgggaaagttagaaaataagtaaatactttctattgctatttttgatggaatgaagtggagccgttgtgatttctctaggtcccatttgtttttctcttgtctattatctacttctggaggcaagaattggcatctcaatatcttatttcaaagatattgagtcttttaaatgtcttcttggcgcagtcataaaaagaatgaaatcatgtcctttgtagcaaagccacatggatgcagctggagccattatcctaagccaattaatgcaggaacagaaaaccaagtaccacatgttctcactcgtaagtgggaattaacctttgagtactcatggacataaagatagcgacaacagaaactggggactactagaagggaacaagggttgaaaaactaactatttaataatagggtactattgctaagtacctgggtgatgggatcatttgtatccaaacctcagcattacacaatatacccaggtaacagaccttcacatgtacccccaaatctaaaataaaagttgatataaaggaaattaaatagagtgaaataaaggttggaaaaaaattcttcatggatgtgacattctgtaaaaacctagtatctggaaaatctttttaggaatggtggttgtggatgaattacatatgctgggagactctcaccgagggtatctgctggaacttttgctgaccaagatttgctatattactcggaaatcagcatcttggtaagtacgtgaaataactgagttcctgagatttcaaacaatgttgaggaagtgtctgaaaaatgcataagtatgagttaaataaattaagggagtgtaatatttttcttattgagaaaacttatgtatagtagtttgtttttgttccagaagtcagtccaggcatggtggctgacacctgtaatcccagcactttggaaggctgatgtgggaggatcacttgagcctgagttccagaccagcctgggcaacacagtgagaccccatttctataaataataaaaaaaattagctgggcatggtggcacacacctgtagtcccagcttctcagtaggctgaggcaggaggattacttaagcccaagagttccaggctgcaatgaggtatgattgtgccactttactctagcctgggcaacagagcaagaccatgtctctaacaacaacagaaaaagtatttcaggttgcaactgattttagattactgtgtaaacattcttaattttctgactgctcacctttcaatgtatacatttttattatagatttttaaaaatctagtttctgtatttgtcatctatatatatataagtagtcaggctaattttgaaaaaaatattatttttttagccctcacttctcagaggcaactacctttcaactcttctagctttttaaaaatatttacagcagcatctctaattgtggctacttaattttttaaatttcagaccttatatcttgacttttactatgaaagatgaagatctagctttcttttaaattttttactaaccactacccaatcttctcccttctctgcagtctctccttatcctctcattatcttcctattcttcaaatatagttatgttatgattttgcttagatcattattcagtgttacactattatgactatataaatgacattggtaactgggctatagtgtaatatgattacttctgcttttctaaacaactttttgttttctctgaaattaataactgtcttttttgtttgatggcttggttttccagatacttactgctaatttatccctagcctcctccccagttgtgtattctaccacatttgctattctgccagtcatcttcttgaagattttcctgaagcccttcaagttgttccaatctagataggtggttaatctatatatgtgctatatagcaatcatcttgggattcccttccccctaccaattttttgaccatatgtctgtcttgatttaccatctcattttggtgggaatatcttccaggaacttctactttatttcagtgaacacacataggtataaactttttgagaacttgcatgtctgaaaatgcctcataattctttcttttttttttttttttttgagatggagttccgctcttttgcccaggctggagtgaagtggcgtgatctcggctcactgcaacctccatctcccaggttcaagcgattctcctgcctgagcctcctgagtagctgggattataggcgcctgccaccacacccagctaatttgtgtatttttagtagagacagggtttcaccatgttggccaggctggtctcgaatgcctgacctcaggtgatctacccacctcggcctcccaaagtgctaggtttataggcatgagccactgtgcccggcctccataattatggactgtccaggtataaaagtcaagattagaaatacttttccttcagagttgtcaaggcattacttcattttctcattgctattgagaaattcagtgctatgctggtttttcatcctttgtaaacaattttttaaattctgtctgggaatttttaggcactcctctttttccacagtgctgtgaaatttcatactgatgtgtgttggtgttggtctatttttaatcattgtgctgggtactcaatagattcttttcagttaagggagaattgaacacatctctcttgtgatagaacaagcagataaccatctatatcccaaatcactagggatatagaaaatctgattaatataatcagcaaatttgacctaatggatatatattgaacaattacctcaaaacagcagagtacctgtgcatttgagttacacatggaacatttatcaaaaagttttccatatactggaccataaagcaagtcttaacatattttaatggattcatatcatttattttctaacaatagtgaatttagctataagaaaagcataactaggacatgtctacatgactagaaataaacacatttttgacacacttttagatcaaaaaagtaatcacaacagaagttagaaaatagtttgaactgaaagtataataaaaatatctcttaacaaaacttgtgaagggcagcaaaagttgtttttaaaaggaaattgatagcataaagtgtatatattattaaggaagagagactgagaatcaattatttaattatccatcccaataacttagaaaaaaggccaagcatggtggctcatgcctgtaatcccagcactttgggaggccaaggcaggcagatcacttgaggccagttctagatgagcctgcccaacatggcaaaaccctgtctctactaaaaatacaaaatttggctgggcgtggtgatgcatacctgcaatcccagctactcaggtggcataagaatcacttgaaccctggaggtagaggttgccatgagccaagatcgtgcctttgcactccagcctgggtgacagagctagaccctgtctcaaaaaaaaaaaaagtaaaataatgcaacagaaagcttgataaactaataaaaacagagcaaaaaatgaaagaggaaattcactatccagacatttaaaaattctacaaatgaataagaaaaacacaacccactatatcaatggacaaaaaaacaggcttttgaaacagtatcggctgggcgtggtggctcacgcctgtaattccaacactttgggaggctgaggtgggtggatcacgaggtcaggagatcgagaccatcctggctaacatggtgaaaacccgtctctactaaaaatacaaaaaattagccaggcgtggtggtgggcgcctgtagtcccagctactcgggaggctgaggcaggagaatggcaggaacccaggagacggagcttgcagtgagtgggcaacagagcaagactccgtctcaaaaaaaaaaaaaaaaaagggtatccacatggttcatacacatgaagtgatgctcagtagtctcattggttatcagggaactgtaaattacttcttcaaagaaatactggctgggcacagtggctcacacctgtaatcccagcacttcgggaggccgaggtgggtaaatcacaaggtcgggagttcgagaccagcctggccaacacagtgaaaccctgtctctgctaaacatacaaaaattagccaggtgtggtggtacacacctatagtcccagctacttgggaggctaaggcaggagaatcacttgaacctgggaggcggaggttgcagtgagccgagacaggtccattgcactccagcctgggtgacagagcaagaccctgtctaaaaaaaaagaaatactaccacgtactgtctataactgccaacattaaaaagattgacaataccaagtggtgacaagattatggaacaatagaaaacacagattgtggaggtgttactttggaaaacaatgtgggattatctactaaaattgaagatcttctgtgactcagtaatctgtggctcagtaattttattcttaggtatatatcctaaagaaatgtatgcatgtgtgtaccaaagggcataaccaagaatattgttagcaacactaattattaatgtattatatatcttttaatgttcttttcatttgtttttttacagtcaggcagatctagccagttctctgtctaatgctgtgcaaatcgttggcatgagtgctacccttcctaatttggagcttgtggcttcctggttgaatgctgaactctaccataccgactttcgccctgtaccgcttttggagtcagtaaaagttggaaattccatatatgactcttcaatgaaacttgtgagggaatttgagcccatgctacaagtgaaggtaaatcaatatatgtacatcactactatttttatctgtgtgtttgatttcattttctagcaaattgctaacaaattctgaatgatgtaattgggagttacatatacattaggattaatattaagctaactggtttcctcttaaagaattggtggtgagctgggtgtggtggctgacgtctgtaatcccaacatgttgggaggccaaggcgggtggatcacttgaggtcaagagttagagaccatcatggccaacatgtgaaaccctgtcgctactaaaaatacaaaaattagctgggtgtggtggtgggcgcctgtaatcccagctactcgggaggctgaggcaggagaattgcttgaacatgggaggctgaggcaggagaattgcttgaacatgggaggcagaggctgcagtgagccgagatcatgccactgcactccagcctgggcaacagagtaagactccatcccccaccaaaaaaaatattagcggtgatggtgagagaggaaatgtagttgtacctttaatttaaataaatagttgtttcctgatatataatataaacatttaaaaaaaataactgatcttgtagcgttttctttttactgggaaaagattttcttatggtttagtttacactaactgctagtgtgcaagattaacttttttgttaaatggtaggtataatatatagtagagtgaaaatattatttttgtagtctgatagatctacctctgatacttaatagagatacttgatatggctgagatagtagttgaatcacaaaacctatctgaacctcatatcttcacctgttaaataggatattataatccctatcttgaatattgtaagaattaaatatgatttttaaaaattatctggcatctagaaagttacttgataaataagtaccctcccatactcccaaatacactttaatcctgaggttaaagaactgactcatgtacattggtggagtgaggcatctgctgtttttgtgcagagttgtgcctctgagtactaaaacagctaagggtcattttagaattggaaatagaattggaaattcatgtgtttcactaactacctaggtatgcatttgtagtttctgcatacttggtatggaatcttgcttgctttgctctgtgccccatatttcgcctggctatgccttggttacttcaatacatttatgtgtgaacacattcatttgctctcctgttaatttttttcttcttttaccatgtctgtgcctccacccttttgaaccacttatatttcttacctggattattgaaatatttcctaattgttctctctgcttctgaccttgtccctttcagtctgtgcttacaggagctagtgatctatttaaaatgaacatcagatcatgttacccttcttctcagaaacttgcagtggctttctgtttcatttagaataaaagccagtgtcttcttagtagtctataaggtcctacatgatctacatcccccacccctcttagtgctctgactctatctactatgttccctctcacttccttcacactggcctctgctgttttttaatacaacaagagtttctggcctcaggttctctttttctagaatactttccccttagggccatcagtgtggtttactctttcacctttggacttttttactcaaatgtcaccatcttagaccttccctggccaacttgtctaaattatagtgttctcccttacatggtctctatttcttttcccttagcacttttcaaaaccaaacatattattattattattatttttgagatggagttttgctcttgttgcccaggctggagtgcaatggcgcgatctcagctcaccgcaacctccgcctcccgggttcaagtgattcttttgcctcagcctcccgagtagctgggattacagacatgcgccaccatgcccaactaattttgtatttttactagaggcggagcttctccatgttggtcaggctggtctcgagctcctgacctcaggcctcggcctcccaaagtgctgggattacaggagtgagccactgcgccctgtcccttatgtattttacttacctcatatttgtaattatctatctcttcctactggagtagaaacattatgagggtagagctttttttctgctttgttcgcagctccatccccagtacctagaacaatatttgacaaatagtaaatatttgtttaatgagtgaatagatggatgcattaatccagtttttaatacatacattgacatacttccagtatggagaacttgcagggccaccacagtggattcacatgtgcccttttgttcatttgaaatgtgttgcctttctttgagataatgtttccccaccttcacatctcagctaaattgttttctcaggacaatttttctttcagatctttctgtcaaatatgaggcctcaaaacaccgtaaaactctcttttaatggtatatattattgttgtattttatatttatttatttagtacacatgctcttcgacttatgatagggttatatcctgataaactcattgtaagttgaaaatgcctttaatacatttaacctactgaatatcatagcttagcctagcctaccttaaatgttctcagaacatttacatcagcctatagttgggcaaaatcatttagcacaaagcctgttttataataaagtgtttaatatcttataatttaacgaatactgtgctgagagtgaaaaatagaagagttgtatgggcacccaaagtatggtttctattgagtgcatactgcttttgcaccactgtaaaataaaaaaaaatcataaagtccaatcattttaagttgaggatatctgtattttaatgtgtctcttggtgagactataaaccccttgactattaggatcttgactttctttttactcaatattgtattcccattgcctgagggttggagctcagtaaatattagttgaatgaatagtaagtatttctttcacctttcatcattaggagtttattttttcttctttttttcctttcttttgttattgactttgtaactgattttcattatgccttaaagaagaaaaagcttccccagaaaggaaaatgagtgcttttaaactgatgtgagaatcttttgaaaggaccactaaagtggttatttatctttctgttttagggagatgaggaccatgttgttagtttatgttatgagacgatttgtgataaccattcagtattacttttttgtccatcaaagaaatggtgtgagaagctggcagatatcattgctcgagagttttataatctacatcatcaagctgagggtgagttatggatggaaaggaaagccttcatgcttagtacatttgcttgaaagtaatggtagtgattatattagcaaaaacatggcttttgttcatcattgtcactgcctgcccactaggtggtatcctttttaccaaactgtgcttttgcgattctaataatattccgtccctagtatagactatgtatacacacacatgcttagactaatcagctttagatttttagaatactgggtatatactatagttctttatcagggatccatgggctttaagagtttgatctttggagcccctaaattggatgcaaaacttcacatgtagacatttctttggggaaagtaaccatatctttctttatatttccaaaggaatgtgtaactctgaaaagaatcatacacacatacatacatatgtataagttgacccttgaatgacatgggtttgaattgcgtgcgttcatttatatgtggattttttttcaatacataatatattagaaaatgttttggtgatttgtgttaatttgaaaaaactgacaagctatgtagcctagaaacatgaaaacattaaaaaacaaaaagaaaaaggtatgtcatgtagcctaaaacatatgtagatactagtctattttatcacatactaccttaaaatatacacaaatctattatttatttattattattttttgagacagagtctcgcacggtcgcttaggctggaatacaatggcatgatctcggctcactgcaacctctgcctcctgggttcaagtgattcttccatcttagcctccccagtagctgggattacaagcacccgccatcatgcccggctaatttttgtatttgtgtagagatgaggtttcaccatgttagccaagatggtcttgaactcctgatctgaagtgatccgcctgccttggcctcccaaaatgctgggattacaggcatgagccactgtgcccggcccaaatcttttattaagaattaaaatttctgccaggcgtggtggctcatgcctgtaatcccagcactttgggaggctgaggagggtggatcacctgaggtcaggagttcgagaccagcctggctaacatagtgaaaccccgtttgtactaaatacaaaaaattagctgggtgtggtggtgcacgcctgtaatcccagctactcgggaggctgaggtgggagaatcacttgaacccgggaggcagaggttgcagtgagctgagatcatgccattgcactccagcttgggcaacaagagcgaaactccatctcaaaaaaaaaaaaaaaattaaaatttccagcccagccaacatagtgaaaccccatctctcctaaatacaaaaattagctggatgtgatgtcgggtacctgtaatcctacctacatgggaggataaggcaggagaatcacttgaacctgggaggtggaggctgcagtgagccgagatcacgccactttactctaacctaggtgacagagtgagaccctctctcgaataaataaataaatatttatcaaaacttaggcacacagacacagaccatacatagccccattcacagaagaaaaatgtaaacaaatgtaaagaggcagtgttaaatcataactgcataaaattaactggtatatactgtactactactgtaataattttatagccacctcctgctgctgttgcagtaagctcacgtgttgtaagtatgcacttaaaatatgacgcttatcaccttcatatgagcagtttgtgtctcataaatttcatattgcagtaaaaagtaatttatcatgtttcttatgtacttttcatcatatttagtgcagtactgtaaaccttgaataataccatgggaccaatttgaggtgccactagtgatgctggaagtgttccgaagaagcagagaaaagtagtggcattctaagaaaaaattgaattgcttgctatgtaccataagttgaggtctgcagctgcatttactattttaagataaatgcatcgagcttaagtactactgtaaaaaaagaaggaaatttgtgaagctattgctgcagctttgcacattttatgaaatacttcttcatctgattttgaaaatgcagttttatgtggctgcaggatcactatatgaaaggcatacctgctgggtgaggtggcttatgtcaataattccagcactttggaaggccaaggcaggaggatcacttgtgtccaggagttcgagaccagcataggcaacatagtgagaccttatctctacaaaagttaaaaaattaggccgggcatggtggttcacacctgtaatcccagcactttgggaggatgaggtgggcggatcacctgaggtcaggagtttgagaccagcctggacaacatggtgaaaccctgtctctactaaaaaatataaaaattagccaggcgtggtggggcatacctgtagtcccagccacttgggaggctgaggcaggagaattgcttgaacctgggaggcagaggttgcagtgagccgagatcgtgccaccgcactccaccctgggcgatggagcgagactccatctcaaaaaaaaatatccaggtgtggtgatgtgtgcctatagttccagctacttgggaggctgaggtgggaggatcgtttgagcctgggaggtaaagggtgcagtcagccatgatcgtgccactgtgctcagctcagtctgggtggcagagtgagatcctgtcgccacagatgcacgtgcgtgcgcgcgcgcacacacacacacacatacagagacacacacgcacacacacagaagaaatacatacctatagactctactacgatttgagaaaaaatgaagtccatatggcaacttaaagcaaaaggatctaaagctggagaatttaatgccagcaaaagatggttggataattttagaaagaggtttatatgtggatttttttcaatacataatatattggaaaattttttggtgatttgtatgaatttgaaaaaatgtcaagataacaggagatgcaagaccaagaggctgcagatgagttccaagataccattaagaaaattattgaggagaaaggatatctgcctgaacagatttttaatgcagatgaaagtgccctattctgagaaaaaaaaattgccacaaagaacccatttattagtaagaaagagaagaaagcaccaggatttaaggcaggaagggataggctaactcttgttttgtgcaaatgcagttgggtttatgatcaggactactcatgtctataaaacagctaatactcaagccttagagggaatagataaacactggttgccagtcttttggttgtacaagaaggactggagagtgagaaccccttctctggattcgtttcatcgatgctttgtttctgaagtcaggaaatacattgccagtaagggactgccttttaactttcttttgatactgaacaatgccttgggccatccagaaccccttgagttcaacacttaaggcatcaaagtgatctacttacccccaaacacagcatctctaatttggtctgtagatcaaggggtcatgaggatgtttaaagctcattacgcactgtactctatggaaaggactgtcaacattatggaagagaaccccgatagaaccttgtgaaagtcttgaacgaaaatcatgaaaaagattgtgaaaatggcaaaaaaaggtggaggtatgaacgaaatcatgaaaaagattgtgaaaatggcaaaaaaaaggtggaggtaaagggtttcaagatatgaatcttggagaaattcaagagctagtagacaccacaccagaggaattaacagaagatgacttgaaggaaatgagtgcttccaaacaagtgccagatgatgagtaagaagacacagaagaagcagtaccataaaacaagttgacattagacaatttggcaggattctaattattcaagactgcttctgactttttttatggcacggacccttctatgatatcggcactgaaacgacagcaaatggcgaaaggattggtaccgtatataaacatttttagagaatgaaaaagcaaaaacaggcagaaattataatgtatttgcgtaaagttacaccaagcgtgcctgcctctactgccaccacttctgcctctgccacccctgagacagcaagatgaaccccttctgtttctccttcatcagcctactcaaggtaaagatgatgaagatggagacttttatgatgatctacttccagttaatgaatagtaaatgtattttctcttttttgttttctttttttttttttgagacggagtctccgtcttttgcccaggctggagtgtagtggcgctatcttggcccactgcaagctccgcctcccaggttcacgccattctcctgcctcagcctcccgagtagctgggactacaggtgcccaccaccacgcccagctaattttttgtatttttagtagagacggggtttcaccgtgttagccaggatggtctcgatctcctaacctcgtgatccactcgccttggactcccaaagtgctgggattacagttgtgagacaccacctattagtagttaacttttggggaagtcaagttgtgtgcggatttttgactgggggtttctgtgtttctaactcctgtgttgtttgacagtcaactctgtgtgtgtgtgtgtgtgtgtgtgtgtgtgtgtatttatacacaaatatacacgcacatgcatgtatatacaaatgtattttaaaataagctctgaggtattatttataagaaaatgtacccattttgtatgtatatgataaattttaacagatgcatacatctgtttaaccataatataatcaacacctagaacattttcattaccctaaaatattctcttttcttttgctgtctcttccctctattccagacttaggcaactgttgatctctgcttgctgtcactttagattacttgtgcttttctaaaaattccacgtaaataaagtcatacagtatgtatgtgtcttttgtatctagcttgctttcactcagcctggtgtgattgatgttcacccaggttgttaatttatcagtttgttccttttttgttgccagatggtgatctagtatatactaatggctataatcatagtatatatttttactgattctagagtgaacactgttgcctcactatttttactagtctgtggtgctcaagataaatacaaggaagacagggaccagttctagtcacagaatattaggatattttattaattaattataccagtcacatcatgaggataagtgatggaaatctcaagcctagctctaacaagtaaactttgcctgaagtttatattggctaggctgttgtctaacagtgtatcatctcttccagtttccccttaactggtaccttctacaccgggttagcttatttccttacattttaccatggccatttataatccttaataaccagaatcatcatcattttcttttcttgagattttgttatcttggtttgtagcagtggttcccaaatgctcctgcttggactggagcctggtctatgatgagatttttatcagaaaagtaaagacaaggcagcacattatttataaagctgcagtttacattctgaaattattcctactcattttttaatcttaaatgtctttttttgaagtaaaaatattgataggtaaggttttaaaaaattaattgccctcagcaaaataaaacattggcaactctctgtgattccttaaaattttttaaaaagtttacctaaaaatttaaaaatgtatgaaatataaggtacatatttaaatatacatatttttattttcaactgacatataataattctagaacatacatttatttattttcctttttgtttttttgtttttatttttgttttgagacagggtcttgctctgttgtccaggatggaatgcagtggcatgatctcagctcactgtaatctctacctcatgggctcaagtgatcctcccacttcagcctcccgagtagctgggtctataggtgcatgccaccatgcctggctaatttttttgtatttttttttagagatgggattttgccacatttcccaggctggtctcaaactcctggattcaactgatctgcccactttggcctcccaaagttctgggattacgggtgtcagccaccgtgcccagccatatatttactgtttatgaaaagttttacaagttcaaaaatccaaaagtctggaaaatttttaaagacaacatataagtatgtaaagcttttactgcatataagaaagttaaggctgggtggtggctcatgcctgtaatctcagcactttgggaggccaaggtgggaggattgcttaagcccaggaatttgaaaccagcctgggcaacctagggagaccctatctctacaagtgaaaaaaaaaaatgctagctgggcatagtggctcgtgtgtctggtcctaactaaccaggagactgaggtaggaggattgcttgagcccaggaggtcaaggctgccatgagcagggattgtgccactgtactccagcctgggtgacagagtgagaccctgtctcaaaaaaacgttaagctcttactgggggagaagacaaaaaacagagggtactatttaattagctaccagattaatgccaaagaggcaagaataatttcacagaggagtaggctttttcgtgacgggattggtgaaaccctctgatactgctactgctggttggtggtacacaccttgagcaagggttttgattttggggctttgagtggtaatcagtatccgtaatactctgcttcctcagcaggttcctttgatcccctcctgtgggcttcgtcttacccttacacagtttcctaaactttggcgcacattggaattgcctggggagatttaaaaattcttcatgtccaggtcacatcccacaccaattatataacaatgtccaggattaagaaccaggcatcagtattcttaaaagatctccagccgggcgcggtggctcacgcctgtaatcccagcactttgggaggccgaggcgggtggatcatgaggtcaggagatcgagaccatcctggctaacaaggtgaaaccccgtctctactaaaaatacaaaaaattagccgggcgcggtggcaggcgcctgtagtcccagctactcgggaggctgaggcaggagaatggcgtgaacccgggaagcggagcttgcagtgagccgagattgcgccactgcagtccgcagtccggcctgggcgacagagcgagactccgtctcaaaaaaaaaaaaaaaaaaaaaaaaaaaaaaaaaaaaaagatctccaggggattatatagtatgcagcagtttcagaaccattcccctgctatttagctctattatgatttagacagatacacttaaagaagctgagttagaagcaaatggtgttgataatttttttgtgacaggattggtgaaaccctctgaatgcccaccagtaattctggaacaaaaagaactcctggaagtgatggatcagttaagacgtttgccttcaggactggactctgtattacagaaaactgtaccatggggagtagcatttcatcatgcaggtatttcatatttataatgttattaagaaacctccaaaattcctcatactgtcttaacttttatatttgtgtacatttatttcttgttaaacacacttaatgtccttagatttctttttaagaaattgtgtgggctgggcgtggtggctcactcctgtaatcccagcactttgggaggccgaagcaagtggatcacctgagatcaggagtttaagaccagcctggccaacatggtgaaaccccatctctactaaaaatacaaaaatcagctgggcgttgtggcacgcacctgtaattccagcttctcaggaggctgaggcagggagaattgcttgaacccaggaggcggaggttacagtgagccgagatcgtgccactgtactccaacctgggtgacagagcgaaattgtgtgatagattaaagaagagtaaaacgaacctgtttcagtttacttatttctatatagtagtctccccttgttcactgaagctatgttccaagacccccagtggatatctgaaaccatagatagtaccagccccacatatatgatgttttttcatagcatgttaaaacttttaaatgcattagaaatgtgtgtgtgtgagggggtatatatatggtatatagtagtcctttgtgaggaatatgttccaagatcctcagtggatgcctgaaaccacagatagtaccaaaccctctatatactatgttctttcctatatagtcacattatatagtgccggtagtgtatacagcatggatacactgaataaagggataattcatgtcctgggtggtaggacatgcaatttaaaacttatgagttgcttatttctggaattttcctctttatatttttgactttgggtaactaaaactatagaaagcaaaaccacagatgggggaaaactactatatacacacacacagaatttacattgtatgtaatttatgatgcatactaaaaaagtgaacacctgtgtacccatcacttaattttaaaactagaaccccagccctttaaatttttaaataaaattgaaaatgagccagctaagtatatattctatacactgtttttcatttactcatgtttttgttcatcacgtatttatgtcagaggtatatctgaccaatgtgatgcataggccctgaagatatcttgatgaataaggcatatcactacccacaaggagttcattgtttagaacagtggttagcaagttacagtctgctggtcaagtctagcctaccatctgtttttgtaaataaagttttattggaacacagtcatgcccatttgttctgttgctgctttcatgtcacagtggcagggtgggatagttgcagcggagacctgctgttttccacaggaacaggaaaagtttgtggacccctggtctagaaaataaggtagaggtatactagaggcagcagattctactctttttttgttattgttgttgttgttttctcgctctgttgcccaggctggagtgcagtgatgtgatctcagctcactgcaaactctgcctcccaggttcaagtgattctcctgcctcagcctcctgattagctgggattacaggcacccaccaccatgcacagctaatttttatatttttagtagaggcagggtttcaccatgttggccaggctggtctcgaactcctgacctcaagcgatccacctgcctcagcctcccacactgctgggattacagacatgagccaccgcgcccggccagattatgctgttaaagagatagactgtgatgactcctttgtcaacagtcataacaatagtttcaaaaatcttcagaggcttgaagcagactctcaaatccatttgtaagtgaacacgtataatattttcgttatatatcaataaatatataaaaacctcctttttttaggtcttacttttgaggagagggatatcattgaaggagcctttcgtcaaggtctcattcgggtcttggcggcaacttctactctttcttctggggtgaatttacctgcacgtcgtgtgattattcgaacccctatttttggtggtcgacctctagatattcttacttataagcagatggttggccgtgctggcaggaaaggagtggacacagtaggtaagtgagtttgaatttaattgtagcagcattgctgaaggacagtgtctacttgaaatttgactagtgtctggcaacctgtttctcatcatgctgtatttctttattatccaatgcactagtgtcatcattttggattcacttaatatttatagtgagtatgagttataattttctttttttttttttttttttgagacggagtctcgctctgtcgcccaggctgcagtgcagtggcgcgatcttggcccactgcaagctctgccttccgggttcatgccattctcctgcctcagcctcccaagtagctgggactacaggcgcctgccaccatgcccggctaatttttttgtatttttagtagagacggggtctcaccatgttagccaggatggtctcgatctcctggcctcgtgatccgcctgcctcggcctcccaaagtgctgggattacaggcttgagccaccgcgcctggcataattttcatatatatatatatatatatatatatcatcaactgttgattttctacaaatgttgaattaagtttttctttcgtattgtatacaataaaatgatttagtattatgtaaatcaagatgacttcttattacttagctggaagatgatttttaatttctaggtgtagtctactctttagcactaattaattttcacagatgttaattcaacttaggtgactggtctcagaaatcagacaaggatgctgggatgcaccctcacactttgggaataggaacttgacatcccatcttttttctcgaaattggtgctggctctgaaaaaacaccttttcatttttttttaccttgtatcagcaagttatgattgtttttaccagcaatccaaacaaaagttttgtcttaagcagtaaggaagaggtttgtttgaattaaatgtcaaaacggcagcaaattttatttctaacgtgctgtatcattatatgtaactaaatcattatcagccatctaacattgaagaaccttgggaggaacattccctgccactttctactctaggacataattgtcatctttctactgtaggacataattgactccagtattttattagatatgtcaaaaaaaaacaaaacaggcaaacagttctgtggctactgaagagaaattaggaaatccaggagaataaggaaagtggatgggaaatggatattctgggcagaggaagctgggtagtacactgaggaagtaacttttagaataaactgacttgtcacatgaagtccccaaatatgtcagttctcattattcatggattccatatttgaattttccaccttaacagaatttattcagaatcccgaaataatacctctggggcttttgtggacatatgcagatctgcgaaaaatttgaatctttccaagcacactttccctgctgtggttgaacaagccaaagctctgcgttcttgtttcagctcttatactgtgaacaagcttctttttaatgggctagttagtgccatatttttcacatttttgtgcttttagttggtgattttgctgtttaacatgacccccaagcaaagtactgaaatgctatctaatgttccctagtgccttaaggctgtgatgtgccttatggagaaaatatgtgataagttttctttaggcatgaattataatgctgttggctggagctcaatgtaaacaactatatacattaaataagatgtctttaaacagaaacatgcataaaacaaggttttgtattgatgaagtgatgaaaatgtttttactagaggcttgcaggaacctaatcatctgttttccttggcagcaagggttcagtattctgtgttcgtggcagctttatagaacatgactaccacaaataccaaaaattgaccgtaatttattggtatctggattagttagaatataaattcactgctgtaacaaaaaccaatacaataagtgtttaacaagatagatgttaatttctttctcatataacagtaaaattctattctaggccttatatgatgtaattgtaatttaggccttatatgatggctgtagtgtgtcggggacctagtcttctattttgttttaacattttcagcaatgtagtttctatcctcggtatatgatggccagtccagtctctgtcatcacatctgcatttcagccatcaggaagggaagatgaggaagcaaagagcatgccctgccctttaaggccgctgctcagaagttgcacatagtatttctcttcacatacaatgggccagaactttcacatgattacattccccaactataagagaggctgggaaatataatctttagcttgggtggccacgtgctccactaatacttaagaagatgtgcatggctattggaacagctttcagtctcagcaccagtaataaatgacccatttacaatccctgaagggcattggtcagcctttcttttaagccctgaaaattttgatgatttaaaaaaaaaaaacaaaacttccaatttgttggatttttcctacagctgacatcagagacgtttatcctgtttctctcttactttacctacagaatatgcagattgcatgtatatgcttaaaaagagttgagggaagagagtgagattcttccttcccattcctatttgcctacctctgtccatccccaattttcagtggactcacacctctggggaatggagtataagtccattttacatagataattgtctctcgggacagagggtcttttagttaatgtagaagataaggagaaataagacaagaaataagctgagatcttatttgccttgttatgttcttagcttatatttattatgggaaagaacaattggaaggttagtgccctgggctaattatcaagccttaaatcagacaactctcaaacagaactaaaatatactgtaataagttcatttctgaggtcttaaagacttccaagcttttgatcttgcatatcattgtatttcaggatgtcatatgacttgctcataacttcaagctaatgaagaatgtaggaatatagtggtttatattcactatggagacttaaatacttggtcatgctttttgtatcgtgtagcatcattggaaattctgtgcattttatattcctggacagcacatggtgttttatttagatgacacttcagtctttccatagactacttagaagcttctagtataggatgatggtgcttggtgccaaaatagcgatttgtaagttcagcagtcagtaataaattatttgattctaaataatttcaacttccctcttgtgatgtggatgagtcctccctagacaggtggttgcaggaacctgtacatatatactgatgttcatttggacattttataaaccttgcccattcaggaaaagggcagttcattttgttgaagaatcaaagccccgaaagacctttaaacagcccaaagtggcttgtttatcttgctgctaatgctagttgattcattttctaggtaatttatatgtgtgtgttttctttcttaagctgggctgttttgtagccattgcaagagtcaggtgttatattcatgtgatttttaaaaattggatattgacaaattataattgtatatatttttgaggcacagagtgatgctatctgtatacaatgcaaaatgatggaattaagccagttaacatatcacccccaaatacttatcatttattcttcctgtctaactgaaacattgtactctttgaccatcttctcatccctccaactccctaatctctctctcttctgcttgattgagcctgctgctaaagctttgattgcatttttcagttcactcattgtactcttcatctctaagatttctctttcttttttattgtttctatttctttgtcaaacttcttgttttgtttgtatattgttttccaaattttatttaattttttatccatatatccttgtagttcattggacttttttaggataattattctggattctttctcatttcacagatcttcatttctttagggttcattgttggagctttgttagtttcttttgaaggtatcttggcttcctggttctttgtaatctgtgttcttgtgttggtatctgcacatttgaggagacagctacctctttggcttttataggtgttctttggcagggatagaacttcacttgtctagcctttgattctgaataggccaactggcagcagccctgagcaggcaaagcttgctttggattctgtagatagttgggctgctgcctttgctctgagtttgggtgggactgctggctgggctctgctatcaggtgaacccacaagctgagctctgcagtcaggcagagttgctggtttgaaactgcaatcgcctcttggctgggccccagagtgtattccttggccagatggtacccctatttgagatctgtacttggacagtgttgcaggctgggcctcgaggttaggtggagttgctattctggaccagtgggccagctgctatgctcagtggaaatgcatgattgagcatggtggctcatgactgtaatcccagtgacttgggaggctgagatggaaggatcgcttgagcccaggagtttcaggcttcagtgagttatgatcatgccactgcactcctatgtgagtgacagagatcccacctctaaaaataaaataaaaaaaatgcacatctgaggtttgcctccctgcctaggtggggacttggagtgggctttgagactgaactgagggctgtttaaacttccacccttggcagaactagtccctgcactttgcaaaaatacagtatgataggcatcttccacctggggcaggtccttgaggctgagcttgagcactgtttaaaatcccaggtttggcagaactagcccctgcttctttccagaatgcactgtgatggtcatctcctttcctgggcagggtcctcatgagctttgacgctgggcctggaggctggccatctaaagattcaagccaggtagaatttcctaccacttctagaagtgatcagtttggctttgtcctgggctacactgtttagctgttagctggtacctctgattgggcaccaccactggcaggtacacagagctaccaccaagatctgcatgctggttgccgtgagctctacctccttgctttgtttctgcctgaccccaggtgatctagccatgctgttacccagcatgttctctgtgaggcgagactggagttggcttcttgggaagcctcttggaatgctagggaagctctgtgttctctggttttcttttcccactgtagaagccatgagccctggggattcctttctgtgtgatactgtgctgacttaggggagtggaaggggtgatgaggtcaaagtgagatagtttatcttactatatcttgcaatttttatgtagttttgtggtctatgcataagtttcagacttattcccaagttttgggttttttttttttttttttggttattgttgttgttgttgtttttttttttaatacacggaattttactcttgttgcccaggctgtagtgcgatggcgcaatcttggttcactgcaacctccacctcctgggctcaagcgattctcttgcctcagcctcccaagtagctggaattataggaatgtgccatcatgcctggctaattttgtatttttagtagagatggggtttcaccatgttggttaggctagtcttgaactcctgacctcaggtgatccgtccaccttggcctcccacagtgctggaattacaggcatgagccaccatgcctggcctcttttttttttttttttttttttgagatggagtttcactcttgttgcccaggctggagtgcagtggcacaatctcggctcactgcaacctccacctccagggctcaagcgattctcctgcctcagcctcccaagtagctgagattacaggaatgtgccatcatgcctggctaattttgtatttctagtagagacggggtttcaccatgttggttaggctggtctcgaactcctgacctaagtgagccacactccttggcctcccaaaatgctgggattacaggcataagccactgggcctggcagttttggggttttcacaaaggtgttcttgtctgcagatagaagctagttgaagcttctggggaggggggtagtaaagcctcctaaaccaccatcttgctgacatcttgttttcctttttttttttttttttttttttttttgagatagagtctctctctgttgccaggctggagtgcagtggcgtgatctcagctcactgcaacctctgcctcctgggttcaagtgattctcgtgcctcagcctcctgagtagctgggactacaggtgcgtgccaccatgcccagctaatttttgtatttttagtagaggcggggtttcaccatgttggccaggctggtctccatctcttgacctcgtgatctgccctcctcggcctcccaaagtgctgggattaaaggtgtgagccaccgcgcctggctgttttgcttttttaatggtgcctatctttataatcatttctgggataaacagccatt

SEQ ID NO: 321 - DNA, 23640 bp, Homo sapiens
  source 1..23640: mol_type = other DNA
gtccaatatggcggcgcccagtggcggtgtgaactgtgaggagttcgccgagttccaggtgatggggttttcctcatgtggcaggcatgtgcctccttttgtccccagaccctattccctgctttgcgagggagtatgaaccagctttggaaaaagcgggcaattcaaagctcttttctcgagccattggaggtcatggggggcgcgggtttggccttagggagcgaggctgctctgtaggaggagggaggaggggggtcatagttctctccgcggctctccggccttgtctgggaagctctgggtaatctgctgtggtaaagctcgggatgcgtggataaggattgtaacaatcttgtagcagttccctgaactcagtttccagcttctgccattcctctcctacttttgtaagtagagtttttgtgggagagaagaaggtgcagaagagctatttagttgataaaacatacttggtgcaatttactatttttgtgggacaggacgtatggaagcttggagggaggattaattatagtacctgctctagtgtcattgcccattagagaagatgtaatatttagaggttttgcctttttatgttcaaatatcagagacctagggctaattattaacacctgaatgcaagaatagggatctggttttgaccaagttgccattaaagttatctgttccaattcagtcataaatgtgcttctgtttagttacaaagttgaattccaaaatcatgatcttaaatatgtattgcattattaactaacccaagatactgaaaaattgacctatctgtagtaagctttgtactttgaacggtttgaaggtagtggtattcttgaatactgcctcagcctccctgtagctaggactacaggcacgtgtcaccacgcccgggtaattttttaaaagaaattttgtagcgagagtgtctcaccaaataatcctcttgcctcgtcctcccaaagtgttgggattacaggcgtgagtcaccacgcccggcctaaagtgtttaaaatttttgcaactcttattttttcattataaaaattagatttagtacttctgtaaaatatcctatttccaaattgaaataaaatccagaaaagagtgtttaaaatcgagtgcctagaatcccattttagcatgcattcaagaatttattagatactgtattagtccgctagggctgccataacaaaataccacagactaggtggcttaaacaatagagatttattttttcacagttctggagactagaagtccaagattaagctgccatcagtttctaggctatacagtttgatttaaggggggaaaaagagtgccatcagaattagttatagtaaggcttctcttcctggcttgtaaatggctgctttctcaccatgtcttctctatgtcactatctcttctctgtgcctgcacctggaaggagaaggatctctgctatctcttcctcctcttctttttttttttttttttattttttttttgagacagagtctcgctctatcccccaggctggagtgcagtggcacaatcttggctcactccaacctccacctcccgagttcaagcgattctcctcctgagtagctgggattataggcgcctaccaccgtgcccggttaatttttgtatttttagtagagatggggtttcaccatgttgaccaggctggttccaaactccagacctcaggtgatccgcacccctttcagccttccgaaatgctgggattacaggcgtgagccatggcgcccagcctatctcttcctcttcttatagggacatcagttctatcggattagggcccacccttatgacctctgtttaacctttattacatacctcaaggccctatctccagatacagtcatgttggggattagggattcatgaattttggggacacacaattcaacccgtaacagatacctactagtctcctggcacttgcgaaacccagtggatggagtataaaacaaggaacgtaatctaagtagggctataaaatgtagaaaatattgggaagaaaaaagaataaaatgctgaaagaatttagagagttgggccttaggcaggcagggactaggggtattctaggcagaggcaataggataatagacaaaaaagttttatgtatttaaaggaaatagaaaatcagtattgctagaacacattattcatacaggggcacattgggattacacaagattgcaaccagatttgtggaaagccttgtgtgtcacgtgtgagttagggagtcctttttgggcagaggggtgagatgatcgaagaggtgctttaggaagattcatcactactgccagtggctttgtttaggcccgtatcatttttgaaactagctttgcaacaggccttcctatcttctggcactttttttctctactatattcccccttcaatctaatctccataatactgtggcatatgctattatattctgaattttataatctaagctatgcttttgagttttgggttcatatgactagatataaacttcttaacatggcatataagaccttttaaaatccaatcccaaagtgcctcttgtcatgtctcttattattgtcctcatacgtgtctctttcatcatacccaccccccagcacttcaacatgcatgtttaaatattagtatttctattaggaatattcattgacacataagtgatttttgaatcacattgtaattaggtactaaataggttattttctagcatcaatgatggtttcttttatgcttacagggctgctttctattcctgtcctggggatgctgggtgttagaggactctggcagttgtagacaagtttgtgtttctggtttgggggaagcaccgtgggagctttgatgtaaaaatagagtttgaggaaccagatctgtctgaaaagagcatcatgtaaaagggactttgatgtcaagtaccaatgacattacttctgggtaccatcaggcaaagggagaggagaggaaaggttaagggagttccatatcattctttggagtacagtgtattttagttatataatggcccctttcctactcctcacccctatgtaccctaaaaaatatgtagaattataaaataactttacctgagaatgaatcttaggaatagactatagtataattgtaggggcaacagaaagttttctctaccccttcccactactaaatataggcactccttcaatacctaaattgccttccaagaggatgagatttttaccccaccaattacagagaagacataaaatgcattccaagaaaaacgcctgcataatttcagagtcagcctacaatgagaggttcatgatatatcagatctcttcttgttttgaggaggatgaaagatagaagaagctgggagtactacagaatttataaagttatctttggctgtgatttaatgtttagaagctcatgagggttctacacaagatgcagccttcagagaaccattgaactgtgtgtatttctgtgttatttctgtggacaggtgttgcagtttattgtgtataatgtctgttctgttcaggggtgtcttctatgtattttcttggtgaatttctggacaggagtgtatgccattggggctaagcctccggtaggtagtcagtaattccttatggatgatccacataattcaatggcagcatttttgtgccttcattcaccttcgtttgctcacaatgtgtgagggcagcccgaacttttgcctagaacctcttggagttgccttaacagctttggcacttttttccctgtgaagaaatgtgagcctggtgagacggtttacagttcttttccttctcccttttcaattttgaaagaaatcacttcctgtctcattacaccacaaaaacactgaggggctactatgttggacagaacattcactgttctcaacaggttcctataaataaaattcgaatctccttcttttcatagctgaaatgattgactaaatggcatgcctctactacttcatcacccacactttatttcgctacaatgtttccttccccaatcattttacctccctttttttctttctctttagcttttctggtatctcttctgtgacatttaagaatggcatacagttttcagcaattcctgaacaagtacattatcagtttaggggttgtcattatattttctagaatatagcactgtccagtaggactttctgtgatggtgggaatgttttgcatttatgctatctccatatgatagccactagcaacaggtggctcttgaatacttgaaatgtgactagtgcaattaaggaactaaattttaaattgcatttaattttaatttaaataatctcacatggctaatgtctgccatgttaaaggcaagctctagatcatatattgataattctctagtacacacagaaaaattgatacagagtcatgctccacataatgatgtttcagtcagtgactgactacatatacaacggtggtcccatgagattataacaccatatttttactgcaccttttccatatgtagatatatttagatacacaagtatcactgtgttacagttgcccacagcattcagtacagtaacctgctgtataggtttgtagcctaaaagcaatcatctatactatatagcctaagtgtgtaagtaggccataccatctaggtttgtgtaagtacactctatgatgttcacacaacagaatcacccaatgacacatttctcagaatgtttccttgtcattaagcactacatgactatttgataatccataggttccactggtaatacaataaaattgatggactcattacatagttaatgtggatagattcccattgctatgtaaggaatttagtagtatgtccaaattgttttattggagatgaatcgggctaaagtgttcaaactcaaaactggttaaagttcagagtcaacacaaaccccaggaaatgtcaaacgatgtaatctttcacgtggattgctgcagtcgtctaactgatcttttgacacctactctagttcctctgcagtccactttaatctaagcagtcattttagaacacagatctgatcatgtaaccttaatcacaacagaaaacacatgtttggttccctgtgggtctcagaaaagactaaaatcctatcatatgacctctaataatggacctcatgttacaccatgttttatctttctctgtgtacttaagccacattaccttttcagtccattaaacactctatttatatggctctctttaaggtcacccttgatttccatcctgctaagtttaaaagtttaatttctgttcatataatcatttattcatttaaaatttttttgagacatagtcaccaaggctggagggcagtggcacatcataggtaaccgtaaccttgaactcctgggctcaagtgatccttctgccccagcatcccaagtagctaggactgtaggcacatgccaccatgcttggctaaattttttacttttgttgagacagagtcttactgtgttgcccaggctggtcttgaactcctagccgtaagcagtcctcccgcctgaatctgccaaagagctgggattacagatgtgagctaccacacctggccccatataattcttgagttagtaacattcaacacaaatgaccaatccctccgttaaacctttcttctgacttccgtgacatcacagaatttttcctttacttttagatgtaagaattccttaatcattggcctccttcgctttctacagtctcctccagtgatctcttctagtttcatggttttaaagaacatcagtttattaatataactccaccccgatcagtgtcagactggcatactctactttctattccactcttctactcagatatctaataggcatctcaaacgttaacaagtccaaaacagagctttgttttttgttttttgttttttctaatttaaaaaattttagatttgggggtacatatacaggtttcttttcggagatggagtctcgctttgtcacccaggctggagtacagtggcgtgatctcagcccactgcaacctctgcgtgctgggttcaagcaattctcctgccttagcctcctaagtagctgagactacaggtgtgcgccaccatgcgcggctaattttttgtatttttggtaaagacggggttttgccatggccaaactggtctcaaactcctgacctcgtgatccacccacctcagcctcccaaagtgctgggattacaggtgtgagccactgcacctgcttgatagccttctaatttacccatcacacaaattatgaacatagtacccaacaggtaatttttcaccccccaccttcctccttacccttgccctttggagtccccaatgtctattctttccatctttatgtctatatgtacccattgtttagctaccatttataagcaagcacatttggtatttgattttctgttttgagttatttcacttaatggcctccagctccatccatgttgctgcaaaggacatgatttcataatttttcttctttttttggagacttggagacagagtttcgttcttgtttcccaggctggagtgcaatggtgcaatcttggttcactgcaacctccacctcctgggttcaagctattctcctgcctcagagtcccaaatagttaggattacaggcacctaccaccacacccagctatttttttgtatttttagtagagatggggtttcaccgtgttgtccaagctggtcttgaactcctgacctcaggtgatccacccacctcagcctcccaaagtgctggattacagacgtgagccaccatgcctggatgatttcattcttttctgtggctgcatggtattctatatatatgtgtgtgtatacgtacaccatattttctttatccagtcaactgttgatggacacttagcttgctgctgtgaatagtgctgtgatcaacatataagtacaggtgtctttttttttttttttttttttttgagacggagtctctctctgctgcccaggcaggctggaatgcagtggcacgatctcggctcactgcaacctctgcctcccttgttcaagtgattttcctgcctcagcctccccaagtagctgggattacaggtgcgcgccaccatgccagtctaatttttgtatttttagtagagatggggtttcaccatgttggtcaggctgatctcgaactcctgacctcatgatccacccaccttggcctcccaaagtcaggcgtgagccactgcgcccatcctctaggtgtgttttttatataatgatttattttcctttgggtaagtacccagtagtgggactgctgggtcaaatggtagttctgttgttggttctctgagaagtctccacatattccatagaggttgtactaatttacatttctgtcaacagtgtataagcgttcccttttctctgcatgcttaccaatatctgttgccacaacaaaactttaaaaaaaagttttattatacaagattttaaacataacacaaaagaaggctgtaccacaaacactcatgtacccatcccccaactccaacaactaactaattcatggctactcttgtttcatctgttcgctactaccacatatcccaccctaatccgatcattttgaggtcatcccaaataccatatcatttttttctgtaaaatttctgtctatatctccaaaagattacaactttctaacaccatactattgccacatacagacaatgaacagtaatcaccagatagcctgagtcagaatacaactcttgatgttcctactctttccaagtctcttccttccccagtctcccccaccataagttaatggcacttccatacaattagatgcttaggccccaagcctggaagtcatgctattttattttctcgtccctgaccaccaattcagcaatttctgttagctctatcttcaaaatatatcctaagtccaactacctctccttaattctactgctaccagtttttttgtttgtttgtttgttttagacagagtctcgctgtgttgcccaggctggagtgcagtggtgcaatcatggctcaccagtgcctcaacctcctcagctcaagcaatcctcctaccttgcctcagcctctcaaattgctgggattacaggcatgagccaccacccccagcccagatgttcctatcgttggttcaatcatgtcatttagattttagcgcaaatgttacatcctcagaaaagccttttttgatgtctatctgaagtagcccccaagcaccactcagtcactcttcatctcatcaccttagtttgttttctttttcatagtactttttagtatctgagattatcttgtttataggacacttgtttaatttctatctcccccttcaggaattttgctctgtaagagcaaggacctcttttattcgctactgtagccttgatgttttgaatggtgcctgacacatgctagacataggacagttggccctcccatatctatgggttttacatccatggattcaatcaaccgtggatcgaagatagttgaaaaaaaagttgcatccatactgaacatgtacagacatttttcttgttatcataccctacacaatacagtgtaactaacacctatttacatagcatttatattgtattagatataagtaatctagagattatttaaagtatatggaaggatgtgcataggttatatacaaatattgtgccattttatatcagggacttgagcatccttggattttgttaaccataggaggacctggaaccaaacccccatggatactaagggatgacagtaattatatgaagaatgagttaataaataatgagctctgtgatactgtctcttactgctgcattatttaaagacaaatattgctgagggctttcataaccaaggaaacctctatccaaaaggcacaacttaacccttggcctcagaagatcagttcagtttagatagcgaaaaggaaggttttgaaagagaatttaaagaggctttttttttaaaaaaaaaaaaaaaaataggccagtcataggaggtaaagtggcaaggtaggtccctgtcttctacttacctatttttttttttggacttcccaaatagtactgccatcatttgtttggaatttaccacttaagcacaatacatatatccttcactatgtgtggtggttgcccaatgaatgcattgagattattccttaagaattccagtttacagagaatactattaaaaaaatagaaagatacaggacgagaagataatgaacttggttttagacctgatatttgctagtgttttattagtctgaattatgagccttctgcaagccgtttcacttctagattgaggtatagaaaaggccattaaattcactaattaaaaattagtggaatgatagaacagaatctagactacagacttagattgaatgggctaaatggtttataattggaaacaacctaaatgtttgttaatgagaaagtggccaaatgagttgtgcttgaacaggatagaatacttaaacgcaactatttaaaatatcttcagggctgggtgcggtggcttttgcctgtaatcccagcactttgggaggctgaggccggtggatcgcttgagtccaggagttcaagaccagcctgggccatgtggtgaaaccctctctctacaaaaatatacaaaaaaattagcaaggtgtattgcacatgcctgtggttgcagctatttgaggggctgaggtgggaggatcacctgagcccaggaggcagaggttacagtgagccaagatcgcgccactgcactccagcctgagcaacagagtgagaccctgtctcaaaaaaaaaaaaactttcaagacatttctagcaacattatattatgctcataatataatgtcttgaagccagattttaaaatgttacatagtacctcagttgtataaaaacattaataggtatgtgtagaaaaaagaccaaagggacatattaaaatgttgataatggttaactatggatgatttttatttaaagtttttttctaacttttctaaaatgaaagtaataataataataatttttattttaacaaatggacgaggaaagaaaggagttggtttcagtcatggatttaagtttggcaaaggtaagaagtagcatagtatattgagggaaaaagaatcaaacgttgcttttaatacatattaatattgaatattaacttggatgttttcaataataagtatattcctagtattatataattctgttttattttcattcgttctttctttttttaagagacagggtcttactattgcccaggcaggagtacagtggtgtgatcatagctcactgcagccttgtactcctgggttcagtgatcttcctgccccagcctcccaggtagctaggattgtaggcatgagtcaccatgtccggctaattaaaaaaaattttttttttgtagagacagggtctcactatgtctgtcattaaggctggtctcaaatttctgggttcaagtgatactcctgcctcagcctcctaaagtgttgggattacaggtgtgagccaccgtgcccagccattttcttgatgctttttaagtggctgtgttttgttgttgttgttgttgttcttgttcttgtttgaatattttgtaaatttgagaaactaaaaagaaagagaaagatatactgccagaaacttctcccagagtttaactgaagacgagatgtagctgatgtccagcctttctctagtgacaagtgaaaagaagtacactgatcatatgtgggtaggaggggttgtgctgtgtaggtacttactaccagtctttttaagttccctgcccttttgatattatttttctgttggttttttttttttttttttttttttgagagttggaggctttctgaggtaagatggatccttggaacatatgagctatggttactaagaaaaaataaaaactagtagtacactttattggctgtatgctggaggtggaaggagcatacactgtttgctaaacaccgtgccagcaaatgggatttcaacatgagtaaaacagtcttaacccttaagacaatcacatttgagccaaggaggcagagttggtgcccactgttaggattaccattacttaacctacctattgtccttgaacattttcttatggttgcatgtatttggcttggtttcctcactcctgacttaaaggattgtaaaatatccaagagctttattttttacttaaatgcttattttttgtcactaactttccatttgggttatattcttttattttaaatacatataggaattactcaaggtgatgaggacaattgatgacagaatagtacatgaattaaacactacggttccaacagcttcctttgcagggaaaattgatgccagccaaacctgtaaacaactttatgagtctgtaagtgtattttttgagtcttttgcttctttcatgcctttctttgcaggctgaataagaaatcagttatcttgtaactcgactgtgactaaaggaatgacatcttttctttgcctatacctgatggtgtatataagttttgatctggttactacacattaaagaaaatgtgtgaccttacgcttgtgaaatcttaccaaacctgggaagaaatggttctaaagaatgggagcagttgttttgtagcctttaacttaaggagaccttatgtacaaaggaatgaaaggaggagagtgaaacagtgaagtaaaacagtaacaagagcaaggaatgtgagcacgtcagtcctaaaaagccaggcagctggtacaaggaagaattaaaacccttcacacctttaaaccttctttttctcactcctcaggaaggggaatagaagcatttggcaactgggagagaaggaaagccagtggatcagttgtcctttcctgaggctttggtttctcaagtatacatttttcattgcccccctttatttctcttttttagtctccaaaagcagaaggaaataatgatgcagcaaaatcttttttatagtttatttacctatattcttttagtaatttggaagctaaagttcaaatgacacttgctattttaagctctaccacaaggttactgtttggattcatagtcgtaaagaaggcatccttaaaacctaaactgcctttctcagatcagttttggacaagcttatccatgtcagttaaattcagagcattaactactgatatttttgttctgtgttaaagtatgttattttaaatgagcaggtaagtcttctttgagaaaatcataagattgtggactttaatgagtagaattcagtattgggagtcgacaggatgggacctagtcctaattggctatgaggttgtttgacagttcactttctttgggtacctctgtctgaagaactagaatttatggtcactttggtgatactccctctctcacctcactactcatataatctccataatctataaaattgtttccatttacaatcttcctattaacctagacgtttatagtgtagtgattaacaatatggactctagatctagattaatctcacatctgctacctcctagctgggtaaccttgattatgtcacataacctctgcctcagtttttttttttttttttttttttttgagacagtgtctcactttgtcacccaggctggagtacagtggcagaatctcagctcagtgcagcctccacctcctgggttcaaatgattcttgcacctcagcctcccaagtagctgggactacaggcacacgctaccatgcctggctgattttttttgtattttttggtagagatagggttttcaccctgttggccagtctggtcttgaactgctgacctcaagtgatccacccgccttggcctcccagagtgctgggattacaggcgtgagccaacatgcccggctgtctgcctcagttttaatatttgtaaaatagtataataatggtacctagttcatagagttgttggcgcattgaattataaagtgcttacagtactaagtgttttgtatacaaatattgctggccaggtgcagtggctcacacctgtaatcccaacactttgggaggctgaggtgagaggatcacttgagtccaggagttcaagacaagcctgggtgacatggcgaaaccacatctccacaaaaaatacaaaaattagctggacgtagtggtgtgcgcctatagtcccagctacctgggaggctaaggcaggaggattgcttgagcccagaaggcagaggttgcagtgagccaagatcacaccaccacagtccagcctgagtgacagagcaagaccctgtctcaaaaaaatgtttgctgctactgctatcattttttttttaacaggccctgtgagaatcacaagttgttgttttttatctccttgttgaatcaggataagcttgcatactaaatttagaactcttctgttttggaaatcctgtgtgtgtgtttgagtttttctctgtatctatatcctggaaggattcagcaacatgtatatcaagtaaagcttaatttttcaagtagctttgtgccagggatcgagcctgcagcagagtgcccataccaataagcaccactgagttcccttaagtattatgtcagtcaagaagcagaactctatgaaatatccaagttgctcatgttcaccctgactttaatccctgacccagcttccttctgtagctgaagaagggatatttgccttttcaaataacgcttcttcctaggagttgatcagtaaggttattatgaagcactcattttagaaatttcaaatctcaaaagtatactcaaggtaaaacttgtaaatttcaatgagatcttattagagcatattcccttcaatctatgacatttttctagctttacattgtttattcccatggtaaacataaaaatcaatactgaacaatagagtctatgaacttgaaacaatgtttaacaaatgcagattttggggtattatcaaaatgtggctatgattatggaagtatgtttgaaacatgaccatgatactttagaatcaagatgggaaataaatgagaaatgtttttattaatttgttgcattaagatggaggttatcaagagttgttctgtcagacatccttaatttcaataagcacacacaattgatgcaaccactaatctgtgcttcatatataagttttccttatcaatacttatattttataatcttgaaaagggctctgtcttgcgaaggtaaaggtagcattctttgttatttattgtaatgaaatcttctatacatgacttagtttataatttctttcacttgttgacaatgtgagacaggaaaaaatatgaaaggacaaagagaggaagaatagccgtttaagtggccaggtgtgtgcgggtggttgtagaatagaggaacacatgaatggaatcatggggaaagtcagtggtgtagggcagaggaaactgaagtgagaaaagcccagcttggggaatgcagaaggaaagctgaagtcaataccaggagcatattgaggaagaggacagccccagacctcataccttccaccctcagagatgctgccagttatgtttttagatgaggtagctgattcaacacaatcttctctttcatggtttcagtcgtcagaaattgttttagaaagtattgaatttctatagtctcaaggatttttttgaaaaacactaaaatgtgataaatttatgcagtttttttttctcctttcattcctttgttcttttagttgatggcagctcatgccagtagagacagagtcataaaaaactgtatagcccagacttcagcagtagtaaaaaacctccgagaagagagagaaaagaatttggacgatttaacgttattaaaacaacttagaaaagagcagacaaaggtaagttgaacagaattaacatttctcaggcaaagtttttccaattgtagccttcaaagtaagatttttaatatgaaaattttggcatataatatggcagttacttaaaaaaatgatcaagagattagtgcttcatttttagtgagctttattttattatgtttagttattaattggtaaattaatgtgcacttcttgaacaaatgcagcatagcagctttgtctaaaataagcacagtcataatttattttcatttctttgtttctttcccactattaaagacaagggatcactacaggtgaagtaccacatcagaaattctggggaaatcacatctgtacagtatctgccttttgagacataacctgagaaaaacatctctaatatattttggaaatagctccagtttcattgtgtagaaatctgctgaaatgtaatatagactatttaacttcaggatattaccctcgttagccataaaaatatagtatgatttaaatataaccagatttacttgtacctcattataatttatttccctactgtgtaaaagttgctagggatctttggctttttcttggacatgactttttcccatttcctcccctatccctgcagtgtttttacttttaagaaaatagcaagtacctacctagggatgtgtcagaggaagccttattttcccaaatcaactataatgtagatagggtgtagacttcagaatacagttaatgcagcagaactgtttctttacagcacttgtatgtgacgtgtcaaggaaacaatagaaaaatacagcatattttattatgtgggatttattgctgtctttcttttgaggggactcttagggggtaactttttatcttgtataatttcaaacttaccaaaaagttgtaagaatagtgtaaggaactcccatgtgccctttacctatattcacttattgtttatatgttgccccacctgctttacagttcattctcttcaccctccctctctccttctcttcaccctccctctctccttctcttcatccttccctgccttcctccctctccctgtctccccacacacctgtatgcataaatacagttttttcatgaaccattttgagactatgttatacacattgtaccactttacccttaaactcattagttatttctaagaacagggacttttcctacaggaccagtgtacaattatcaaaatcatggttttttttttgttttttgagatggggtctcactctgtcacctaggctggagtgcagtgttgcaatctcagcttactgcaacctctggttctggggctcaagcaatcctgcctcagcctccccagtagctgggactacgggcgcgaaccaccacacccagcttattttttgtattttgggtagagatggagtctcaccatgttacacgggtttatctcaaactcctgagctcaaagtgatccaccttcctcagcctcccaaagtgctaggattataggtgtgagccatcacacctgacttcatgtttgtattttaagatggcataataggtgacttacggatccttgtgggattgagtcatgcttttcatactgcacagtcatgaagtttgccctttgtttagtagatgtagctgaactttgaaaaggggacctcgtcatctattgaaaactattagtagaaaagaaaagaaacctctttccttgtagctggctgcacacaaggtgagtaggccaggctgctgcactttttcgatcattccgccaattctggatgtctcactggatccaggactcagccactgtctttgctgctctctttgttcatgactactgcgtcaggtctgtattccatacctgctcatgccacaggcactggtggatcccttggacagtgaccttatgcagtgatgttgatcttactccccttgctgttcatgaaggcatatagattatttatttatttatttatttatttatttatttatttatttatttttgagatggagtctcgcactatcgcctgggctggagtgcagtggtgcaatcttggctcactgaaacttccgcctcccaggttcaagagattctcctgcctcagcctccctagtagctggggttacaggtgcctgccaccacgtccagctaatttttttttgtatttttagtagagacagggtttcaccatgttggccagactggtctcgaactcctgaccttgtgatctgcccgtctcagcttcccaaagtgctgggattacaggcatgagccaccgtgtccagccggcatatagataatttatataaaactggtgaaagtctagtaattttggagtttgtatttcaacgcccttgaaggtgttgacaaaggaaactgcagggcaaaggctgttaaattggaaactgaaaagtcactgtttgcagatcaagtcaaacaacagagtgactcattagtggagagcaaagttcaaaactctactgagtgtttgggaatgattgtgacacacaatttgctcagccttgagatctgcccttgtgtctttagggcccagatagaatcaccaggatgaccactgcaaggagggtttagaaaccaatcagtgagttgcatgaggtttgctttctagcttgataacatatagggttgggggtaaccatggggtagtacataagcaaataaggaaatgtgaattttttttttcaattttcaagtttgctatgaagattatggaatcagagagagctcttggagatggtacagctctacctcttcattttctatctgaggaaaaagactcagagatacttgagatactaactgacacccccaaagccacaagctagtaagtggtagaactgggactttaacccatctcttctgaccctgcattcagtcagtttctttaagttgtgactaatagtcagatactttagtgagtatatttcatttatagacagatgccagtcaaaaaatccccactagtttacctgaatatttaactcaaaaaaagcaccttcgttgctggacctctataactgctgtcacatgttagtggccttaagtttacctgttgaagacctacagtctcaaagacaactgtctcaaaggtgacagtttgttggtagcactgataaaattgtattagaaattggctgtaatatctgcaatgttgtagaattttaaaaaataatccaaaggcagacagctctgaggaaataaatcccacctaccttggtggctttgtaaccttgtgtattaattgttctgaaaagtctgattttgaatctgtaaaatggagttgatacctaataacttcttatttctggggggcatgtgcggggaggattcaaggatgtaagtaagagctagcatattggctgctacaaagtagcagtttctttcctttatgagtctctgggactccatatttgttgcattaatcttctttgtcatatcaccaaccagtggtttctagcttttgtttcactactgcttaagggcagggtgttgtgacaggggaggattccctgtctcagtgtcagggtattctcttttggacagttctaatgttcgaagattttcatattgtgaaattctgctcccatgatatataagtactgcttcttaatcttctctctggagttacccaggataattctgaacccttttctacatagtatccctttaaatatttgagagcagttttgaagactatcttagtgactttcacactgttcttcaactgaaattatttctttggcagtcagtccaggctttgtcagagaagtggagctttaatgattttggtctgtatggctgattaaaatgggaacttaggttgcattggtgggcttcttcaggcttgttactactgcacagcacaggactaattgtcagaatgagtccttctccttgttccacagttctagccatatgtacaggcctacgctttgacgccagttctgaatctaagaagggagtttgcaaggagccattggatctgtccgaagttccattcttatcgttgttgccacaaatttctcaaacctcctgcctgaactgcgctcctggttggccagggtctttggcctaggtgtcagattcatgcttgcccagatcttgttgagctttctgacattttgttcccaaatctggcctgggttcttcactttggcctgaggaaatcgtcctggtgttaacctcttagttggcatcaacctatagttcatgcttttttctcctcattttcctgaatattttcaagccttctgcctggaactagccagctttttccccttcaagtcctctaacaaaatgctactgggagtatggtgagtcctgctctcagggcctggcaatggaattggctacttttctgttggagtaattaggttggcagttataaagaaagctagaaagacttggcatttttagcctgagacctctgactgtatggttaaggtgtgaggaaacgcatgcctttctagatcacttccatgtatattctctttcctccctgagggttttttttcttaattctctattcaggtcaggtttgcacttccttgtcctttttttcctctgtgctatctttgcaagtctgtagttgtatgatcaatctctagaactggaatccctgggttcaaggacatgagaatgtacatttcctatgattcttgccaaattgccctccatagattttgtaacaatttatactcttactaagaatatatgagtatatcttttcacgtaccttcactaatgttaggttttatcaaacttattcattctgccatgttatggcttaatttgcatttctttatactggagtaagattggcattttgttatgtttactggccttttgtatgtcttctgtgaactgactggccttgggatattttttttttaaagctctcaaggtgattaggatatgcagcaaagtttgagattagcaattgattagatatggggaaagctgattgtgtcaaagaagcttccaaactctgccattaacagacaaaaatactagagcagtagcaggttttgttgggtaaacatgagtgtggttttagctctttaaattttataacttcagttttttttcttgctctttaaattttataacttcaatttttttttttcttgcagttgaaatggatgcagtcagaactgaatgttgaagaagtggtaaatgacaggagctggaaggtataaaataatgttggtgtttggaaagaagtaggagggaaactgaactagcaaagggaaaccaagggagggggagtaaagagtgccttgaggctgtaaggaaagtagagatcactcgtttacatttacaattgaggattgtaaccttttggggttggggggagggtagggagagcaggatgcagttagcatctaattagagccattttataacgattagctttacagggccaggcgaggtggctcacacctgtaatcccaacactttgggaggccaaggtgggtgggtcacctgaagtcaggtgtctactaaaaatacaaaaattagcgtggtggcatgagcctgtaatcccagctactcgggaggctgaggcaggagaatcgctcgaacccaggaggcagaggttggagtgagctgagatcaagccattgcactccagcctgggcaacagaatgagactccatctccaaaaaaaaaaaccaaaacaaaacaaaacaaaattagctttataagcatatgatagaactgaatgagctgccatcataacagcattagagacattctctatgtctcctaacactaattacaggcatggttgctatttagagttactactcagaaccttcaaggaggctatttgttcaaattagcctttttgagctcagttactttccgtaagttttcctatcattaggtaacctatacggttgcttgtcttctaacttacctgatcataaaacttgttattatatgtagttttactggtatctgataaggctttttattgctcatagatttacaagctccttattatcattgcatagttcttgttaggaactagattaggggaccagatcccagaaacatatagtcaaaattcatgaaactctgactttagttttctgaaaaagtatatccatttacccctctctaaaactctaaaagatttacgaagggcaaaaatctattaaatctgagaaaatgtactgaaaattctgttttatcatttgaatttaactactggaatgttgttaaactatatgcttataagagaggttagctgaaccaaaaccagaatgtaccggcttgctgagacatgaacacattgcaaaatacaaattggctttctttgctttatcacatttctctatcttatcctctttgccaaggtttcctattcctgccctttccaccaacatgataaggtgtctgtcacttgagaggatttggcaatatttcccatttatattctctggaaaaataatatttactcttgggattggatggggaaggggtacaatgaaacatctggcttgaaaaaacaagtgcagaagtttatgatatatgtaaaatgtagtgggaagagtgaactattttgaatttaatattagttttaaagaaaatatgttctatccactccacagaagatgaggcccctacttgttttaaaaagaagaaaatgtagccatggtgctctggtgcagtgggccagcagaagtggataggaaatcatttgggaaaaggatttggagaagctcagccaagttgtatatatcaccccaaccagtgtgtcaaggccactaaactgaagcctccctcttgtctgattgggaatttcagggaaatgtcagggctggaaatgggtgagatgaattgtaagacaaaagggctagacagagtctatataatttctacatattttctattaattgtgagatgcatatgcgaaagattatgtgacatgtagaatttaatgaatattaataaaatgaatattcatgtatctaccactcagcttaagaaattgaataataggtcaggcgcagcactttactggctcacgcctgtaatcccagcactttgggaggccgaggtgagtgggtctcttgaggtcaggagttcgataccagcctgaccaacagggtgaaaccccgtctctactaaaaatacaaaaaattagctgggcatggtggcgggtgcctgtagtcccagctactcgggaggctgaggcgggagaattgcttgaacccaggaggtggaggtttcagtgagccgagatcacgccattgcactccagcctgggcgacaagagcgaaactccgtctcaaaaaaataaataaataaaaagaaatagagtaacagtacctcacaacctctgtgtttagatttttcttttatttttataatagtcaatggcagccaacataggtagtttgtttttttttaacctaaaaagtgatttgttctttacattaatgatgtatgggggtaaattctgagaaaaaattcttttcaatttcagaattgttataattggacacttaaaatttttgacatgatttaaatttttttaatattaaaaatgttttaaaaattttaaaaatagtaatatacagtaaaaattctgccttctgtccctctccttcagctacctcctactttcccttccctctgaaagatggtatatgctttcagatactcaaaccttttctaattttatgtgtgtgtgtatttttctacctttgttacacaagtgaaactgtactattcacacttttttttcccttgataatcttggagatctttttaaatcagaacataaattatttttaaccttgcatgtattccattgaataaccataccaaatttttatttaacacagttccatgtggacatttagttattgagcattctttatttaacttattttagatatttttgtgttgttgtttaaaaaatgtccagaatatgaaattgaaatgtttgctagtaactaaattacctggctcttgatgattttttcccgaagtaacttaaattttattaaaatactagaattgtcttgtaaatggatgtcaaggccttctgtgcatttggcacctcataagtcagtttgaactgctgaggaaactcttctgtttcctaaatctgttgacttaggacaaaaatggtaatagccttttggagcctactaaattgaatttagttccaggcctgatttacgcaggataactcaatgacttttgtttctgtttcaatattttaggtgtttaatgaacgctgccgaattcacttcaagcctccaaagaatgaataaagagagattcttttttttttttttttttttttttttttaaggactgggtcatctcataagagctaagcatgacagatatcaacagggcgggctttctaggatgatttctgagccaacagtccaagaccttttgttgatttcagccccacttagccaagacctcaagtataaataattctgataattatggagaaatcaactgctattttatactgattctgtaaaaaaaaaaaaaaaaaatttttgtaactattaaaataattttctgactcagtgt

SEQ ID NO: 322 - DNA, 32742 bp, Homo sapiens
  source 1..32742: mol_type = other DNA
agtctcttcctggcctccccacagtgctggcctctgcctccatctcagtcacacatgtctagcctccaggcgctgtgctctggcctgcccctgcggcccctcccagagaaccggggacgccaggctggggtgccccatgcccctgtcaggacccccagcctcagccctgtggagaaacaggtaagcagtgggcccgtgctcccgaggccttggcctctaggcatcctccaggtggtccatagtgagcacccaggcttcctgccctcttagtgggagctgctcagccgcccaccctggactccaggggctccagcctgtgcgggtgcaatgcacagtggactctgtctcttggatgcagccgcccttgggtgcaggatcgccgtgcctgtttacagatgaggaccctgaggctcaaggtcagcagccggtcactggtggcactttggccacctccagtgggaggaggccttgggtgggtgtgaagtgtcccacaccaagcgccgcgtccaccccaacactcagaacgtttgcacacaggtcagctcttattttcatttgcaaatgtccctcccgcaaatctctggagaacgtgcggctgcatggctgaaccctgtagctggcaggcagttgccagggaaagatgggctgaggccagtatcccctcatctaacagcaaagcagtccagggatggtgcacgcttgccagtggtgccctgtctgggaacctcccttttgtcatttgtcagcttgagatgaaaatggtgacaccagggggttgtggagaagagtaatgaaataaagtaggtgacacggttatatagactttcctcctactttttactggaaactactcaagattttcagaaacagtagagaagtggaaactgcaaacaagcataaagattaaaagaggaatcctacctccccaggtaaagatggctgccctttgcaccggagcccactggacttttctggagccacccacagaggcctaacaggacacagtggggacagtaggggtcactcagggcagagctggcgctggggaagggagaaaggggaagcaggttggtgggtgtgggggtggaggggagttggggggctaggaggatgctgggggtccttgtgggagtggggcactgggggcaggtggagcgggtgctggagggaaagggaaatgggggaggggccagcaaggtagagtaggtagtgggcactggggggaggggggagggtaggtggtgggcactggggggtgggagggtaggtggtgagttctggggtggggggatggtaggtggtgggtgctgggtgatgagggggagggtaggtggtgggtgctggggtgatgagggtgagggtaggtggtgggcgctgggggtgggaggaggctagttggtgggtgctgggggacgagggggaaggtaggtggtgggtgctggggtgacaaggggatgggtaggtggtgggcactggggggtgggggacattaggtggtgggtgctggggtgatgagggggtgggtaggtggtgggcgctggggggcaggggacagtaggtggtgggtgctgggagttgggaggataggtggtgggtgctggggtgaggagggggtgggtaggtggtgggcgctggggggcaggggacagtaggtggtgggtgctgggagttgggaggataggtggtgggtgctggggtgaggagggggtgggtaggtggtaggcgctgggggacaggaggagggtagatgacaggcacttggagacagtgagggtaggtggtggacattggggggcggagagggtaggtgtcaggtgctgggggacaagggagggtaggtggtgggtgttgggggtgggggagggtaagtgttgggtgctgggggtggggggagggtaggtggtgggcactgggggttggggagagggtaggtggtgggtgctgggcagatgagggggagggtaggtggtgggtgctgggggttgggggagggtaagtggtgggtgctgggggttggggagagggtaggtggtgggtgctgggcagatgagggggagggtaggtggtgggtgctgggggttgggggagggtaagtggtgggtgctgggggttagggggagggtaggtggtgggtgctgggggttgggggatggtaggtggtgggtgctgggcagatgggaggagggtaggtggtgggtgctggggagtggaagggggtaggtggtgggtgctgggcagatgggaggagggtaggtggtgggtactggggagtggaaggggtaggtggtaggtgctgggagacagggagagggtaggtggtgggcactgggggcaggggagggtaggtgttgggtgctggggaggctggtaagtggtgggtcctggacgggggcgggtaggtggtgggtactcaggggcagattgcaagcaggtggtcctgcccctttgctccccttggcccatctcccagttgtccaggtgttgttaatgtttcctccctttgatcacctccctgctgggcgccaatgcctcaaacttcaccccggagctcagggagggccctgcggcctgcacatcccctgcggcgccctgtggctgtgatcagctccctgtggctgtgatcagctcccggggtgtcttgtgttgggagaaggtggctccaggtggaggagtggccacctgggctttgctgggttatgtcctttgcttgaatgtcaggacacccttggagtaggagcgggtgcagttctgagggctacgggcggctccctgagtcctgctgcttgacttctattttctattaaatgtgtttcgttgatctttaacatatgtatttgaagacaattttatgtgataagaaatcgaatgtataaaagtgtaaattccccagttcaccttctgaagtcaccggggccttattttttggcatttgtaagctgaagatgaaaacaatgacaccagggggttgtggagaagaccaaatgaaataaagtaggaggaaatatagactttcctcctactttttctttactgaaaactactcaggaatttcagaaacacattctatgcatctatgcagtgcagaagacgtctgtgaaccctcttaaaaatacaagcagaagcatctatacacgttaggttttttcagattgttccttcgtggtgcatttagagggccctgtctttgaatggctgcatagtgtttcattatttggatgaactaacgtgcgtgtcattctttgctcgtctttaacggagctctgtgactggagtggggcctttctttgccaagttaatcaggacactctcagcatgcgcccgacacagctctcaccatgcacagggaaacttcagtcacacgactggagcagttcccctgttaaaaatgtcctcagtacctacccccaggtgcagtttctcctggtgaccttttccccaaatcgaccccacccacagcgcctgtgccaggcatccaacagcagatccgaagatggccagcgtctgtgtccccatcactaccaatgtactcccctcctgaacttcttgaggggcagagctccacagggttcatttccaggtctccagtgacagcagcagatgtttgcagaatgaataagagttgtactaggagccctaactaacatcccataagatttcagccagcaggagaaacttgacaggacttcttggaagaggtggctatagcagcttaggcaaagttcctagcctgggaaagaagaaaggccatttggagacaaggggaggcagtgtgcacagatgtggagacggagctgtctgaggtgtgtcagggtgaaggaggctctgtgcaggcaggggcttggtattgagcttggagagccagacccagccggctgatggaggactctaaatgccaggaacagcatggccttatgaaatgggtaatagggagcccatggaagtttctgaataggggcatacctactgcttaactatgccccccacagagtatagaggcttctatggaggtcccagaggggtggggtgggcagaggcccagctggaagaaagaatgggcagcatggaggcccacgagtgtgggagatgacagttttgacagctgggcactcacacacacttaggtgtgccaggggctgttctaagtacctcaattcattcagtctccaaggcagtcctccgaggtgggtactgttattatgcccactttacagatggggaaagggcagtcagagagcggcaatgtgcatgtgccatgtggcaggcctgtgccacagcagcctcgcagagccactgcagcccatgcaacccagagcgctgtccgcacccaggaggcagtgtgcacagatgtggagaaggaagcctggctgcagctcctggctgtcaacgtatcctcggcctagagctggtggggaccctgctgaaggctgcactagcagggtgcaggaacaggagtgactcaaatgaagccaagccatttggatagtggccatggtttctggcagaaatagtgacagtcagaaactttcagatgggtgaggtttaaaagtgagctactgccccacaagctgactgccaggttagaatgaaagtaagtcctaggctgaacacacacacacacacacacacacacacacacaccctgctctgtgggctgaacaacgttgcaggctggcatcccttcatttcggtgctcagccaccatgcaggacaggcgtgcgcctggcacaggtgccctgatgcccgaggcagagttctgttactgcctgtattagcttcccatgtctgctgtaataaattgccacaagtgtagtggcttaaaacaacacatatttattctcctgcagttccagagatcagaaatctgaagtgggttttactggactgcgatcaagaaatagtgcaagtgtagtgatgttgaatcatgcttgctctttgctttcttagtgtgtcttgtaagcctcattttttggcacaactattacatacaagactatcctggtttatgtttacatgtttgaaaagttcattatatatatacatatgtatacattttagagacagggtctagttttgtccaagctggagtgcagcaacgtgatcataggtcactgtaacctcaaacacctgggctcaagcaatcttcctacctcagcctcccgagtagctgggaccacaggcatatgcaccatgcctggcaattttttatttttcgtaaagatgggggtctccctatgttacccaggctggtctggaactcctggcctcaagtgatcctcctaccttggtctcccaaagtgctgggattacaggcattagccaccacgcctagccttatatttttcgtagcataaacatataaaaatcctgggagcgccgtgctccttctggagggagctggatgaagtgccgcagtgccgcagtgcccattgttccgtggtcatcaggaagctgtgggccccatcacaccacacagcccttcctgggaacagtgggcactgctcagcctgaaactcctcctctgctgaggttgccagggtgggtggaggcactgggcctccctccaggccacccacagtcctgttgcagggccttggcaggtcacacgacctgtgtgagccccatcgtcttgttttaatgtggagagctgcctccagtccaaggcatggaggattaagtccaggccagtgagagtgagcctttcttccccacttaaaagaatatttattgcatgcctgttaggtaactctagatacagaggatgaagtattaaacaaaaatagaagacaactttcatgaactaaataaaaacatgaaattgcagataaacagacagtttatcctggaaagaaaaaaaacccttgatatagaataatcagcatgaagacatatctaggctaaattactgaatttcagcaataaagaaaaattcaatggttagcaaatggaaattttatacaaggggaaaatgtggcagacagagctttggggctgtatttcggatttggaaaaattgccagaatctcctttgcttagggcacaagtttgtgcttcatttcagaacagattgagcttcttacacatttcacctttaagaatggccgagtcatttccatcaactgacatgattttaaattcactaattttcacagaacctttgttgtactttttgagctatgtaattatctgaacaatgtttctaatgcatttgacacaactgattatgaaagaagtcctccttgtctagcacgtgagtaaaatgtcccgtcaagccccgaggcggcggctggcactgcctttagaatagtgaggacagtggtgtcaggctgcagctaccacctaaccagcaggctgtgaaatcagtttaggaggtgcagcagtattgacttgaaagtgaaatgaaaggagttagaagaggatggatgtattagaacccacgtgggaaggttgtcttgttgcatggagtatgggtgtatgtatctgggtagccataggaattgcttcctatggctcacgatcaaaagagttcatgtgtgtgtgtaaaatatatgttgcttttgacagctttttcttatatgtgcttgcacttgcacagggtacttaaggccatgtggggtctactttccaccctggagcttctgcattctacaccatagccacaagcctcaggcaggcccctctctggtgcctgcctgggggtaagcagcgccatccccagaacaggagatggttcaccgtaagcaagaagagagagggatcagtctgccttcatgaaaggggcaggagggggcgatcagggaaggctttctgcaggaggtgacactgtagatgggcctggggtgagaacagtctctgggtgggcaacaggcttctgagtggagcagagacaaatccatttgggaggaggatggcccatcgcggggcctcagaacaccgggcctggagtcccagccccgactgcctctccgctctcctaccccagctggcgctgaggaacgccctgcgctacttccccccggatgtccaggagctgctggccccagagtttgcccaggagctgcaactgtacggacacatctacatgtaccggttttgccccgacattgaaatgaggtcagccttgtgggtacagcttcaaagggacccgaggggcaggcagctcccgcaagggactgtgctgggggccaggaacaaggagggagtcggcagtgagggggaaacccagtctgtccagaccaggaggcaggggagggaagattctgtgtcgtcgcctcgggagccggagcccagcgctggctgccgccctgagcctgccagaagataggggcagcttctcaggtctctcaggcccggcccatctgtcctgagcagccagtcctgtgcaattctggagacaaattgtatacaaaaccccttttaaaaaccatggcttgtttttctgccagagggcagggagagctttggggagctctggcagtgacttcaaatacctcacgatctcgataagggtctcaaaccacagtgtgcacagcacccctggaggccttgtgggaacatgggctgccaggcttcaccccagtttcagacccagcagttctggggtggagcttcgagtctgcgtttctgcagttcattgttcttgaaggtgccagcggcccaggcttgccttgagtcatcccagggttgttccctttaaagtaggagccacgttcctcactccagccagtacctccgggcctggcacctgctggagaattggtgcccaaaagtgtttgttgaatgaatgaaagaacaaatgaataaactctgcttacccagacggagaggcttctggagagcagccatcagttctgctttgccagcagctgtctcccaggtggagtgtgccaagtggggagggagagcagggtgggttggggcctgaacgccacctccctcagccctagtggctctggagcccccactgtacgttcctagctagttctgcaggccccgtgtccggctatccttgcctgagcggccaggggctgggcggggccaggctagatgctgtgctttggcgggaagggcagcctggtggttgggctttcccttgcagggcctacccgattgagcagtacccctgccagacgaaagtggctgccgccatcatgcacatgattatgaacaacctggatcctgccgtggcccaggtaatagccagggaaaccgaggcccagcactgtccagcagaaacagaacacgagacacacgtgtcatgcttttaagctcttaattttgagataattatagattcacagaaagttgcaaagctagtaagagaggtccctggcccttccctcggcttcccccagtgtttgcatccgtgtctatagtacagcctcaaaaccaggaagtcactgtggctgcagtggacacacgtccaattttaaatattctagcagccatatgaaaaagtaaaaataaacaaatttacactatattttattcatcctgatatatcaaaaatattatttttttacttttttttttttttttagagagacagggtctcactctgtggcccaggctggagtatagtggcttgatcttggctcactgcaacctcaacctccggggctcaagtgatcctcccacctcagcctcccgggtagctgggactacaggcacccgccaccatgcccagatccaaaatattattattttaacatgtaatctatataaacattattaatgagatattttacattgtttttcatcctgagcctttgaaatcaggggtgtatctatgcaaggagcagagctgaaaagccactcatgactggtggccaccatattgggtagcatggatctggccccatgtgcctgtcttgggcaccctgagccagtctatagagcagctgcccatatttgagaatggaatgcctctggggtgtgtccctgcattccttgggggtgatatgttgccagaatgtgaccacttcgcctagtaggtggaaacgccctaaaccctggccctggccccagaccctggtcacagatcaaccctgcctttgaccccaggctgagttcccagagtgaccccagacccagatctgcccctgaccccaagctgaacccttgctccagttgcagctggggccggtgttcttgcagatgtgtccgtccctgggcctcacccttctggcttctctccttgtcccattgggcccccaggggatgggggccctttctctccctgtctgcaactccataggcccttcccaggccctcatctcagatgaccccgtgtcttcctcagtttccccaggagctggtgacctatggaggaaatgggcaggtgttcagcaactgggctcaggtactgcacaccgtgtggcctcgtccccacccctggcctttcctctagtctggtcctctggcctaggagcttacaaacccacagctcaggatgcaggcctctgcctccctggtgcctgaggctccagcattggagattgtgtggggaaatttcaggttataggaatgggcgaggtggtgttgagggaggcaccagggccactggagtggaatggagacctgggggcctgtgggagctgtccaggcgtggacggtggtgtggggctgggtgtggggtgctgcttctgttgacagaatccccacgctctgctcttcccccagttctggctgaccatgttctacttgtcgaagatgacagaggagcagactttggtcatgtacagtgggcacccacttggcctctttcccagcagccgcagtgccccacggctcgtcatcaccaatgggatggtgggtccccagcaggtggcacagcacctgcccagggctccaaagagagggtgcagacgctggaaagaaagcccagtgccccaacgctgtgcatcatccccagggctctgtgctcgccctccaagccctcagcccctctgtctgcccccatcctcttctccaggtcattcccaactactcctcccggacggagtatgagaagctctttgccttgggggttacaatgtaagtcactatttcagtctgtttacaccgtgtttccccgttagccatgggtcattataaagcaaagtggtgatattaaatacaagttttgaaagacatagtcacagaactgtagcataattaattttatttttacatattccctagtagttttatgtatatgcttacaaattttatattcttgaatgcaagagaacctacaaatttagatcctgcctttttccacattttattatgaacaatttcaaacatgcgaaaattgaccgaatttacagtgaataccaccgaatttctgtgacgaatgtgctacttaccatactcactttatcatgtggctatctgtccctctgcctatccatccattcaacttgtttttttttttttttatgcatctcacagtcaattgaaaatattactgacgggaattcaacgtttgtttatgttttttttcttttgaggtgaaacttgcatgtaataagatgcacacatcttacatgcaccacattttgggttctgacaaagtgtgcatctgtgcaaccaaaaccattaggcacagaatgcggccagtgccccagagaggtctcgcacagcccctctcagggaatgaaagcttttcatttgttatagaggtaatgcaaactatttctttttctttcctttttgagatggagttttgctcttgttgcccaggctggagtgcaatggtgtgatctcggctcactgcaacctccacctcctaggttcaagtgattctcctgcctcagcctcccaagtagctgggattacaggcatgtactaccacggccagctagttttttgtatttttagtagagatggggtttcaccatgttggccaggctggtctcgaaccgctgacctcagttgatccgcccacctctgccttccaaagtgttgggattacaggcatgagccacggtggccggcaatgcaaagtatttcattaagcattataaatggagctacactgaaaaggagatccctcttacgtcctagattctccagttgacagtgtctcctgtgttcttccaaacactttctatgcatgtgggcttggcaatttaggtggttagaccattcgagccggcctctgtgccttgcctttcccaccttcacaagagagctaggagattgctgcatttcaggaagcagatctcatgtattcttcctttacctgcaatgttcaattgcactaatttatttaacccttttgcctcccaatctgtcttgcttccatgggcacagtgcagggccctgtccctctctgccatgtggtgtttccgccactcacttctctcgtctccggtggaggggcatctcagcagcttcaggtcttggcccttgtgcctaaagttgcggtgaacatccttgtgtgtgtctctgcctggcgtaagcatgtagtgtgggcatgctgcacacattcagctggagtctatacagccaaatattccccaaaacaattcttcaccaattacactacagtttttaacagaacaaaatctgcttgtaaaatgtctggaaggcgagaggggacaagggtgtccatagccttcttgtgttctctgtgctctctctattttatgtgaaggagaatatattaatgcctattgggtagttaaatactaattttcaacctcctaaaaggagtggctgggaggacctgggcctggcactggctgagccctgggcttggcttctctccctgtggtcaggtacggccagatgacagcaggtagctactgctacatcggtccccagggaatcgttcatggcactgtggtgagagatggggccacgcctggctgtgggcttcccagcatggggggtggagggggcgggctgggagtgggcagtgagcccccacctcttctccctgcagctcaccgtgttgaatgctgcacgtcggtacctgggcatcgaggacttggctgggaaggtctttgtcacctctgggctcggcggaatgagtggggctcaggccaaggccgcagtcatcgtggggtgcatcggtgtgatagcagaggtaagctggggggctcctggccttcgctcctgcctgcctccctccctccctccctccctcccttcttcctcccggatcacttacaccacagaccccccttctcatccttccttgcccaggccacccttgcctcctccacgaagccccactggacctcactgggtgggttcccatgggcggcataagcttcctgctttcaaagtgcccatcaccctgcatgggcaatgcctatcgactgccctcccacaaaactctgaccacaaaactctgaccgtctatttatgggtatagctttcctgtatcccaccacatccctggaatacagatgggagggaatgaatgtgtgtgaataaatgaactcatagactccccaccttgaacaggtggggaggcagagaggtcaccctccatagaggtgagtgcaggcagctttccctcagtggccgcatcatcttagttatttgagtttctataaaggaacacctgaggctaatttataaagaaacgaggtttgtttgacagttctgcaggctgtacatgaagcatagtgcccacatctgcttctgttgaggtctcagaaagcttccactcatggtggaaggtgaagggggtctggtgggtcacacggtgagagagggagagcagggagaggagagggaggtgctggaccttttaaacaaccagctcttgtaggaacaaacagagcaagaactcagtcattactgcaaggactgcatcaagccattcatgaggaagctgccccatgacccaaacaccccccatcaggccccacttccaacaccagggatcaaatttcaacatgaggtttgggggacaaatatatcccaactatagtaggctctcgcatctttctttggtgggtgctaaggagaggaagggaagtcggaagtggaggaggcaaggagccttgaggcaaggcttggcgatatgtgccagtgggatttgcactcagttgatgccaaacctacatcatacgtacctgtgcttgttaggagtgcaccaagctgcaggtaacaagaaacctacctacagcggcttgtgtaaatagggttttatttttctcacgtaaccaacagtgttggcattggtttggcagctcaatgatgttaatatctcttgattcctttgggcttcccttgtagaaacaatggctgcccctaccctagccatcctatccatgttcaaggcaggaagaggtgagaagggaagtgtctgctatgactctattttttcaggaaagtcatgtctccaaaccctctccttttatctcattggtcagtcttagttgaaatcgatgttcttatctgcaagggaggatggagatcgtggacaagtccttgtgattagcttggacgtagaccatctcctggggctgaaccgtgtcaccctgaacactacctgggttctgcttataagggaggtgggagaaggaataaatagagggagggcagctcatggtgtcttccctgagactgtgttatagaaaagcaagggacctacaggggatgacaccttcctagttgaggatgatacacttagggaagatttgtaaccgggtggccccatgtctcgtggccccatgtctcatggccccaggtggataaagcagcccttgagaaacgccacaggcagggctggctgatggaagtgactgacagcttggaccgctgcatccagaggctcaggtacagctccaagctcaactccggacacctgacacctgacacgtggcagcaggagaccacaagaggacccccatggggcagcttggtgtgggcctgtttaatgcctgacagctggctacatgtgggcaccacacatacatgcacatgtacatatacatgcgcacacacacacacacgcacacaagggctgacccgcgggtggtgatagggcagaagcctctggaagggcctccaacattccgtcattgccggctgcagccactgggctgtgggcttggtgtcagacacttggccttgatgggcttcaggtagccttcttggggctcccatgctcttacctggttctgcgaagcatgaatcttcttttccctgctgtgtgggctcgcagagccacccggcctgataggggctgccctgcgctgttgcagtggcgagcctgtgaggcgtgcactccctccctgtgctccagggcagagcttcgcccacggtgctgaggggcagtcggtgggtttctccgcctcaaccctaggcaaagtcttcagaggtatttcagtgggatggtgggaagactgccttgggggctcctgctcggatgccacttttgaagcatcctctcaattaatttactgcccagagcagagtcctgttacgggaagacacatcggtgcagtggttgcccacctggcttcaactagaatctccacaggggcttaaaagctgtttctgatgaaaatgtaaacaaaatttgagaaacgatgcagtgaactattttgacctatcattctaacataccaatccaaccacattgcaccctctttagaactctcagataatttttcatcaatgatagaagaaattccacactccaggtgtgctgtgaggggcttccccgacctaactcccatccctattcaggctgtttagcatcctgagtgtgtgcatgtacacacacacacacataaacgcacacacataaacacacacaacatgcatgcacacacatataaccacacagacacacccacatacataaacacacatataacacacacataaacacacaacacacacatgcacatacatacacagagaatgcagcacacacatgcacacaagcttgcacacacaaacacacaacacacatgtaacacacatgaacacacttaacacacataagcacacatacacagagaacacagcacacacatgcacacatacttgcacacacaaacacacacaacatacacatgcatgcacataaacagacacataacacacaacacatacatagacacacacataaacagacacacaacacatgcatgcacacacaggcacacacagagtgcacacatgcacacacataaacacacacatacacataaatacagacacagacatacacacatgcacacacaaacacaaacatgcataaacacataactcatgcacaaacataaatacagacataacacacacatgcatacacactaacatgcataaacacaatacgtatgcacacacatgcacacacaacacacaatgcacatatacataataaacacaaacacataacacacatacatgcacacacaacacataaacacatgtaaacacatgtacacaaacatgcatgtaacacaaacacacaaacgcacacaacacacatgcacacatgcataaacatgcacagagacacacagcacacacaaacacataaacacacaggcgcacacacacataaacacacagacacatgcacacaccataaacacacacagacacacacacaaacacacgcaacacacacacgcacatgcccataacatatattctcacatgcatacatacacatatgcatatacacgcatatatacatatatatgtacaaatgcatgcacatccacacatgaacacacacacatacacatacatcaaaatcagtttaaggaactgtctcgagcaacctgtctgccacacttccgcaacccccgagctgaggaagacccatgggaatggagtgagctctgctcacggttcccacagggtccttcagctgggattgcaacaagccctgggctgggccggcctccctgctgccctgggactgtgtgtcctttcctgctttgtcaaccttgcacccctgggggaggggaggtgcctggctccctcgggcttctccaggccactcctggtaagcattcaatctgctctttcatggggaccataccaccttccctgtgcattgctgctttttgatatctctactacctgcaaggcctgttcaaatcttctgtttcccaaaatatgctttgatttttcctgtcctatttttccgaataattttgggaatcatctttagtgaatcctgcaactctgggaccaccttgggtgggttctgtaaagatccctgtggaggacccacatcaataacccgaattccatggatcgcccaggcagttttgccactgccatgtgggttttctggtctggggaatttgggtctggattttccctttatagttttgtgtcctggacaaaagtcggggtcctgcaggcatgcttcatggcccagccccatggcccccacgtttgcacacaacacctctggtggcctcctgggtctgcccctgtgtgcagctggggtgcaggtgtgtctggggcacctatgcacaggtgcagggggcacctgttctgcttttgtgtccttccagggaagcaaggaaaaaaaaggaggtgctcagccttggttaccatggcaacgtggtggctctttggtgagtgggggttgggagttgatggccagcttgggaacccagatggggccccctgagcaaagacctcaatgctgaccaggagctgccaggacacaaagctttgagccccagttcagcgccacccttgttggcccacacccttacccaagcttgaggcagccgtccctgccctgcccacagccttcccgtaggttctctttccagggggaaagcagggtctggctcgggctgtgcctgctggatttgtgggtgggaaaatgtgctagggtccccacctggctggccccagactctgggcccaggctgtgtgtggcttgcactgaccaccgcatggcttccccagggagcgcctggtccacgaattggacacgacgggggagtgcttggtggacctggggtcagatcagacatcctgccacaacccgttcaatggcggctactaccctgtgcagctcagcttcacggaggcccagagcctcatggcctccaaccctgctgtgttcaaggacctggtccaggaaaggtgctacttggagttgggggtggcagaagcatttggcctgggcagaccaccttgtcctgctctggccaccacctagttctccagcaaccagctgcttggccttgggcaagaccttaacctctctgagcctctgcctccacccatcagacggagtcatgacacacttacctctcggcagtgcagggggacaagctgagtgacatttgctgaatgcccagtgtagtcccggcatggcgccaagtagatgctggggtgtgagacctctctggggcatctgtttttccccagggcctgatggggttggggaccaggaaatgcttgtttagggagttgccagctgggccttgaaaggtgcagaggttctaaacagatgacaggggcaggggcattccaggtgtgtggtgccgacccgaggagcaggagcagtccaggcagtggggctggaagttggtggggagcatggcgggtgcgactgagggtgccacattggggaggccccagggcctcacagcggtggtgctgacccatggcttgttgcagcctgaggaggcaagtctcagccatcaacaggttggccgaggagaagttcttcttctgggactacggcaatgccttcctcttggaggcccagagagcaggtaggaggaaggaggagggaggaggagggaggggccaccaccctgggcccagcctctcaggccagtgccactggctcccacctcactcggaggtgccatgggtggcccagcaaatcctgaccgaggcttcactgtgcctctgccaggccttctggatgctgaggcccagccaggtggctcagcctctctgggcctcagtttctccatgtgctttaggaacataaagtcccatacggagagcaggtacaagactcaggtgcaagctccagtcccaaaattgcagctttccttttctgtgatggaaacttccttctgtaaaatgggcaattctttcatggggtatgaggttcaaaaggcacagtgtccgcagtgggaagcccccccagccctgtctacctccctgcaggtggcgggctctggcgcgctggaggctgacacagcgtccatggcaagcgcatgcatcctgcacctggccacacagacagcagcatgctggccacggctgcccctgcttttctcttcttttacatgaaaaagaccttgtgcatccttccccagcctccctctgggccctgtgtttaagttgccatctagggtggccatgggtgtcctgccttgggtggtgactgtccgggctctgcccacaggagcggatgtggagaagaaaggtgctggcaggacagagttccgctacccttcctatgtgcagcacatcatggggtgagtgatgggcggctgccacatctagtgtgcccagtgccacccctgccccgttcagggtctgcgtcctgggtatttaggttggagaagcttcagcctctgaccgcccctgaggtcatgcgctgagacctccacactgccccaaagtggccaggctctgtccatgggttttccaccacagacaggcaggtgaggaggaaatgcagacgagagacgcctcctgcagggcctcagtgagaacagggggctgcggggcctagaggctgaggccacttcctggcaaacaactgcacctgaataatatgtcttcacaggccctcgtgggtggctgatggctggatcatgaagcccagcacctgctgtggccctgggggtcgtgggcctctctggccatgggggtgcaggtctagggaaggccagcagcccaggacaagcaggggatgagggcgggagccagagaggagcctgggccaagctgagaagtctgggctttctgctgggggcaggagggaccacatgacttttggaagatgtgccagtcctcagtgggtgccacatgggacgagagagagatggaggtgagaaaggcaaatgccacttactgtcaagctcactgtggggtgcagaggtgggaggggctgagcactgtcagctggcactctccggagagggagggctgcccaggaggaggcaccccctggcctagcaagtgcaggagcccagggagggcccaggccacggcatcctccccccaggacagccctgtcctggagcctggctcctgggaagataagctcacctagggcgagttccccaaggctacagccccaggttgactctcctctcaatgtgactgtcacttttaggtgatggattttcttgtcatctgtaacagcaattggggtcatttctgtttgcccaggtcccagctccccactcctgtagctagagatggtacagccaggaggcagggatggagggctgggggcactgggacacagagaggggacagggaggcccctggaactttctgtccaatgacagcttagggggttccacacctgacttctggatgctgagccctcctccctggcatgctcacacctgcaccccctcccccaacaagccagcgggcccagggtgaggaggcatctgtgcttgcagggacatattctcccagggatttgggcctttccgctgggtgtgcacatcgggggacccccaggacctggcggtcacagacgaactggccacatctgtgctggaggaagccattgctgatggaggtgacgccattggtggggatgcccatgggtgggtggcccccccaaagcttctgcctccatagagacaagcttctatagcaggcccacctagctaattctgggagggaacctgggcgcagatgactttgtgagtctggtgggtgctcagctggcaacacaaagggacttaaagaaacttgagtgagttgcaaagatcctggtccccaagtgtcgttctcagccgtggaggcacaggccccacccacaccaagcctctgccctccagagctgtcctgggctctgccagtgaggacctctggctgcgagtgacagaaagcccctcaaagcggctgaagcaggacggtccagggctagggtggccaggcagcagtggccggggccaggctttctgggcagcccgcagcacaccacagtccctctcagacccagcctccccctccacgtggccagggcagtgctgacagcagtgcttctagttccttcttgctgtcttccatgatgaagctgtctccacatgctcccgccagccttccacgcctgccaggtccacaagggtctcctctgcatcagggtcccccatgttcatcctgggttttgctgatgctgagtgttggttctgccagagggttgtgtttttccatgtctacatggcctgcctgggttttaaccaacctttgttctcgttgagtgggtctgacgttgttgtttcatggttattttatgacacttcctctgttgttgcagttcttaccccggtctctctgcagctttcctgcaggtcgggtggcttttctgtgtggttcaccagcctctgctgtgtgcttcacatctctagggcccttacaccctgctgctggccatgttcggtgggctgggcaggggcccaggttacacagactcagagtaggagagccaggcagaggggagacgtggtcacctgtggaggaggaggcgggcaggggcccaggcaggagggcaggggaagcaggggccttctcctgggggtctggtcagatgtctcctgggcttccctggtgtgagaacagcaggcagccagtggggaacgaccagccctccggaaagaagccctgagctgctgcacccacgaagaccctggagtaaagactccaggcctggctggtttccaggcgtgctgacccagctccacatgcccgcagcacatgccctgcggcatctccaccaggcagatactctagtcgaaggctgtgaagtcacaggagtgagggatttctattaccttcattttaatataatttggtaaaagtgtaagcttatttaaaattttaatgatatttatgttaaccactggctcccacaatttctggaaaattaccagtctgctttcacgagctggtcaggctggctcctgtgccctctcacatgcacacatactccgtgagcttggccaggtagctcctgcataggccaagtttattttcacctcagggcctttgcactgactgttccctctgcctggaaggctgttccctcagagcttccttgtccggttccttcccagcctttagactcagcttgatggccacttcctcagaaagcccccgcatccaccatcctggggagccctcaacacagtcctgtgttcctcacggcccacagcggtctttgttcctggtgccttgctcagtgttggtgtatagtaggcactgaatagctatttgtggagggaccgagtgcatcaggcagtgcgctgcacggctgtgcattattaattcatggggccactggcactgctggtccccaagttcacaaaggcaggggtggggtggggtgggctccctcaccttgtgtcctagctcagtggtgggctcggggcagggtctgtgctgagctgagcagcctgcctgagggcaggtctgtgcccctggagggtctctgacgcctgctgtcctctctcctgcagtgaaggtgtctgtgaagctgcagtacatggacaacatccgctggatccgggaggccgccaggcaccggctggtgagggcccaggcctgggggaggctggggtggctgtgctgtcagaagactgcccaaaggtgaggtgctgctgacgggcgctcagcctggtccacagcctccagcttgccaagccctgagagggtgcacacacaagatcctgtgtgactgtttgtgccagccccatggtggccacactgggaggggaagcagcccaaggggctgctggagaaagaagccggggacctttaaagggtggcctgggagaggacacggagaatttggaacccttgtgcattgttggtgaaatggtgcagccacatggaaatcaggaggaagcttctgcaaaaaatcaaaaatagaattaccctatgacccagcaattccacttctggatgtgtagcccaaaaaattggaagcaaggactcagagagatacttgcacgcccatgttcacagcagcactattcacaatggctaagctgcggaagccacccaggtgttccctgatggacgaatggataaacaaagtgtgggttaaccatgagatggaatatgactcggcctcaaacggaagggagtgctgacacacgtgacaacatggatgaacctggaggacaccatgctaagtgaaataacccagtcacaaaaggacaaatactgcatggttccatgtctatgaggtccctagagcagtcaaattcatagagacagaaagcagaatggtgggtgccaggggctgggggatgtggaatggggagatggatggggcaatggttttacattatgaatcgacttaataccactaaactgtgtacttagaaatggttaagatggtacattttatgtatgtatattttataatttaaaacgtagagggggaaagtggcctggggctctggggcagcgactagagttgggcaggtcgttcttcatcctgttactcaacaaatagaggcagccctgcagaggaaagagtttgggctctagagccaggctgcctgggcctgagaagcctcccgtatcctcagctgtgtgacctggggtgagtggttcagcctctctgagcgccacgccctcatctgcaaagcggagacggtggtggcagtgtttggagcaggcccctgtggccctgcttgtacagggggtgtgttgtgaggctgagctaacagatgagtcttgcccagtttctgctgggtgtgtgtgcaggaaagcaccagcagggaggggtgggtggggctgcctcacacagaatggccagggaaggggtccagcatgtgcatccaggtctacatgctgagagggttgcaaccatgtgacaatcgaggcagagggaccagcccttgcacaagccccagcctgtacacaggccccacggtggcagtagactgggtgtaatgaggacaaaacagaagaaaaagtgggcatttggttcatacacctttggccatggaccgtgtctgaactagtgggtcttggcccaggagtcccagggccaggagaggcctgcccctgtcctgggctgtctcatccatacgcaatggtttgcatttgtatccagcctcagagtccccgtgccaacagcatctctgtgacggtgctgagtcagagatgccaaggccaagactcggaggctggagctgcagggtcagtgcagagatggggtggagaagagaggggggatagcctgagaggatggatgccagcatggctgagaaggggccgtgggaggtgccagagttgagggtgtaaggggtggatgctgcagctggagctgcaagcagggtgcgtctgctttgacttaaagtcccctggagatcgtgtgcctcctgatacttactgttgctttctcttctgaacggtgactgcagaaggttgccttttaaaattttttgatttattttcttttaatgtaccctcttgacaaagtgggcaatcctatgtcagttcctcaccaatttttttctggatccaaaaaatctgaaaatctctgcagtgctgattcacacgagtagtttttctgaaaaggatttgaggcagctggtgtgagtaaaataagcctgttctctaggaacccatgagggaggaagaagcagctagactcattgtcccggccaaagctgagcttgcggtcaggtgcacagctgcttccgtggcccggccctgctgccttttaccggctcctggtcgagctcaccagcaactggggcagacacctgcatcttctttggagaaaccagggtttctcagcctcagcgtactgacatttggggctgtacaaattttctttaattatggtaaattatacataaacgtaaaatttaccatcttaaccatctttgccatttttgagtgtgcagtgcagtggcttcaagcacattcatactgctgtgcagccatcaccaccatccatctcagagctttttcaccttcccaaaccaaaactctgtccccattaaacactaactccccattctactcccacggcccctggcactcaacaacctcatataagcgagatcagacagtgtttgtccttttgtgtctgacttatttctcctatcataatgtcttcagggttcatccatccatgttgtagcatgggttggaatttccttccttttaaggctgaatcacaatccactgtatggacagaccacgtttggttcatccgtgcaccacgctggatacccaggtcgcctccacctctcagctgttgtcatgctgctgtgaacgtgtgtgtgcacatatctcttggagtcattgggggcttcttcatcacgggggccgttgtagagtatttagcagcatcccgacccatgccagcagcacccaaaaatgtcttcagtcattgccaaatgtcatcctgcttgaggaccgcggggctacacagtgactcatttcatgcgctgaagctgtctcccggggacaaccacccattactgtcaggagatgcgatcactgggtggctgagctcgtgggtgcagcagacagacagagggcccaaggtcaacctgtagacaggtggctccacctcttggggccatttcctcatctggaaaatggagcttatgatgaggatgacagtatcttcccataagactcacagacaagaggctgtatggcacactgagagtggggcaggcccaacgcaaacttgccctggatggcgttgatgtcatcactgtgggatggagcaggagcagtgctcgcaataggtaacctccctggagcacagatggctcaggggctccaaggcccctctggggataatctgggattgggggaggtgtctggaggcccagactacagtggacatgtggggccggtatggctgtctagtgggctgaatgtgggggctcacctcaggccacagatttgagagctaccatgcaccctgggggtcctcctggaccttgttaggcgctcaggctgccaagggccatgtcccacagtggaagtgccacccgtgtctccctgcaccccaggtcctgttattgctgcctatgttggctgagatgccagttgcccttctctcctcaggtggtgggctcccaggcaaggatcctgtactcagaccagaagggccgcgtggccatcgctgtggccattaaccaggccatcgcctgcaggaggatcaaggtgaggtgtcctgtgctctgggggaagcatccctcagcctcttcccactgcctttcctgccttgggccttcctgcgtgtgcctcggctgcaccccacagccttctgggtggggagacacccccgttgggcctcagcagcccagtgctcaggagcagtggaccagcccctcccgggagcttagctcttccatggctgaggcccaaacttccccctctttagggagatcaggttttgctgaaggttttggtccctgggaccagctgagtagtagggctctgctggggaggcaagggtaaggcggctgtgagggggtggtgggaaggagggcctgggggagcaggagcagtgcttgaaataggtaacctccctgaagcataggtggctcaggggctccaaggcccctctggggataatctgggattgggtgaggtgtctggggaccctgctctgtgtgtgtcaggccccatcattgttccctgctgtgtgaccttgggcaggtccgtagccctctccgagccttggtttccctcttctgtgaaaagagactaaaaagcatgtgtgtgaggattgagtgagtcagcttccacaaagtaactttaaacatctttatggagttcccttttctcaagcaatggcaaacttccctagcttttgctcattttgccaatcgccaagcccgtctcgaggacggaaccctgggcatgcttgctccgaggggctctggctcctcctgccacagagttcttgcgggcgtctctcttttcagaagtgccaggaatgttactggtcaggtgtaagatagacattgggacagaggtatgaagactgccctggcatgattctggggctggcaccggcagcaaaggcagtagccagccctgctagggcacagccaaatgcacccacccagtgcttcctggaagcccaggtgttcccggggactgctaggaagctccaggcgcactcgccccgggctgcggtcagctggccagcagaaaggggtcagtaagcatgtgtccattcactggacagtgcttggctgagcatggccactgtgcagcgtgtcctaaccaccagggacacagcagagaacaagacagacccgtgtagtgtggtgaagggtgactgacgtaaagctgaaggcacacattgcgacagggtttcagaggatgaggagcggcgtgcaggaaatgaacatggcgaagagcggtggtcaggacagcctctctgagttgctaacgttgagctgagacctgaatggccagaaagtgccagaatatctgggggaaggtggtttcattgcacaggtgaagacgtgggaacaggcctggcctgttgaaggtgggaaaggcagacctcttcattcaagagcacagggcatcccaggcttttgtcaggatgcatcttctggcacaggggcctgtgaaattttgagatcccctggagaggttgggaagatcacgcccatcaaccagcgctacctgaaaagtttccaggacctggtgataggaataggacttcttagctgaaacagctgggctgctccccaggtgcactgcaaactgcatactgacctgcgtgctccctctcctgactgaaaggtgcagagccaggctgacatgctccctgtgcagtgtccgacggctccccctactccttctctttagtcagggttcctcccagttccttcactctgttttttaaattgccagttagaactcattttctttcctctttttttttttttggagaaagactcactccatagcccaggcgtggtctcagctcactgcaacctccaccccccagattaaagcgattctcatgcctcagctccccgacgagctgtgattacaggcgtgcaccacaacacctggctaatttaggtatttttagtggagacgggttttgccatgttggccaggctggtctcgaactcctgacctcaagtgatcccctgccttggcctcccgaagtgttacgattacaagaatgagccactgtgcccggccaggactccttttcatagcaggcctgcccatgcacagcataagggagtcagctgacctgcccttagccatggccctacctgacttccagggctgtaccacatccatctcgtgggggcaaagcagcagctggctgcctctcctgggtatctgagcagccggagattcctggggaacaaggagtgctgccgatgagtgtattaaaaaatcaaactcagcatgaatgctttctctgtgcgaaaagtctttgtcctcagagagactggcagcacgaaaaggctcttagcaattacctcatccaggaaaccaagagctattcccagacggaagtgacctgcccaaggtctcatggtaggtactgccaaatactcccccagtgaggccctccaacacctccaggccatcagccagccacgtctctattgcacaggtcaggggccaggctgcctgaggcttgagcccagactaagtggacactcggacttaacaatttttctgctttacaatggtgtgaagtgacacttgtttagtactctcctcgacatacaatggggttgcgtccaaatgaatacatcgtaagttaaaaatactcttaagtcgttttttacttagggtacagtgggcttattaagatgtagcaccatcgtaagacgaggagcgccggcatataacacgtgtggggttaaaccccagctcacgactcactcgctctgtgatataggggaaatttcttctcctctctgtgcctccgctttctcatctatgaagtgggcatgataatggttgtgcctatctgaacagggtggctgtgagtgctcggtgagctcacacatgtattacacacgagtgctgccgggcacacgtgaatctattccaggctacagatgacatcagaaatagttgtgaagagggtctattttccaggaggagaaatccagcgggttctggtgtgacctgccccttgtcctcagtctttaccaggaagccatggtggacactgttggctgacagcttctgtccttccatgcacaggcgccggtggtcctgagccgagatcaccatgacgtgagcggcaccgacagcccctttagggagacctccaacatttacgacggctctgccttctgtgcaggtgaggaagatgagaatgtcttaaactttcatcttagatttggattttattaaaaattgatgcatttagtcagtcacaatgtttcgaaagatgttctggcacctgagaggctcggcatagagtgaccaacccaggactgagggggtctgggatgtgggacttccagttgtaaaaccggtaagtgccaggcacaccgggccagctgggtgccctggacttgggtgacctacaggctgtgggcagccagctgtttccttacctttccagatcctagagctgcatttcttgccttttttggctcctggtctcttccccatcttcatagctgagcaccaagaggagggggatattcttagggttctccctgatcttctctgtggcacccattgggatttttgggggaagagcctgcaagagggtgcaaacgcctttaccgctgtctacccaggggctcacggtctcaggctggcctgcgcctgtcccttagcaatgtgttgcacacttataaggtgaccggcttgggctctgtttctctctgcagatgctctcagtccccaggtttcaggttggatggttgtcctgggacctcagttccctaatggggtcaagggaagcctattatttgcagtttgctcctctgcccccctttttaagaatatgagtgactctctttggcactctacttctctgaactaacactgtttccacatcccttttaattcttctgttccctctgcttccggagtgctttagctggtgcccagtgctggagagcgccaccatgggacaactagacgtgtgtcagtttctcccactctagctccagctctgccagcacacacgactgctgctgtgagaggccctgtccctagggcctagttgccgccccatccttctggcctagcagtgctggcttagccagcgaggctggcctgactgagccaggtgcccacccagtgcagggggtgatgagcagaggcgtctctatttccgcagacatggctgtgcagaacttcgtgggagatgcctgtcgcggagccacctgggtcgcccttcacaacggagggggcgtgggctggtaagaaggtttcagaggacagggtgtgggctgatgtggaagttttgggggttcctttggggcagggccaggctgaggttcctgaagtcctgggccctacctccctggtcacctcccctgccctcacctttgtggaaaatgtgttccttgcgtgagcggagacagttgacagaacttcaggagaggacttgcattagccaccccacctctctgggtctcccctgccacatgggtctcaggggcctcttaggctctgcaagaatggcagccgccttcctcatgtcagtttccagtgtgcagttagtttccagcatgtcagtttccatgtgttcccatggaattcccggcgctttcatggccagggtcttctccttcctgctctgaccacctcacttgagagtgcaaaacccagccaaggctcccagggcagctgggctgggggcaggagacctggtgtcttggttcccctctcccctcggctcccagctctgcccctgcccggctattctctatgagaaaagctccccagatctgggctcctggttgaagctggattctgggctgcggggagcagcaaggggtgctgcagcttcggagggaggacaacgccccctgcctggctccagtggccatctccaaactggcctctgagcctattttggccggatctagtggtcccctgccctccagagccaagtcccggtggagcattccgacaggctggcttggcctcgtgtccttggaggctgcagttccgcactgcggcagtcaggtggctgtaattagaggaaaatgtgactgaggctatgtcctttccaacacaggggctatagaaagctccgggcagaaaagggctgcctggctattgggtacctggcatttctgcacaggatttcctgagtcatttccggaggggaagagagtggctctgaaggaggctgagcagtttgcccagggccacagagctggcgatggagccacggtctgaccccaggttccccaggatccattatcattgctgacagacagccgaaggcaggccgaggaagagtgcacaccctcagggccttagggcagggacagcagggccagaattcaggcagccctgagggcaggcctccccaagacaggaaatgctccctgcaaattcctaagttgctcccccaaggtttcccccagactctgtggacagggacacagactgaccagacactgggacctaaaaccttttaccctgctgcccttgaggggtgttttgggaaagtgccacaaattcatcctgggacccatcacacttacacatgtacataatctaacccatcggaaaaaatgtctatccctcaaccatggctactccaaagggacgccactcccaattctgtctccaccgtggctactcgaaagggatgccactcccaattccatccccaccgtggctactccaaggggacgccccaccccccgcaactctgcagcagtttctctttcctgcgcattgatccctgtttccaggctgtgcgctcaccctcacattcctggaccgaacttcccatgtttccacttgtctgttggctccactccaggacaaccagtgacagctgtgtgttgtttctagcctcctctgtgccactgtctcctgcagcccctcttcctgattgcccatttgccgtctgtctttgtgccatctgcccagcgctcacgtttaaacagggcactacttggctggctgcagccctgcatgctcaggtggacgtttggaccgcaggctgcaggacagagccatctggctgggccacagagtgcaagagatcaagacaagagccaggctcttgttcttgggttggttggacctcagaaaagacttttctgatctcctttccctattgggaggacccagtcagaggggtgaggcctccctgttggtgctgcggcctcacatgtgagagggtcagttccagtggccaccgagggcccactcgggcagcctctaggcagcaggtgggtgggcatctgggagcccacctcaggtgagcaggcttccagccggtgtttccaactttacctctgctcttgccctccttcggagccccttggtgctgaccaccagctcctgaggttccctgggtcctggggcgccgatggattctgccggtccctcccatggccacactgcgctggagctttctgatgcctgcctccagctttcagaatcccatcacccattctcctgtccctttctcctcatccttgtgggttaaataattcctctgcagttttgttggtgagatgcaggaggggcaggggtaaatggctgtgttctatccaccatctattatatatctggatactgccactttttcacactaaacaatgtcttacagtgcatctgaaacttgaatgtgcacagaaatcctctggggatatcattaaaatgcagattattgtataggcgtgcaccaccaggtctgagtcaggcctagtggtgcacgcctatagtcccatctactcagaaggctaaggcaggaggattgcttgagcccaggaggtttgagtaaagcctgggaaacatagtgagacaccctctctaccaaaaaaaaataaataaataaatggggaacaaagaaaaaaaagcaggtgtggggtggaatggagattcagcatttctagcaagctcctggtgacgctgatcctctgccccgaggacctctctgagtagccagggcttccagggccctgtctgtgcacacagccctcccccacccacccacacgccttctgcccatgtgcaggggatgatgccccgatggacagccctggagtgccatgattgacagcagttctcaggccatctgcctgcacagggtagccttgctgtgcctttgtttctcaatgagaaaataagcataataataacaactgccttgtaggctaggggtgaagaggaaatgagctgatgatagcgaacgcttgtagagtgttaacatgtgcaaggccttctacactattcatgtatgttaactcatcgaatcatgcactttaatacatctggcatttatgtttttctactttcatgtttttctcaaaggtatagttagttgttccaacaccatttgtgagttacctcaaattcaccattaatagcaatgtgttagcgttcccattttcc

SEQ ID NO: 323 - DNA, 24078 bp, Homo sapiens
  source 1..24078: mol_type = other DNA
tgacgtcgcgttccgtagggctcttcccgggctttggtgggtcacgtgaaccacttttcgcgcgaaacctggttgttgctgtagtggcggagaggatcgtggtactgctatggcggtgagcgcgctggcgcgtggcgggcgggcgccggggacatgggtgcggaggctgcgcgcttcccgtactctggccccggcccagggcggcgctctgggtgaggctgggccccaggctctggggcgcagctactttctcgcctgcaccctgcgtgaggcgactcgcctacctaccactgacctggggccctgggctccctaaggcgagctcggcccgttcagcctctgtcctttattcaccccacacatacttattgggcgccatctgtgtggcgctgagcgtacaaaagacaggcccccatttcactacactcctttaaactttttttttttttaatttcccaatgatccttgttccaaacactacacttacttttgtattaccttcttgtccctttgtcttgtatactgtctgttccacatctgagttccagacctcttgttttggtggctcttctatgccatctctatcacaataccttgcgcactgtgtgtgctgaaataggtctaatgcttaaggggagataatagacagtaaacaggtaaataggcaaatgacataacctcagtggtttttcatggagaaagcacggtgatgtgggtgaccccgatatttgagctggcttctatttgtttggaagccactgactcagattgctcagctgagagcattccaggtgagagaacagcaagggcaaagatctggaggctggaaggggtttggtgtgttggaggacaagagtcacaggtggagagaaagaagggaaggcccctgatggtaaaaaggaagctgtatcatgcctcaccagcttcctaggtttctgacaaccgcaccttctcttgcaggaatcatcggaatccttcaccatggcatccagcccggcccagcgtcggcgaggcaatgatcctctcacctccagccctggccgaagctcccggcgtactgatgccctcacctccagccctggccgtgaccttccaccatttgaggatgagtccgaggggctcctaggcacagaggggcccctggaggaagaagaggatggagaggagctcattggagatggcatggaaaggtaatttcattcaaggccctggactcagcagatagttttgcagagagcccattgtgtgcctggtggcctggctttgggagctgggagcagatgaatcgatggcattcttgcctttgagcacagcttgatccagggttctgaggagacaggtttacagagccatgacacaggtctctttaacttactgcatgtaacttggaaagactagaccctaagctgaggataagccccgactccataagcaccccagagaatgtaggggtctctaatctggaatactccaactcaaaaagacaggaagcaggaagcccagtgtttcccagtaacttttcaaaggaaaggtgcatgggggaggagggatctgataaataaagttttagagtcaatcagcaaacatttattgtacctaatgtgcaccatgccctttgttaggaatggtcttgtttattagtaaacatgtggtggctcacacctgtaatcccagcactttgggaggccgaggtgggcggatcacctgaggtcaggagtttgaaaccagcctggtcaacagggtgaaaccccgtctctgctaaaaatacaaaaaattagctgtgcatggtggtgcgtgcttgtagtcccagctacttgggaggctaaggcaggagaatcacttcaacccaggaggcataggttgcagtgagctgagatcacaccactgcactccagcctgggcgaaaagagtgaaactctgtttcaaaaataaataaataaataagttagcaagacttaatgctaggagagtggagtaagctctgcgcataagcaaggctagatttctacccctgccttactctgcatttccagctgcgatctggtagataacgtcagtagcggaattgtgtgaatgcccaggagcctcgtggagatgctccttttgtgccttttcagccttagcatgtgtgagagtactgtgcagggcatcctgccgtccctaggatgtcagacagttgagaggctttcaagggcactccagactggatgcatctttgctattatcagtaccacccccaacgatgagactgcatgtgctgtaggctgtagaaggaatgaggagtctggataaatctgccctggacttggggtcagggcatgggtcctagacggctttcctgttctgcctgatggagttgttcaggccggatgcccctcctctgctgtttcccctccctgtcttgaccctttctctttgcttctctgagaagcaaagagagaggcccttggcagggggcttctgggtagaggtatctgagggatggctgagcccaattacatttgtttttgtggtttttcaaaaaaaaaaaaaaaaactttattgggctatagttttttagagtttaccccttgcgaaaatataattcaatgcaaattcatggtaaatttcctgagttatgcagccttcaccacaatccagtgtgagaacagggccgttttcccattgaggtccctcctgcctgcttatagttcattctcagttcttacccaacccacaggtaagaattaaagacctgtctctagattttccaatctggtcatttcatataaattgaatcatattatatatgcacttttgtggtgggcttttttctcttagtgtggttttaaggtctttctgtgttcttgcatgtgcagcactccattcctttttgtggctgaatcatatttctttgtatggagataccacatctattcatcagttgatggatgttggcttcctcaagccttttggcgattatgaataatgttgctatgaacattcattacaggtcgtgtttttttgtttgtttgtttgtttgtttttgagttttgctctgtcgcttaggctgcagtgtagtggcacaatctcagctcactgcaacctccgcctcccaggttcaagcaattctcctgcctcagcctcccaagtagctgggatcacagacatttgccaccacaccggctaatttttctatttttagtagagatgcggtttcggttttaccatgttggccaggctggtcttgaacccctgacctcaggtgatccacgtgcttcagcctcccaaagtgctgggattacaggtgtgagccaccacacccggcccgttacaggtttttatgtgaccagatctttaattctgttggctatgtaggagtgagattgttggtcttgtgtttaatcttttgaggaactgccagactgttttcaaaagcagctgcactatcttgcattcccaccagcaacacatgagggttccactcctccgtgttcttgccaacattggtctttttgattctggccatccctgcaggtgtgaagtggcatctcattcctgatggctaatgatgttgaacatcttttcgtatgcttgattggctatctgtgtatcttcagagaaatcctggactcactttttaattgggttgcttgtctttttactattgagttgtaagaggttttttacatattctgaatataagtcctctatcagatatgtaatttgcagttattttctcctcaatctggcttatctttttcgtggttttaatgttttcttttgaagtgcaaaagttttgaaatttgatgaagtccagtttaacttttttttttttttttttttgtatgaaccaattagaagtttgctgagggcattttgtgtgacttgagatccagggagaatgggaccgataccttttccccgaaaacatggaagaaatcagacctggtcaactctgatatctgcctggctgggttctgcttggggcatcaacagcataaaaagatttgttctgacagtagtttgacaatgtttattgcagaaaaatagtagcagtttctcttgtcaccatttaacctgaaaaaaggagaattcaaggggattgtcttggggaggcagtatggcatgggggaaggagctctgggcttggactatattttgacactcaggtctacagagcgaccataggcaaaaatcacattttcccctcaactacccatttcctcatctttcagatggaatgacagtgtctcctcctcagggaagagagcactgcagggaagagagcacagtgctttgcactcgctgggtgccttattaaggcattacttctcttcagtatctgaaggaagataatgtggaaaatgtgtgtctgatggtcttagagtagctcaaagggttgagacagtgggtggccatttcagagggctggtttggctgactgtgcatggaagccaggacatcaggttgttgaaggcggcatagtcagagatggggaaagtacagggagaattccagccctcacggggagttgggtcagctctctgaagccttttggtctaatgttttgtggttccttgaattattttttcttattgggcgcatagaagctgtctggagatctacctccccttttgtaattgtggtaaaatacacataacaaaatttaccttttcttttgttttttttttgagacagagtctcactctgttgccaggctggagtgcagtggtgtgatctcggctcactgcaacctccgaaagtgattctcctgcctcagcttcccaagtagctgggactacaggcgcccaccaccgcgcccaagtaatttttgtatttttagtagagacggggtttcaccgtgttagccaggatggtctcgatctcctgacctcgtgatccgcccgcctcagcctcccaaagtgctgggattacaagcatgagctactgccctggcccaaaatttaccatcttaaccttttttgtttgtttgtttgtttgagacggagtttcactcttgttgcccaggctggagtgcagtggtgctatctcggctcactgcaacctctgcctccctggttcaaagtgctaggattacaggcatgagccaccgcacccagcccttttgtttgtttgtttgttttgttttgtttgctagttttttgagacagggtcttactctgtcacccaggctggaatgcagtggcacgaacgtggctcactgcagccttgaactcctgcgctcaagcaatcctcccagctcagcctcctgagtagctaggactataggcatgtgccaccaggcctgggttattttttttttctttttgttttttttgagacggagtctcactctgttgcgaccaggctggagtgcagtggcacaatctctgctcactgcaacctctgcctcccgggttcaagcgattctcctgcctcagcctctcgagtagctgggactagaggcacatgacactacgcccagctaatttttgtatttttagtagagatggagttttaccatgttcgccaggatggtctcaatctcttgacttcgtgattcatccgccttggcctcccaaagtgctgggattacaggcatgagccaccgtgcccggccattttctatttttatacagatggggtctcactatgttaaggctgttcttgaactcctgggctcaagtgatcctcctgccttcacctcccaaagtgctggaattataggcatgaaccaccatgcccagccatcttaaccattcttatgtgtatggttcagtggcattaagtacattcatattgttgtgcggccatcaccgccatccatccacaaaagtcttttcagtttgaaaactgaaactgtctcggttaaacactaactccccattcttcccagcacctagcaaccatcattttactttctgtttctgtgaatttgaccgctcagtgagtggaaccatataggatttgtccttttgtgcctggcttctttcactcagaatcatgtcctcaaggttcatccatgtgccagcacgtggcagaatttccttctattttaaggcttcatcgtccatcatatggacagatcgtgttttgttcatccattggagatcttttctgagccttctgtgtttctgacctggaagcgctgagcctacccacaatggggctcctgaaccttagggaacaggcccagttcctggatggggtttggtgcttagggttttcctttttggcagtaaccacatctgttttggtgctccctcagggactaccgcgccatcccagagctggacgcctatgaggccgagggactggctctggatgatgaggacgtagaggagctgacggccagtcagagggaggcagcagagcgggccatgcggcagcgtgaccgggaggctggccggggcctgggccgcatgcgccgtgggctcctgtatggtaggtccagttgtctgcctgcccgagggactgggaagctgggaaggagtctgggaggggagtagaaggtgctggggatgaccgcagtagcaggtgtctcttgcctccccagacagcgatgaggaggacgaggagcgccctgcccgcaagcgccgccaggtggagcgggccacggaggacggcgaggaggacgaggagatgatcgagagcatcgagaacctggaggatctcaaaggccactctgtgcgcgagtgggtgagcatggcgggcccccggctggagatccaccaccgcttcaagaacttcctgcgcactcacgtcgacagccacggccacaacgtcttcaaggagcgcatcagcgacatgtgcaaaggtgtggcttccctacgcccccgcctcagcccctgtagcgcctccctaaatcctccccagaaagttgtctgagccgagtgaacacgtgaagcacagggcatatggctgagaggtctgtcagagaaaccaaaagttttgagttttgcatcagggctctcctgctggctatgcagtgaccacatctgggccaccaaagcgttttttgacaagcttgaaaatggacagattttatataaaaatctggattactactttgatctttgtaataggaattgactctttttttttttttttttttttttgagacggagttttgttcttgtttcccaggctggagtgcaatggcacggtctcggctcactgcaacctccgcctcctgggttcaagcgtttctcatgcctcagcctcccgagtagctggaattacaggcatgcaccaccatgcctgactaattttttttttttagtagagaaggggtttctccatgttggtcagactggtctcaaactcccgacctcaggtgatttgcccgccttggcctcccagagtgttgagataacaggcgtgagccaccgtccccagccaggaattgacttttaaaagggacatgtagatcttgattcctgcaattccttccactgctttttgtcctgtgtttgtcagtttcttcctggctcttgtaaggcgtttcatgtttgtagctgtgtaggcactctgctcatatttaatttaaccccccagcaactttgtacactgtgtgacatgcccattttacggagtaggaagttgaagctcaggctatgtcacagctgaagtgtggtagacctagaagtgaaagctgggctttctaggtcaaaatcaatggtcggggtgggtaggccttgcttctcacacaggcattgttgcagcccagcccaggcctcatgcttagttaactctcttcccactgtgcccccttctagagaaccgtgagagcctggtggtgaactatgaggacttggcagccagggagcacgtgctggcctacttcctgcctgaggcaccggcggagctgctgcagatctttgatgaggctgccctggaggtggtactggccatgtaccccaagtacgaccgcatcaccaaccacatccatgtccgcatctcccacctgcctctggtggaggagctgcgctcgctgaggtgagctgagggcaggtgaggatggcaggtccgagctcagtgctgggtgactcggtcgtgattcctgaagagcgattgtggtgtgggcggggagggtgcagccagcagcatcctcatcgcaggtgagttgtggttgcacaggagtgtgatgggagggatcttcccgggctgggggctgggcccaatttccaggacagtgtgttgggacactctcgtctgcagcctggcctcaccctggctcacggcttctgatgcaccctctgcctccgcaggcagctgcatctgaaccagctgatccgcaccagtggggtggtgaccagctgcactggcgtcctgccccagctcagcatggtcaagtacaactgcaacaagtgcaatttcgtcctgggtcctttctgccagtcccagaaccaggaggtgaaaccaggctcctgtcctgagtgccagtcggccggcccctttgaggtcaacatggaggaggtgagagaggacacaaggtctgctgccagctgtccttaggggtgcccagtatgcaggacctgactggcctctcaggctgtggaagaccagtgtgggcagccgcaagaagcaagatagaattgtgtgttggccacaccctggggtggacccagtctgtctggccagtggacttagcttggcccacacgacgtttttaggaattcaagtcaatatttaagtcaggcgatttgtttaaaccatacaagtttatggctcctcttgaaacatgagaagatctggcaaacagggcccacttcttgccaggtcactccttcaggatgtgtgcttaccagtctccatggtgccatcactcacgtggggtggctgcagtcccatcgggacttcccctcagcttgtttctgggacctgtctggctcacgtggggcccctggaccataccaacctcctgcaccatattcaggagacgctgccaaagcctctgatgttaaggtcttaggcacatgtaatgtgcctttgtacttgagcgtccctgtaaatgggctcatcgccatcgctgtggtggcgcccaggccccttgactgccttgctgctgtggctgttggctgtcctcttctcaccgctctgcagtgcagttctgcgaactgtcccagctggagccaccttgccagaaaatgcctcagaggttccacctgtggccacctacagccaaaagctgacccgtctcgtctcgggtggggcagctgcaggccagatgccagctgagccacgtctttgctcactcttcccatgccctgtctgtctccctcaggccttgcttctagggacctgagatagtacctggtagagggttaacagttacagctatcattcatggagtaacttaccagtgccaggtggtgggtggtttattacctggtcctttttcacagctcatgaggcaggaactgttactggccccactttgccgagtgtttagagaactggctgaggtcacccaaccagaatgtgtgttagaggtccacagctcaggcatcttgatctagagcatgtgcttttaactgcagtgccatgttgtgagataatgggtacgaaatgacatggcacagtgctggcctgtgatacttgacagtgacagccaaaacttcctgtaacttaacatttatcagatgctggattaggttgatgtatgtatgacttgctttaattcttattgtgaggttgcagagaaggcacagagagaggaagtcacttgcccaagatcacacagcttagacacagaacccaggcagcctggttccagcatcggtactcaagacagcttagctgtaaagcatagagcaggtgctgagtctggccgtcagaaggcatcccagagggatggtgtggcaggagtggggactgtcaactgatgtgctgagtcgccatgaactcattccttgctgtctttggctctccatttgccactcaggagtcggaatcctgcctgttctccctcctgttcgggggtcaaggttaggtgacatagtaagtcagtgatttgaggccttctgtgtgtccctcgcagaccatctatcagaactaccagcgtatccgaatccaggagagtccaggcaaagtggcggctggccggctgccccgctccaaggacgccattctcctcgcagatctggtggacagctgcaagccaggagacgagatagtaagtggccggggcaggctgggagggagccaagttgcagagggaactggcagaagcagttgtggctgggccggtggcggtgtctatggtcgcaggggcactcgggctaggatctgtttttgcatggctgaggcaaagaactttcttctggtggatgggttgttggaatggtgggtttaggaggggttttactgagttacttatcttggtgtctgtagtgtggagcacttgcaataggagaaactggaggaaggcagcacggaggtgggcacccctgggttaggctctgacttcttggcccctccctttccccaggagctgactggcatctatcacaacaactatgatggctccctcaacactgccaatggcttccctgtctttgccactgtcatcctagccaaccacgtggccaagaaggacaacaaggttgctgtaggggaactgaccgatgaagatgtgaagatgatcactagcctctccaaggatcagcagatcggagagaaggtaggtggaaggcaggggcaggggctgtcaggatgctgtgagaggatatggagggttgctggggctgtggtaggcacctagggctcactgctcaaaccttgccttattcccctggagctcagtaagcttgtctggaagggaggccctgtgctccagggaagaggtaaactcgcattggggatgggtgaacctggctgtggctccaccatgggccagcgaggtagtgggataacttggatgacctctctgagtctgtgtggtgggaggagtcccctgctgaggacggggttgcgacgagaagagctcttcctttagcagatcatttcaagctgtggtttgaaattggaacagaggcagggcaataggataacttgtgtcatgagggattcctagggatccagctgtggccaacgggaatttcttcagaaaaacaacccagaatggtggtgttttttgtttttttttgtgatggagatggggtctcactacgttgtccaggctggtctcaaactcctggctcaagatcctctcacattggcttcccaaagtgctgggcttacaggtgtgagcccttgtgcccaggcagttgggcagttggtttttagtatagacatccttactgaaggatgaggagatggggatttatgttgcagaaatacggattacttaaacagaacgttaaatttctgttgataaaaaccctttgctgtttctcccacattacctccatcctgcccccagagcaccgtgtgttctcaagctcgctgctctcccctttctcttccttccttcctctgtttctcagtcaacttcctttttttttttttttttttttttttttgagatggagtctctctgtcacccaggctggagtgcagtggcatgatctcagctcactacagcctctgcctcctgggttcaagcgattcttgtgcctcagcctcccgagtagctgggattacaggcacacatcaccgcacctgactaatttttgtatttttagtagagacagatttcaccatgttggccaggctggtctcgaactcctgacctcaggtgatccgcttgcctcagcctcccaaagtgctgggattataggtgtgaggcaccacgcccggccttcaagtcaacttgaacttcagtttttaatgcagagcagtttagttcgccctttaacctccactcttctgccctctggcaagataaaattcagttcccatttggcttcttcagtgaactgggtgatttccttctgacgtatgtaaaccccccagggacaggagccatcactggcttaatcacctctgtctccagggcctggctgcaggaggccctgagtaattttgaaggaatggatggtggggtaaggagagctgtgtccaggctgcaggttagctgatttgttttggttgtttctctccatccaccttcccctgaagcctgtggagccccctttcttggttcctctgaggcacggctatggttgccccttccttttcctcctcacgcatcacatttacccatgtctgcctgccacttaatattcctacacatgcatggtttgttctgttcctttctttactccttgaggcgtgtattccaagtaggcagggtagttttgtgtctcggttccttttctcaagtgtattgcgtgtctttgcatccaccgtgagaagctgctgcaggctagacgcaaacccagtaggggcaaagcatccagcatttgtgggcttatatgttactgtcattgttcaggaaagctccagaaatgcatccctggcagaggctggtattggtgccattccttcccagctcttggccatcgaacctagtctgcgaagatctggggttcccataggagaggtgggtgtttctcagcgtcaggaagccaggagcttcagttcagccaacacacattggttcctggaagacctcctagggccaagttgtagggatacaatggtgagtaagtcagacatgacccttgccctcagagctcatattttactagggttcccaataataggaaatagacaagatcttttcatgtagttttacatgcgaggaagacagtcacacaggcaaagaaagccaggacctcccagccttctaccctcaccacctgcagaggctcatgagtgctaccacagtggacacctttgcagaatttcatccagatgtttgagctaatttcttcaggcttgggtggacttggccctgctggggtcttacagtccctaagcagccgggccacctgtgtcccacatgattatctgtgtctgtgcctaccacgccaaaggagctgcatgcttgaggaactctcttctggcaccttctcttcctttgccttgagcttcagccactaatctcccactctgttgattgaagaggtgagagacccataggtgagcgtgtggcgggcatggcatgcctgggcactaataaggcatctgcccgggccatccccatgtgcttctggagccccaggttccaaaacgacttgttccccaaatggaggcagccctaccccgctcccgtgtcttgatgcctgctatttgtgtctacatagagcaccttctccctcacttgtccccagctgacttctgtcttctgcagattccatctccagcaggaagccctgcaggcttctgcagctgacttttttttttttttttttttttttttttttttttgagacggagtctcgctctgtcgcccaggctggagtgcagtggcgggatctcggctcactgcaagctccgcctcccgggttcacgccattctcctgcctcagcctcccaagtagctgggacgacaggcgcccgccactacgcccggctaatttttttgtatttttagtagagacggggtttcaccgttttagccgggatggtctcgatctcctgacctcgtgatccgcccgcctcggcctcccaaagtgctgggattacaggcgtgagccaccgcgcccggccaacagctgactttttgtatttgtttttattttgagttagttatcatccttgagggatccggagacttcacatagaaatccggatgctttttgaaaatccaagatctgtgggtgctggctctgtgttcctctctggtaacgctgacggagctgaggcatagctgcccttgcaggtagggcctgtgtccccaggtttaccccgtcccctactctgtcagtttcatggccctgcctgccttccgtgggccctggacactgatctggtaaagtattaaagagatcagggtcatgcccaacacttagagattttaaagaactaacagaagcagcatgcagtctgaagccagactttttaggtttgaattttggcctaatccttaggatggtcagatgagtcacccttatctatagaaatgagaggatgagagtaaacactcatagagttgttataaagatcaaataaattagtgcatataaagtacttggctgttggcgagtgctcagtatctggctgttactgtacatggctaccaaagttaaactatttgtacaaaaactggatggaagagcctgtgacaggcgtgtagaaagcataagcagccagtaggtaggacaaaaatagctttgagcctgatgctttaggcattttacacacattatctcaggctcatggtacccatgcaggtgggtgctttttctccgtttgctgggtggagctcacagtacccactcaggtgggcactctatccctgtttgctgggtgcggagactgaggagtgctaggaagcagcacacctagagccaggaggagcatgagctttggattcagatgcatctggggtcgagtcttgcctctcctctaggagaaaatattttgacctgagccttggtttcctctgtaggatcgagagaaacaaggttattatgaggattacatgaggtaattcatggaaagcgctgttattccctggcaggtctgggatttgattctgccccactttccagccattaaattagcctgctactctctcctggagtaactgggtcagcggtggaaggcacagcaggcagtgtaggcattcacacatttgcgctgcttgccctccagtcccacagggaagtccccctggatgcagtggttgctttacaggagggggattgagttgggcaatctgccctgcatagcaagcaggaagctcttggccctggagggagacattacctcatcctgcaaggttgctcgctacaaaaattatacggggaaatgagctgggttaagaggagtcaaggattggcagtcttggcacatccagcacgaggtgtgttggggcatgagaggtccgtggagtggtctgcccagcatctgcagcacaaagtaagagtttcataagagagtcattatacttactgaggacttagtatctgcttggcattgtctaggtaatttctagatagcaatgttcctgtgaggtttcatctctgcctgttttactgatgaataaactaaggcacaaaaggttagataagttggccatagtcacatagcaagtggcagagtcagcagcctggcttgagtccatgctcccagtgactgtattgtgccaacagttggtgagtttatttggttattgtgagttccatgggcactctgtgttacataaggcctggcccacattttaaaacattgttacagaaaatttcaaacaggtatgtagaatggtgtagtgaactttgaccatttgtcttagtccattttctgctgctacaacagaataccatagactgggtaatttataatgaacagaaatttattgacttatggttttggaggctggaagtccaaaattgagggctggcatctggtgagggccttcttgccatgtcatcccatggcaaaaaggtgagagttaaagagacagagtgagagcccagagggggccagactcatccttttacaaggacctactccctggatagcagtgcttttatcctccattcatgagagcagatccctcatggcctgatcaccccttaaaggtcccaccttttaatactgttaaatgggggattaagatgccaacacatgctttctggggggtacattcaaactgtagcactctacccagcttccacagctgtcatagtcacagccaatcgagtgttcttaatacaccacccattcacccttggtatatttcaaggcaaattccaggcatgccgtttttttctgtaactacatcagtatgtatatgaaaaagaaaagactctctttgaataaacctagccacaataccattatctcactttaagaggtgattaacaattccttaatatccaatattctgttgttgttcacatttccctgattatcttaccccttccccctgttttttacagcttcttggagtcattatccaaataagatccataagttgtgattggttgatatctcttaagtctcataatctttagatcttttctccatctcttttttccttgtaattttttgtggaagaaactgggtcatttgttctgttgagccttgcagtcgagatattgctaattatgtccccattagacacacacctctgtcacctgtgttttctgtaatttggcagtcaggcactgaagcctagtcaggtaaatgcctgcttattttctttgacttactagttttaaaaataatgaattggttcccaggtgacctgggtatcataacagacaaataggcccgccgggtgttgaggtttccacgctgcaggtgtcatccctacaatgctcaagtgtcccttttttgccagcgtgaacctattcatgttggctcctgagttctgttgacatgaccctggttgtctttgagtgattttttgctttctggtagaagatattgcaggcttctcttgtacatttccagccccggacctggaattggacatttctccaagaagccccgtgggaagtgttacttgctttcagagggagataggagttagagacacctctaaagctgcatgaatttgatggtgcaggcaggacatacaggatgcagcctgatgggggtgtctcccctccaccttcagggctggttttcctgccttagtcccctctccccaggcgagggccagtgctttctgagcttctttgtctgtcctacaaggagggaaggatgtgggtgtggccagtgcaggggggtatgaaggctgaaagctatcaaaacatggctctgctgcaggtggagttggaagcagtctcctacaagcaagaaatgtctttgatgtctctaattctatctaaaattcatgaagattttgctctctccctgtctctttctttctctcacacacacactgaaatagaaatgttccagtgactcactagttggaattacttcctggtggacacatctcccagatgtgccacatttattgcattgacgaggcaggcacttgcatgaactgtcgcatttgtacccacccttctgtgagttggatgttgccatctctcttttccatatgaagaaactgaggcttgaggtaggccagtgccatgacagacctggttctggtcttatttctgctcttggtctgtgatcttgggaaaggcctttctgaaatatgtcaagattaggggttcagatgaaggttcttctaaactccaaagttctgtgactcttgggaagagccaactaatgaaaagctttagagtcgggcacggcttgataccagggcctgatgcagttgcagcagctgtggaagtgggtgtctttgagctggggatgtcgtggttccctgatgccagagcatgtgggtgacctactctgtgagtatctgttcccattcttgtcggtctccctccctttctcagatctttgccagcattgctccttccatctatggtcatgaagacatcaagagaggcctggctctggccctgttcggaggggagcccaaaaacccaggtgagcacccacctttcctctgcaggggtgttagcagctttctctttggggagccagcattcaaagaaggacacagtgtttttaaagcctgggtgctggggagaaagaatgcattaaaagatggtctggctgggcgtgactcattcttcaagggagagggtggccctgagttgggcattctgggtgttgggctgttggtcagggagccagtgtctgcctgcttttgtgatttaagcaaatgagtctttgcttctcttctatgtaaaaaatactttgtcttttaaaaacctgttttaagtacaaaaatactattgacacatgagtttgtatttatattacacttttatagaacactaaaagtcatgggtgaggctgatttccccattgacccccacttctcttcctagtccctccctttgtggccatttacaattacacagcaaccacagggtttcatgactacacgtgtttatttgtacaagcgcagcgtcccctgtgtgtgcccagtgctgtgcctgtgcgcagtgcatcccaccgagctctcccgctcagtgccacactgcagcatcttttcttgttagtgcatacagagcaattgccttcttttaaatgactatcatgccaccagataacgcagtttatttagctctccctttggagaacacttagattgtttctgatatttcacattcgccaaggacatctcgtgcaaccctcctctgcacccgtgtgtgtttccctgggagtgcccagagtgggactgcatggcgtagggcattgtatccctttctagagggactgtgccttaccattcctaacaagtaggttgaggaattggtgggggatgcaactgtgccctcctcctctcacttcccactctccccctcccccgcttctactcatcccctccaggtggcaagcacaaggtacgtggtgatatcaacgtgctcttgtgcggagaccctggcacagcgaagtcgcagtttctcaagtatattgagaaagtgtccagccgagccatcttcaccactggccagggggcgtcggctgtgggcctcacggcgtatgtccagcggcaccctgtcagcagggagtggaccttggaggctggggccctggttctggctgaccgaggagtgtgtctcattgatgaatttgacaaggtgggtccctgggtcacggaggctggtggaactcagggggtgtgtgtgggcttgggccttagcgacgggaatggtgttaatggggtccattgggacctcatcggagacttagtagtaggggcgtgaaccatgctaagggtgggccattttaatcttgcagatgaatgaccaggacagaaccagcatccatgaggccatggagcaacagagcatctccatctcgaaggctggcatcgtcacctccctgcaggctcgctgcacggtcattgctgccgccaaccccataggtgcagcaggcaccctgactgctggggctggggtgggacacagggaggtcccgcctgcttgaattgggagcccacggggtccccaggagccgatctgaggaagtcattgtgcagcagagggttcccctcttctgcatatcctgccagagtggggaacagtgaaagtgggacctgggacacctgggtttcctgttgagtcatgttcctggaatcaccttggatgttctcagaaggcatgggaggagagcccagtgcccctctggccaggatggagttggctgttggtctcagcagcgaatgcgtaaaagaacccaggctctgtcacccactgtgttcttggtttttcctcctggggaagcagttatgctttctgtctaaattaggctattttgggccctggttagggtaagctctttgctgtctcagacagcaggtgctaagtacccacctatgtcttcctcttccactgccctcatccccttctgccatcagagcagcctggggtccctgagatgggaggataggggaatccaccctgatggaggtgctcccctgtgtttcaggagggcgctacgacccctcgctgactttctctgagaacgtggacctcacagagcccatcatctcacgctttgacatcctgtgtgtggtgagggacaccgtggacccagtccaggtatagctcacatgtgcccggtttccatgaactgtggtttggggacctcaggtgaggcttggggtcatacagtgtgcccaacacaggggacaggtgctgcaggggccataggctgttttctagtcctgttccctcggtctcttctcatgtccagaagtcgccctgatttctctttccttcacagcacccccgacccccaccctacataacccacaatccaccaaatcctgttgtcccaactcctgagcctacccacctccctcacttctgcctctgacttgaggcactaccatcatctgaactggcctcctggcacccatgtagactgtcttccagttgaaggcataaatcagatcagccccgtccttaacaactgcttgaggctttctgctgtcatcagaatagaatccagggtcctcccctccggcccgcacccgccatctctgcagctacctcctcctcgctcccttccctcacctgcacctgcacctgcccttctctctcaaaagggccgagccttggggcttgattgtgctccttgctcctggcagacgctctcccacactgtcacatgacttgcatctcattgtcgtcatctcagctccctgtctttcagggaggggctttgccgggcacccttagctagaggcatctccttggtcccttgatcctatcactctatttttcttctgagcattactttccataattaatttttaagactatttgtctcctgtccccttgtggagatgagccctgtggggactctgtcccattgtctggtttgccacccacacccagaactgcctggcacatggtcagtgtagtcagtcttgttgaaagagtgtcacccttgtagggcacactcagcccttctccagccactgacctccccaaagccacgcacacccacaatcagacccaccctctcatggcttatcttaggacgagatgctggcccgcttcgtggtgggcagccacgtcagacaccaccccagcaacaaggaggaggaggggctggccaatggcagcgctgctgagcccgccatgcccaacacgtatggcgtggagcccctgccccaggaggtcctgaagaagtacatcatctacgccaaggagagggtccacccgaagctcaaccagatggaccaggacaaggtggccaagatgtacagtgacctgaggaaagaatctatggtgagagcccaggcagagccgggaggtgctatgcagagaaggaagtgcagtgtgagccttctgaccaatgcagcgggggtggtggtcagtcaggccaaaaggtgccagagcagggaggcattaaaaaaaaaatgtaggtgccaggcacagtggctcacgcctgtaatcccagtactttgggaggccgaggcaggaggatcacgatgtcaggagtttgagaccagcctgaccaacatggtgaaacccaaaaattagccgggtgtggtggcacatgcctgtaatcccagcttctcaggaggctgaggcaggagaatcgcttgaacccgggaggcggagggtgcagtgagctgagatcgcaccactgcactccagcctgggtgacagagtgagactccatctcaaaaacaaaaacaaaaaatgaaagttgggtacagtgattcatgcctgtaatcccagcactttgggaggccaaggcaggaagattgcttgaggtgagttcaagaccaggctgggcaacatagtgaggccctttctctacaaaaaatgttttgaaacttagctgggcctggtggtttgtgcctgtagtcccagctactcaggaagctaaggaaggaagatctacttgagcccaggagttcgaggctacagtgagctatgatggcaccactgcactctagccttggtgacacagtgaaaccctgtttcaaaaaaaaaatatttttttaaatgataggtattaatatataccttaaccattttgttttagatgaaatttaaatgtgcattcatttgtctcagtgtagggccaaggccttaattgttgatgtgcttattaagttccatattgactttgtgtaaatttcactctaatgaacacaaggtctttggctcattcatagtggaatggaaacttaaagcagcttgcaagccatgggaatgccgagtccttgtagattgctgcctcagccacacccagtcaacacagcagcttttcaaatttctgccttttaactttaccaagttttttcagatcattcaatttagttttcctacaaacaacgacctttttttgcacttacattgtacaggattattcaatatttagtgtgtgacaataaccaatacagctggccacaaatacaacagcctctgagatgcacagaagtcagctggtgggagcagaactgtgcaggtgtgatggtgacaggccgtaagcatgcagcatccactggcatcctctgatttccaggagggataggaagtgtgcattcactgggcagcgcagtcaagcattctgcatttctgctggggcactgtcagatgggtcttcttggctctgggtgctaagagtgccgctgctttattttccttgcttctctttcctgcccgtgaaagacctgacactgtgcttctctccaggcgacaggcagcatccccattacggtgcggcacatcgagtccatgatccgcatggcggaggcccacgcgcgcatccatctgcgggactatgtgatcgaagacgacgtcaacatggccatccgcgtgatgctggagagcttcatagacacacagaagttcagcgtcatgcgcagcatgcgcaaggtgggtgtgctccgaggtaggggcctgatgggcaagctcagtgaaggaggccacacgtgggtatccagggctctggcctggacgtgcacccaggagcggcagcctgtctgacctgggtgctggcacgtagggtaaagggagtgtggcaggcgtagtgggagcgggtgtttgactgaggcttttttcctgcagacttttgcccgctacctttcattccggcgtgacaacaatgagctgttgctcttcatactgaagcagttagtggcagagcaggtgacatatcagcgcaaccgctttggggcccagcaggacactattgaggtccctgagaaggacttggtggataaggtatgggcccggaagggaggtgagggttggggtatgctgacttgggagctgccagtctcctgatgggggctccatcataatgggtcatgaagtgggtgggccttggttgacagccatttattgaatgcttacagtctgttgagtccagttctgtgcctgtagtctgacagcaggggagtgaggtgagtcctgttactgccttcctgttgtgcagaggtggagacagatacagggcagccaagtaacttgtctcagtttacacgcacagcttgtacagcagagatttgaagccccttaatcggcctctccacccctggatattttcctcccataaatggaggtgatggtgtctgaaagtgcactgtaactggggcgctctggaaacagcctgttctcacaccactgatggctcactggacacttcctccttgcaggctcgtcagatcaacatccacaacctctctgcattttatgacagtgagctcttcaggatgaacaagttcagccacgacctgaaaaggaaaatgatcctgcagcagttctgaggccctatgccatccataaggattccttgggattctggtttggggtggtcagtgccctctgtgctttatggacacaaaaccagagcacttgatgaactcggggtactagggtcagggcttatagcaggatgtctggctgcacctggcatgactgtttgtttctccaagcctgctttgtgcttctcacctttgggtgggatgccttgccagtgtgtcttacttggttgctgaacatcttgccacctccgagtgctttgtctccactcagtaccttggatcagagctgctgagttcaggatgcctgcgtgtggtttaggtgttagccttcttacatggatgtcaggagagctgctgccctcttggcgtgagttgcgtattcaggctgcttttgctgcctttggccagagagctggttgaagatgtttgtaatcgttttcagtctcctgcaggtttctgtgcccctgtggtggaagagggcacgacagtgccagcgcagcgttctgggctcctcagtcgcaggggtgggatgtgagtcatgcggattatccactcgccacagttatcagctgccattgctccctgtctgtttccccactctcttatttgtgcattcggtttggtttctgtagttttaatttttaataaagttgaataaaatataa

SEQ ID NO: 324 - DNA, 32742 bp, Homo sapiens
  source 1..32742: mol_type = other DNA
acctcgggccgcccccgccgccgagccggcccagggataaagtggcggcgcagacgccgcaccctgtcgccgcgaagccggtcgcgcgcagctcgtcccggccctggcccgccgcaaacgaggatccgctgcgctcggggaacgcgacagcggcgctcgtggccccggtaactgcctcccggcccctgccccagcccgccagtgccgccgtcaggggtggggagcagcactggggtcccggacacgcccggcgtgggctcccgctacccatgtgtgcgtgtgtgtgtgtgcacggtgtgtgtgcgcgcgtgtccgagtgtgcgcgcgtgtgcgcgcgcgcgcgccctccctgctccttcgcaccagcccccaaaccaacttgtccccatcaactccatctttctagtccccaccttccccggtgcagacacccggcgaagcccacccggttttcccagcggcatttccgatgacagcttcggggctacgtgtcctgtgctgtcggagacgcacaggaagcaaagtttgtgagaagccttgggggcgactttgccttgggcacccgcatttgtgcgtctgcgaggtgcctcggtgtgcgcggagctagtttcccagtttcccgggcccctcccttctccgagcccctctagcgatttgtttaggaaaagtgatgacatgaactagtagtggagaatcgcagcgccgctccccgccctggggagggaggggagccccggagagcctgccggtgggagctggaagcaggctcccggctgagcgccccagcccgaaaggcagggtctgggtgcgggaagagggctcggagctgccttcctgctgccttggggccgcccagatgagggaacagcccgatttgcctggttctgattctccaggctgtcgtggttgtggaatgcaaacgccagcacataatggaaacaggtttgtcatgtatccttggaatttcagatgggaggaataatctgagtatcatccacctcattattgtgcccacttgaaactgttccttggagattttaagatagatgggtcttcttgcagctgggtctttgtacccatagagctgactataatttccacttgattacagctaaaatagtctttaagatgaagtttcctgaaatgatttaaaataaacacagatgggaagggggaaaaactgtaatgaggcacttaaaaaataaagtgagcattttcttaagaacaaatgggatttttcagtcttggagaggtttgcaagaaatgtatgtatgttttaaacctttgaaacagaggggttttttaaactgcttttaaaaaaatgttactgactctgaactagacttttctctcctatccatacatgttcttgagatatttctgactttggaatatgtcacttttccttctaggacctgaagacccttccagcatgccagaggaaagttcccccaggcggaccccgcagagcattccctaccaggacctccctcacctggtcaatgcagacggacagtacctcttctgcaggtactggaaacccacaggcacacccaagtaagtcttccccagaaagtcaccccaggtgacaggggagcatggcccctgcttctcctctggtcgttatcatgtgccatctggggcggggccgctttctctatgacctacttcccctgccgttttaatgttaggctgagcaatgttaacaaagctaaaatgtatactttataatttttaaatttaagaagcaggaattcttttttcattataacaactcagatatggatcctaccgtatggcaattttcaaaaattccacatgactttattttttgtactggagttgatttccggttgtacaggcattcatttaaaatcaaacccgacaattaaggaaaatcccctagatggatgagaaacccgaagtaatacatatatcttcacctttgctcacttttcctgcttgtttctgagcttctgaagatggcatacatgtgtcaccaggaagaaaggggcctgggtatttccttctgattccttgccagctcaattactttgtacattttccatcaaggatttgtcttgctattagaagcaaacattgggactatacacaagacagctggtctcctgctgctgctccctcctcttggatgaagcaggaaaaccctgcttgtttgtgttatttggaaaaagaatttatttgtggtaaccaattggcctggtgacaagaacatttcctgttccagggacattttacctgttttgtaggcctcttgtctcctagggatcattgtgtggttggattatgtctctctttgtgctccagtaatcacccaaccctcacacaggtgtaaaatttcttctctgtcttcatcaaggtatctatgatccagggagctgcacgttaaaaacacagagatatggacttttaaaacccggcatagagtcatagcttcagggcagctacacagactggctatggtttctctctagtgttttcaagtgggtaacgtgctgagaagagttcctaccagttctggtaatacatttcttaaagaatgtgtctgtacgtgcatacgcattagaggaagtgggggggttgttgagcattatgatgctaattaatcattaattctccactctgacttaactggctgtagaattgctcaatcttggattaatttctaacagattagtggtttgtggtaatttgatcaatatacagaaagaagacaaataattgaaaatagaagtttttaatgtctgagtctcagacttggggggctttgttggttaagtagtgaggttgtcctagttcgaagtcaacaaaaataaagaggttctgcagtcctggcacagggggagggtggtgggtgagtgggttagaaacggtcaagttggctgccctgccctcccttcgcctgcgggtggttttcacaatctctgtgctgaagttgcattgcagggagccctctctgctccgttgcttttgctctagttagagatgataactcaacttcttaatttaaactgagctgcctcttggatgtcagcgtccgccttgtggtgggtgctgatgggcttaagaacagaggtggatggttgaggcagttcggccccagaatttggaagaaacctatgggtctagaaaaggttaagggaaaaaaatattgagggcaggagcactgaaatagaaagagcaacagaaccatgagcatgtatgaacactttccatagtgttatcctcagtttaccaaagaggaaggggctggccaaggtcctacctacctgtcctgccctgcctccagcccctggagatgatgcagaggtcctggaggccccttgccatgactcatgttaaccctgtgcttgctggatcttggggcagtcttgggggtcctagggtgggggctcagggcagaggtttgtgccagccagcatgaaacacctctgtatcttcataaccgagaccagctgctcagcctgcctgccctcttgcatgatctgggagacccccgcagcatcattataataagtattattattattgcctgcacagaatcattcactctgcttttaggaagagggaggggacctcaagtcaccagggcttcaatctttccccccaggctttttacccctcttcagcaaaactagggcctcgctttgtgcaatcctgtctcctcccagttaggaagaaagaagggaggaaaagcaaggggcaaaaaaagaggagactgaaccctcccccactactgtaccaactgtgggcaaaacctgggttaagagcacctcatctccagccccgcctctgctatctttctcatagagaccctagggacctcagaagccaccccgggggcctgtggatatcttattatgcagaaggatctgtgccagcctcggttagtcagtactggtttgggtagattttctggccaaccagttacctccagctcctggagcctgccgtgagcacctacagagacatattgcccccagaggacctgctgggttccaagactggctctgcaggtggctcggagcaacactaagccacaggtgtcagccgctgcactgggaacctggcttaacccgctttatgcaagcaaattctgtcgtataaacaccagcctcctcggactggaccctgagaaagagaaagcatgtcttgggttagcctttaccatcagtgctgtttttaacgtagcaggccagagtctccgtatttcatcatcaggaatcagaacttaaacctccatttggcagtaccaaggcaaattcatgctgtagtgtttacggtaataacaaatcttatacttaaggcatggcacaattatctcatattaattgagtgccaggtatgttctagggtctggactagattctgtgcacacatgacctcattttaccttcacatcaatctgtgagacaagtattattattcttactattcccattttacagatgaggaaacagaggtccaatgttacaaagtatctttctccaaatgaccctgctggcagtagtgggatttggtccgcaatcttctgacatggaccaaatccaattgttctccttacaccaccaagcaggacagatttcttctttataggtagtgttttcctgataaattcttacattttgggttagggtaaacatcatttcctagggtaaagaggaagagaataattaattctccctaatcgtttgctcataatatatcaaaggtgggaaatcagctgggttccgtggtacacatctgtagccccagaaactcagaagacagaggcgggaaattccttgagaccaggagtttgagaccagcctgggcaacgtgttgaaattctgtctcttaaaaaaaaaaaaagattagagataggtatcccttctgaaaacaacaacaacaataacaaaaaacagaatttatgcccttgcctgactggctgccttatccaattcaacatgctggaacttaaaaatattggccgggtgcagtggctcacgcctataatcccaacacatcgggaggctgaggcgggtggatcacttgaggccaggagttcgagaccagcctggccaaaagtggtgaaactccctctctactaaaaatacaaaaaattaccggggtgtggtggcagacgcctgtagcccccgctactcgggaggctgaggcaggagaatcgcttgaacccaggatgcagaggttgcagtgagcggagatcgcaccactgcactccagcctgggtgacagagcaagactccatctcaaaaaaagaaaaagggggggatactggatcatgagcaaatgtccactgatgctatcagcacggcgatggagactggcccatggatgggggcaagccgctttgtgggctcttgagctaggaagtcacagtttctcttgtgcccctttgagaaatatttagcacctttgtattcagccaaccaagtggctctcagtccatagaaagacgtctagaagttaactgtgagaattccttacccatgagctcaggtgagggaagggtgcggtctgaaaacattgtgcaatatgatgacttagactccaaaaatatcctcatttgacactggatgaccaggaaggctggagagcaggctgtaattatatgattgtacaactctgacccctgccaggcagtgagttcaaggcatggagcagaccatatttgctgttcatctgcaaggcccggcatgaaggaggtgctgagtagagggttaccgagtggacacatctcactctcatctttcctcagtgctagtccatccaccggctcatgccacttggccttcctggcagcccctcaactctggagagctggcccactttcttttctgtagcttctgttatgatgataaaaactggtgtattgaaggaactggcttaaagtgtgattgtccctccctcgctgatgtcccaagacacacgactgggaggccagccctccccacttcctccagagccctgccctcacacctccagtaagtgcctcctcctttaaatctctgtttagcattttgttccaaattcccctgcatttatggagaccttctggaacataagccctttctctgaaccttactggccttgccttctagtcctttcttgcctcagacctcggtcacgtggcttttctctccaggaactttgtagtcacccctcaccatggctccctcctctcccacctggccagctccaccggtctgagctgcctcggggccagggtgcagcctgcatggttttcaggattttcccgtcggtgacatggagctaggtgctgcaaggggaacacaggccgtggatggactagcaagggagatttggcattgtttctggaacctgcccaagtcctcagaactgtggccgctttcagtggatctagaaccaataagacagggctcctccctcctgcagttccttcccttgctcccgggagtggggctcagtgatggtccccatcacagccctcccgttctaggcccatgttgacccctttctccatgaagccttcactctctgtgtgtgtctacagcaatgggcagtgccatcctcgggcacttcccccatctatgccagtttacctggaggagaggccatgccctgaggcctgggtagatttaagtgatagagaacatccccccttcttgcgtcctcgtaatatcctcctcacatcagcccccagccagacacgggtgtggcacctgtggctctgggaaataagggcccctcccagccatctggatccatccggaggtgaacaattttcaccatttgcttgcacataattccatccccacggccttcctgagactttgtcctcaaaggtgggactggcttttccttccccgcccttaggttttctaatcaggttgtcagccggctgttgagtgctttctttcccccaccccctgctttgggtgtttgttcagtgttccaggaaaccttctgcaggtcctgttttcatctttgagtgtagaagggagtgtgaatttccatctccccaggccgcagctgctgaaccctgtagcccttctgaactcacgccacctgcgactaggtgttcccgcatcaccagccagctggtttagcgcagatgctccctggggtcagctaaatcacacagcttattgtcccttcaagtggccattttgaaccccactctgtcagtctctgcaggggtgaggacggcctggctcctgctcagcgcccctcgcatgcagctctgtggctaccccatacggctccttgctctcctctcccaggatccaaagcagcgattcattcagcaaatacttccttattgacgtctacatggtccttgggcgccagggtggggaaagggtggcaaagatcatgcatctgatgaaggggtgggatggaccaacacacggataattataatatgatgcagccaggacctagaggcagggctgctgctatgccacgcagagcctttgtgcaaattagacagaggtgcccactgggcagaggctgccccatgagttggtgagcagagtgtgggctgggtcgcagctcctacttgcccttctgtcctgtgtcctggatggtgttccaccctcggaaagggcacgtgggggagaggacccaaacacaaaagcatgagccaaagggtgggtgtaggggccccagctttgtatccaaataaccagctagatggagaggttcatagtaatataggcgcaaggcaaagaaggccgcgtcatggcaaagacgtagcaccgcgtgttagcaggagatggagagatgaacatggactgtacctgaggatgcatgggcagcagagggagaaggagggtgactcccaggtgtctctggagtgatggcagaaggagctggtgttattgagggtgtgggaatgtgggattctccttcacagcacacacctttaatgtattctttgctcggaacacggtggggctgctgtgtggcaaggaggatgcatgggatcatcgcaagctgcgggtcatttgttgacacagccatgggataagccaggaggggagtgaggagaaggagcagtggccaacgaactgattacatttcagacgtcaccagttacaatatcaatcaatatgaatcacgagtgactctgctgaaggtaaggaaggaatcagcttacaccctctccccacaaggaggaaaaaaaagtgaagcacctttgacatatgtctgttgttccataaaatttactcttaaactctgagaaaatgggccctaccatgcatcttctagcaatgacattatttttagtcagattattgcattttagtagcaccttttaagtagtccattttaagaatttccagaagtttgtttttcttgtatgaagctgttatttctccttctgatgcttctgcctttgtgatagcgtagcaaattgttttatttttaaacagggcatttcttctgggctttttaaaaatactcttcaaatagcaaagatcttttgatggcaagaggcaaggccagctgctattcttgcagttgagttttccaacagcttctttaagggataatttcttccagttgctgtaagaatgttctgctgatacaaatctggctttgttttgcagtagagtcgaagaaaaaaaatagcagaataagctgctccctgaatagcaacctttgtccaccattgtctatttattggcaccttttaggtttagatcttaatcccagatgcactttgtccatgaatgcaaaccaaactattggtcattgtatacacggaggaaatggtctttactggtgcaaatttttacagctgagatgacaagatgacccttgtcccatattgcagggtcatccaagattcttgttggtaggagtttcttttcatttcacacagccttgttcattaggggatgggggtggggatgctgcggtggtcagcgagtgaaacggggtgacattgttctctgtgtgtttgagggctataagaagagctgtgtgttgtgtgttcctacacttgcagctgccccaagttgacctttgtgtccatctgctaacatgcctctctcccgggctaatgctgaccatttattcccatgcttgatgttccgcaaagtctcttgtatatggtgatgagaaggtatgcctcaccttccagggagtcacagctctagcaacattctgaagagaggaagggagagtgggagggaggcagggaggaaaggaaggaaggaaagaaggaaggaaggaaggagggagagaagaaaggaagaagagaagaggggaaggggaaaaataaggaggaggaaggatagaggagagaatgaagaggaggaaaacaacagactgagcagtaaggtatctttagagatcagcagctgtccctgaccttggggacttgcaggaggttcatggatagtttttgggggttagagtgtggggcttttgacatcaaaggggtatgtacacttttctaggaaaggaagatggatcataggctccaccagactctcaaaatgggggtcaatgacccgggagtcctgtgtcaccctcatcatttcatagatggaaagactgaggcccaggggatgaaaggagtttctcaggctgccacaggactggctcagggctgcagggcagcctcctgatcacacgttgcttctgcttcaggcttttcatccagaagtttcccttatgccttcttctgatcaatttaaactacaagttagccctccccagcaaatgtccggtttggagcagggcttggagaggtaccagacccctgtctcccatgggaagccatttggccagcctccattttgctgggtctgttgacagtggttagaagtatgtgggcacctaagtgatgcccgccgaggctgctaataagtgcagatggacctcagaagagatggccagagacctacttagagcagccaggagataggtgggaggaggggagaaactgtgggaggaacaggagcccaggaggcctctgggagaacaagagtcggaagaaagtggcagactcttatgagggggccccaaacaaaaaggagggaagcaggggaaaaaagaatgaaaagggaaagagatggaagggcacaaaaaaactgcacaggcggccacatacagcctctggttaatgtctccttgtcaaggcatgtcaattttcccaggtcattgacagtctactggattagagattaaaaacctttagttaggaaattgctgtctttagacgttttagaagttcccctctgtttatcctcttccgtcaatcttgaagagacgtgtttcagggaaacatagcctctctgaacagcaaaagccaatggtgcatgcagaagagcagaggtcctgggacaggactgccaggaccacaccccgatcaacaccagccaggtatgggcctccagagacgctactgacccatcactgcagcagttttctcatctttaaaatgaggactaatagcacctttcccacatggctggtgcaggtaagagagaaatgtgggctccctgaggggtcaacgtgaactctcttgattcctttgtccgcttcatctccctgcaccatcgttctggggactctgcggacctgtgccaggcttgttgattgcccaccgttaccccttacttccctccaccctcatggcaagcgccagtcacagaggacccagtatgaaagcaatcatgcttttgacagattccagcctgactgctgccctcaccacaccaggccacaggctttccccaggcctcaggttactcaccttttttttcttaacttttttgtttcttcaaatgaaactcagttccatgtcaaggagatttcaggctccctgataaacttctgcagttgctgggtgcttcttttaaaagtaaacaaaacaagaaagccacaaggaagccagcctttggtgtgaacttctttttgagataacacataataagggtagctcaacacttttcttttatgtggaatgcagtacaggatttgtggcataactcttgactggaaggagaaccaaacaacccttagctattatagctggaagtcaacttaaataagccttccttagagcatccagtcaattttcagtggtccatgtcttaaggtattccagtctttggcatatgtttttcctttcgtcctgattacgttatcatggttggtagaaatgtttctgctgcagagagtgagactgttactacaagggccatgtgctagatccagagtgggcaggatagtctggggtatgttaggaatctattgctgttactcagcccatgattctgtgggttcgcaattagtgctgggctcagctggatgggtcttctgttgctcccagctgggctcctgcatgtatcaatggtcagttgtggatcagcaggcactggcaggccagctagaggcttgccagtcttggatggctttaccacatctggtgttggcaggctgttggtgggatcacctcagttcttgtccatgtggtttatcatgctttctcagactggcctggatctgttattaaggtggcagtttttcaagagcaatgagaacagatgccagtatgcaagtgcttttgaagtctctcctgtatcatgtttgtgaatgtcccactggccaaagcacatcaggaggccagcccagaggcagtatgtgaaggcatgtccaaggagcaaggatggaggagagaatattttgtggtcatttttgaaatctgttgcatgggggaaaatatatttgtattaatagttgggacgagggttgaagtcttattactacctctgcctctgagtaactttagacaaggtaccagctctagactctccagcaagttcccagaagttttttcttttgctataactctgggatagtttgcatcttgcaagagtagaacaacctatgagcttctccagggcagaattcatgtttagcttttttctatcttctccaacacatgcctcttgtagagtttcatacctggcacaaaataagggatcaaaacacgtttgttgcatggatgattcaagttcctcatatttacagtgggatgactgagagaggatgattcctgaagtctctactgccacagttttgcaggaaaagaatataagcatttctgttgagtatggcttcaaggcattaaccttttgtgcaggaaaggagcacctaaatccagaagtatcaccgaaggagttagtgacacctagaagaagaatattccctgcaggttaccccttgagatactggatggctgtactttcaccagtttggttagctttgctgtaaaactctgtgtgaaatgcatctacgagtgggagttacagtatggcaggtgttttccattttagcacagaagttgctgtggatgtcagaatctggagggtttgcttccttttttgattgggtgggggaatggttcaacaggtattaattgagctccagatgtaaactcagtactgtgctggacagcaaaggagggtccacaaacagcatggagacgtggcccctttcacttctgacctctccatggcactagctcttgctgaacacctcgtgtatgccaggtctcattccagtttggagataaagaaatgaagttgccctgctcctgcctttgaaggcatctccatgcatttgtcagggaggcagtgccatacaccatggatgttgtcttgtgaaggctgtggattctgtgttgggatttcagagggacgtttggtgactttcagctggatcttgaaggtagaaagggacattctgggccgaagggaatcacactctcacaggcatggaagtgagagaggatacagtgtgctctgaaaataacaaggattatttggaaactggagtccgaagtgcatggcagaatgtaagtttggaatggctggctcaggagcctgcattggaatggctgttgtctactctgctgggaccactataacaaaataccacagactgggggtcttcaacaacagaaattaattttcttgcagttttggagcctagaagtccaagatcaaggcgtcaacagggttgatttctcctgaagcctctctctttggctcacagataccaaccttctttctgtgtcctcgtgtggcctttcctttgtgcactcagttcagttggcaatgaccattttgacttgctaaggaatttgggcttcattgtataggctgtgctgggaaccatgatagagtcaggggccatgtgggttggtaattgtttacagtctagtccattcagagcaacagagaaattcctgcaaaggttttatgtggctaaatgtctagaattggacaaggatctcaccctttcacatccgtacttctctgtggttccgtggtggatgccccagcctgcatgaagttgctgttggtttatcctttgccttgatgtcttttgtccaagaccatctagtctcagcaagccccacaggccacctggctcaagggcagagccagcacatcatgggagcatgccaggaatgaactctgtcattgcagagtaagggtactgtgcagagaactgtggccatcctcacttctttcttgctgatttttgtcctcagggatatcactcattagtcttttttttttttattgttgttttaagagacagggctttgctctgtcacccaggctagagtgtgttggctcaatcatagctcactgcagtctccaactcctgggctcaggtgatcctcccacctcagcctcctgagtacctgggactacaggcacttgccaccatacccagacaatttttaaattttttgcagacacaggatctcactatgttgcccaggcatgtcacaaattcccaggctcaaatgatcctatctcctcagcctccaaaagtgctggtattccaggtgtgagccaccacacctggcctcatgattggtcttaatcagacatggctctcccattctcctctcccagtggcattgcagctagagctggctataggacttggtgatggctaatgagacacagaagacgtttctggaggatattagctccatgataaaaggtaagagagagcaagatgagaagattgatctctctctctgccccaattcccctcactccctacattctgcctttgtgggcatagtgcttgcagctacagtagccatcttgtagtcatgagatggcaaggctaacatgctaacagagagtgatgaagaaagctgggaaaatctgggtccttgatggaacagctgagccaaccttggatctgcctataaatataccttgataatacaaaaatccacaccgatgtgtctcaaccaccaggtatgttctgattctttcagccagatggatccaaatgatggaagatccaaatggtggtgagtgtttgggctgctgatgcttgaactgagtctaaaaatggcccaagacagatatggaggagcatgaatgagaaggaggaaaggaatcctaggcacatgtccagactaagtagaggcactggaggcaggaatgagcaggagaagagaggctgatgttggagaatagtgggagatgagcttggagcctgagtaggcattggttggttgcctccccagtatccatttccttcttccacccacagtgccttaaatttaagaggcatctctcctctactttcagcccatgtgtttctgttggtgttgactccaccctggtgagaggttgatcttgcaacaagtttagcctatcatcattttacattctccccagctacagtgattggttcagggatgggcaagtacccagtgcaagtcagtgatcaataagacttcccctgggacttttgggaaggaaactgtcacttttctcctctgaagttgactctagaagtgtgaaccctgggcactctggcaaccattttaagactgcaagggggaagtctgaccaagaatggaatctaccttaagaaagcaaagctaagaagtgttgaaagagaaaccagttcctggtcatgttgccagaccccttgaatcaaacctaacagtactgagcctaacaatcacataaaccaataagcatgggaatcactttctgtcacaactgaaagaatcatcatagatctggaaatggtcacattgggggctatggtcatgttggaggttgtagacaaaatttttgataagaaagctagactctggagcagagaaaaaaagagttttcgtccaggcatggtggctcacgcctgtaatctcagcactttgggaggccgaggcgggtggatcacgaggtcaggagatcgagaccatcctgactaacatggtgaaatcgcatccctactaaaatacaaaaaattagctgggtatggtggtgggcacctgtagtcccagctactcaggaggctgaggcaggagaatggcgtgaacccaggaggcggagcttgcagtgagccgagattacgccactgcactccagcctgggcaacagagcgagactccatctcaaaaaaaaaaaaaaaaaaaaaaaaaaaaagacttttcacagcatgtctaaattagccagagtaggggtcagaaaacatcataaaatgaagttctgagttcctgcccctgttcttgtatgactatgtctttagtggccaagagacctcccttctctcttctcatcactgacagagttaccaaccagagattcacttaataaaattatcttttaaaatgcaaatatcttttcaccttaatacactgaaaaaagaagagcaagttaagcctaaagcaagcagaaggaagaaaatcataaagatcagagcagaaattagtgaaataaagaataggaaaacaatagaggaaataaatccaaaagttggttatttgaaaataccaataaaattgataaatcttcagctagattcatcaagaaaaaaagagagaagacttgaattactacaatcaggaatggaagaggtgatgttactaccaaattttctaaaataaaaagggttataaagaaatactataaacaattgtgtgctaataaatttgataacataaatgaaatgaacaaattttaagaaagacccaaacttagacttaaaacaagtaaagacattgaattggtaagcaaaacaaaaccaaaactaaaaaaactaccaacaaagaaaaacccaggcccagatggttttgctgttgaaatctaccaaacatgtaaaaagaattaataccaattctcacaaacctttccaaaaaatagaggaaaacacttcccaacttattctaagtggtcattattacccagataataaaagtaaacaaagacatcacaagaaaagaaaactaaaggtcagtatttcttatgaatagagatgcaaaaatacttaacaaatactagcaaactgaatctggctaatttttgtatttttagtagagatgggatttcatcatgttagccaggctggtctcgaactcctgagctcaggtgatccacccgcctcggcctcccaaagtgctgggattacaggtgtgagccaccgcgcctggccctatctacctatttatccagccatccattcattcattcacccatccatccaccaactcacccattcatccatttacccatctacccatccatacatccattcatccttccatctatccacccacccatacatctactcacacacccactcatccatccacctaccatctacctatccatacattcatttatccttcagtccatccgtccatccatccatccatccatccattcattcgttcatccatccacccaccccatacatccacccagccacccattcatccacccttccacccatccattcaccaatccacccatccatccatttattcattcatccacccatccacacatttacttatccatacatccgtcagtgtcattcagtaaatatttactgagcacaaactctatggcaggccttgtgctggatcttgggtgacagagaaatcattaagaccccatggtccctgccttccaagggctcacagcccaaggagaacggcaggcaggcaagccactagtgcatgtgccagggtctggagtctagaccgggtgatttgcctggagaagctagagggcttcccagaggagaggaccctcacagtcccatgctcatgccccacctggccattcagtgcatttagaattctatgcaccagaacaaagatgggcattgtcaggctctatctccactgaggccccagccaagaattggggagacagcctgctgatctccatggcttaacctcagagggctgcagggaggcatgtattccttgaatacatgagtttcttaaaattcttttgtaaccactttttatttatgcttgtatcacctttggaaaggggcaggaaacgaatctctttggaaggcccaaacctttgtctgacacgttgctagatacttctctggctttacctccctgactctcacagcacccatgagatgcctggcctcattcttgctattttattgccatagacagtgtcagctacatgctattaagtggcagggccaggatttgaacccaagtctgtttgctttaaaagcaccattgaaattccagcacctagctatgcctcgtaaaatattgcagaaccatgcctgtaactcagctgtgtgtacagatgctacgtaaccctcacaacaaccctagtggggggtgggcatgataagcccattttacaggtgagaagactgaggcccacaaaggctcagtggctctgatgaggtcccacagttaggaatgccaggtctgcggtatgagcctgtggtccatgccccattcaccctccataggtgttcagctcccgctcccactgatgatgctggcctggctgcagatgccccttcaggtcataatggagtgcagaggcctcattgtgcctatgaaattgtgaccattttccttaaattcatcactcaatgctcgtctcacctctcccgcattctcaataaattcctgatcatttatcgccatccgtttggcatttcaccacccagaggaacttggagccatctgcagccttggaaagttcaagctgttctccttccaggaaagaaaatgaatgttacataagatggagcccagcacattcttatagaagatcaggaaaccacttctctgactaaaacagctccctgttatctctgcctcttgcttcctattttatccaggtccacaatcacacggcagctgccgtttttaaacattctctcttgcagagcctttaaaaagagctccatactgtccctgtgttcccatagaatggccgtctctccaagacccccatggactctgtgaggaaaggcttctcccactgcattgttcccagcagagcctgtgctggtggccttgtcctttgtccttcaggtgtgggtgggagacctctccaggggtcgaggtgcctgcagacccccagtggaccctggcccacttcctcctagtgcctctctggggtggcaggcctggcccaactattaccatttcttcttcatagaacaggctcttcttctacttgctcatcttaggttattttatttggttattgtcaataaaactggctctgtgttttggggaaacatgttcattatagaaccttaagaaactgaagtagaaagatgtgactactgaccactccaggacaattaacgttgatgtgcacagactctgaggagttggaaagcaccctaaagatgatctattatagtttgacctgtgggctctaccatggggaaactgaggcccaggggacttaggctcactcattcccctgtaggtggccatggcaggagtggggagtcctactcagggagtcactgtgggatgggggacaagtgagcagaagcgatcagtggtctctgccatgtggccaggatggctttaagcagacgtgacatttgagccgggtctggtccgccccgtggccctgcaaccctctgctcactgccggcctcctgggcgacactgctttctggctctgcggccccatcctcctcccattgatgttacctcctaactagccatcttgcattccgggtggtaattcctgctaaatggctccagatcagcttttcccaaaccttgattgtttacacgccacctttgtgattttcatagcggctatttaaatttcatattatttcttcatagtttttttaaaatcaactttcttttttactttaaatctattttaagaggaaattttattgtaacacaagaagtagaaaccagtgtcaggggctgtaaataggtgaccacaaggagaaaacaaggcgacagtgtattgcagctctgcactggggtacactcaagagccctgagccaccccgtcctgaaagtggtggtgagctagtgcctgagaggtgcttaaaatgggtcagcacctgagtgagtctctctcttaagtactcagaggattggaatgggatgaacgagggaatgagtaatgttttcctggtacacggtgatggcatttcatgctgtgacatcaaacttccctaactcatcccaggcacaaccagctgtgggagtcctacaggctgagagactcatgctctgcacactcagggctcatcacaccagctagtaaatgtgcagggtttttaacaaccctctgtgtgatttagagtctagctctcttcttttttgttttttgccctgacatatatgcacatcttcattcaaagtcatcccataaatgagtgtactgttcccctcctatggaacatgcctgtacagtaaaagcatcccatatggtgtgagtgcaccagcatcggccatggtttgctgtgaggctggttggcaccaaggagaattagaagaagcaggtggggccagaatatcttcacccccaccccactgcttgttccttcaggcggcctggaggtgggtgcccactgccagaacaagagcaaacaaaggccctccccgtgcagcaataaagagactcaggcttgtgccaggtgtggtggctcacgcctgtaatctcagcactttggcaggctgaggcaggtggatcatttgaggccaggagttcgagaccagcctggccaacatggcaaaaccccatctctactaaaaatacaaaaataaactgggtgtgaggggacgcacctgtaatcccagctactcaggaggctgaggcaggagaatcacttgaacccaggaggcggaggttgcagtgagccaaaattgtgccactgcaccccagcctgggtgacagagcaagactctgtctaaaaaaaaaaaagagagagagagagagagactcaggcttgaaagacagtgctccaagctcttgcacagaagcgaggtcagtcataccagcatctggtccttttccagaatcttgggacagctgtggagctcttcattaatggactgctctaaaagtcacaccatgtgccttccacagaccatcagtgatttcccagaagggcagttccaaatattgatctaaatgtcgcctcagaggagccctttggcataagaaccttttcaaaaccggccagggccccggctggcctagaagaggcatctgaagagatcgcacatgttaataaaggttcttaatctcttggcctcctataatgcagaactgcttttcgattaaaaataaatcactcctggagcttgcatccccaaagcatatgaaataattttgaggcagtagatatcttgtgttggaggagtaataatagccatctaagtttccagcctagtacaaggggggtgattatccatctcaccccactggcactgacatattttctgcacctgtaggagattacaggaggatgggaaagtgtgggagaggctaatcaggcttaattagggaatgcaggatgtcggttttgcttgttattgcacctgggcaccagggctgtcaggctgctgaccgcctcggtgggcctccacactttggtcctgtttgcattttatgagcagcaaacaggtatgcacctaagtaagtgaagttcaagaccaaactcttgaacctagtatctcttacactccgcaactctagcatctccagtcctataggaagcaggcctgtgctgtgtggtatggagcggatgtcccctgtctcctgaccctgacatgcttggctcagggtgcccaacccggcctggcatatgctcatctgctaattattctgggtccacactagactggaagttccataagggtagggacttggtctgagatgtgtccccagagcctaacccagtgcctggccagacagagctctcaaggaatctctgttaaataagaaatagagggctgtgagctgtgtgggcctctgtctggtgacaagcatgggttcttcctgttgggttacagctgtggccacagcagccttccagctactttcatagggcttcatcctttctagaaaaaaaattatatatataaatattttatattataaaatatatgatatatttattatattattataaatacatattttaaaatacataacatatacatatatattttttctttcttttttaaaggaaataaatactttagggactactccagaaccttgcatgcatctgaacttttcttggaaatgtcaccccttttaattttgttttattgtattttatttttgagacggagttttgttcttgttgcccaggctggagtgcaatggtgcgatctcggctcactgcaacctccgcctcccgggttcaagtgattctcctgcctcagcctcccaagtagctgagattacaggcatgcaccaccaggcctggctaattttgtatttttagtagggatggggtttcaccatgttggtcaggctggtcttgaaatcctgatctcaggtgatccaccagcctcagcctcacaaagtgctgagattacaggcgtgagccgccgcgcctggccgttacccccactccttttttttttttttttttgagatggagtttcactcttgttgcccaggctggagtgcaatggcgctatctcggctcactgcaacctccacttcctgggttcaagcgattctcctgcctcagcctcctgagtatctgggattacaggcgcttgccatcaggcctggctagtttttgtatttttactagagatggggtttcaccatgttagtcaggctggtctagaactcctgaccttaggcaatccacctgccttggcctcccaaagtgctgggattacaggcgtgagccaccgcacctggctcattacccctttttaattagtagcattgctcttctctctctgactatacgtactctctctgacttctaaatttatcagcagcttcttctgaagctggcctggtacccggtgagctctacgggactctgagctgagtttagaggagggaaaggcagttgaagggatttcttgttggctacaatgcttagacacctcagggggtgaagcacatgctctgactgttaccagtaagttcccaggccaaccagtgggtagttcttactaccacacttggcttgctagggcttttgcatgaaaatgaatgtgaggacataagatcagttgtggcaggaagacacataactaaccacacaggggaccaacataaaagctgtttcctctggtataggctgactaatgcacgggtagcctggctggggctccacaggcaggaaaacattttgataagatgattataacagtagccataacagtagccaactttattgtgtatattctatgttgtttaattctcactacaggtcctatggttctcctcatttcacagatgaagaaacagtagttcagcaacttgcccaaactcacagaagtaggaagtcacagagcctagatctgaactcaagtcaactggctattccccatgtaaggggtcttattaatgatagtctgcatttgttaaggtgcaggctgagcacagagacctcaaaatttagtggctgaaataagagagaggtttattttgctctcacttagcagtccagaggtgagcagtccaagttggtagggtcactgggctccacatggccattcagggacctaggttccttccatcttgttgccccaccaccacttagagtgtggttcaatcaccaaagctggtcattgccttctctgtgttcctgaccatggggaggagaaagagcaagtctaaggcaagcagattatttcaagtaggtgttgtagaaattgcatacgtcacttctattcatattctattggcataacttagtcatacggccacacctagctgcagggaagtctgggaaatatggtctctatctgggcagccatatgaacagttaaaattctataaaactctgtaactacagaagagagaatgcagtttggggcaatcagtttgcagtctaccataaagaccatcttctcttttgtgaatattaagactgggctaccacaggacagtgttaaatgcattcatgatcatatgcagacatggggtcatctattcatttcataaatatgaagcccttcctttgccggtactactgtagtgagctgcttgggggctgccaagatgcctgattcactgtctcttcctgaggcacagccgggagatgagacatcagccaggaatcaggaaagaggaaagagagttgactggtggatttcattcactcattcaacctggtgtatttacacacatcttgtgctgagaaaggacttgaggtagcccacttgtagtaggatacagctggcaaaatgctgttcgtgtgcgtaatctctttcaccttctcacccactctgagggaggcagggtagtttcagaggagttctggaagcatcagaaatcccatgactggtgagtggtgagggcaggatttggagctggtcttgagggtggtagaaagggcaaagtgcagattcgaagttgggagagtccacattcgaggcccggctcttctgatcctaacgaatagcttcactcacccctggaagcctcagtttcctcatctggaaaactgatgctcaggctacttatgtcaaagggccaggaggaggacctgctgagataatgggtgagtttctggggcacgtagatgctccacagccgtgagtgtcctccctggcttcttaggagcacttggtccctggcaatttgcattacatgttctatgatgtcctaagaatgtgtcctcgagagaacaatgagtccatggactcagggacactgggcagggccctatctaggcctttggtgtttggctccaagttctcccttcatcgtgggaatccagctgcaggcttgaaaggcaatgctcctgagactgctcccctgctctgccctcagcttccctcgggtgctctccagcttggctgcaccacctgtgacctcacttcattgtggacaccctgaccagggccccagtgactggggtacctggaaaggctgtggagcccagcctcctactgataggaaccttcctgcaggtgaggaggatgggaagggcatcctgagtggaggagaggccacacaaaggtgcggggagatgatgtaagtgcagagacatcagtgattttggctgttgacacaacaggaatatggcatttgtgtgagcacagatttgagtgggggaaactgggggcagggtgtggagttaggaggctgttgggattgttcaggctgttggggtaataaggtctgggagtgacagcagagggaatggaaagaacaaatccaagagaagtgaagactcagcaaagggcctgtccaaggaggaagtcctggaacccagagtccagtggcagctccacaagaggacaggcaggggccacagaggcaagaacagggccctggggtcccagcagggtacttcggagccccaggactgtgactcagagcaaagcagaggctgaagctgaaggtgggagctcagagagacgtgctgcctgttttatggcacccaaagaattcacttcatgggctagagtctgacgcatagagaacctgaacaggctcctgctttcctgcatacatagatacgaagaaaagcaaaagagtgattatcacaaaactctggacagtgggttgctcctgcagggagaaaggtatgcactgtgcttgcaaggtgctggtcatgtgctctgtgtctttgactgttagtaggtacatcgggtttccacctgttatgattatttgacctgtgcagatcagttgtttgtactttttaatacatatatctgtttcacaatgaaatgtcacacaccccttgctgctctggatgacatcaacctgggcaaagttggagatgaaggttagagatacactggagaaatatatgctatataaagaattttgggccaggtacggtgggccaggtatggtgggcccacatgcctgtaatcccagcactttgggaagcccaggtgggagaatcacttgactcaggagttcaagaccaatctgggcaacatggtgaaaccctgtctctacaaaaaataaaaatcagctgggcagtggtggctcgcgcctatagtcccagctactcaggaggctgaggtgggaggaccgcttgagcccgggagtttgaggctgcagtgagccatgattacaccactgcactccagcctgggtgacagaagaagaccaagtctcaaaaaaaaagttgatttttatgttgtttgtttttctaatctggaatatttgaggagtctagtgacattccggatgtcttaggcattatatgtcttaggcatataaataaggaatcatagacagccataataaaaggattgtgttcaacctccatcttttcaccctgagtttctattttcaggagccttccagctcagaaaataggctgcatgcggagcaagactagactgagtcttgacaggtcgaggggaatattacttaggagacatggttctcttattcgcctcaggaacattttttttttgcctgcaaaaagccaggaggattctcagctttgcccaggtgttctcagggacagccacacagaatgtcccagaagctgagtggaaagcagtcctgggatacaccctctgcagagggatggtgaaagacaactggagagacgattttgatgcggtcacacagccaacagtgacagtcatgtatgtggcacagcatggcctctcgtgcctggggactgcacagcatcacaggcttctcctctgccaccctgtcctcaagcacaccagtggattgcaggcctcccacggagctctgcagagtgggtaaggcatccgccttccagaacctctcagcttagcaggctgggtaaggcaggcagtcgccccgggggaatgtgataagtgcccaaagagagatgttagcagcatgataaattaggtggtaaatgcaccaggctctccgtccccgtctgtttcaggctggtggatgctggatttgctttcgcacatttatatggaaatacatctttgctgtggcttgtaattttctagttgaataacttcagggtaggcctactttagaatttaattatccttacgctgggagagctttgctgaggttcagtgctcagaagagtgcacgattctaaacattgcgtgacactcaccatagggcaccgttggctgcagtacatcactgttttgagggttgtatgatagtgttcttatgtcctgctgacccaggagtcaagatggactggtctcaaatgaaattctgccctaccactaatcacgcagcagggaggtttctcatctactggatacttaaccaagaggttttgaagccagactgattttggcaaccctaatgcattggctccacagtgcttttttaatgacagtccaagctaaatatgaaagatccaactgcagattcattgtgcactaaaggcttgaatctctaagtagtggtgacatagtcctgtagggaaattgtgaattgaagcttctcagaattaggcttctcaaagccgaggcccaatgtaggaagataatatgtggctgtctagagtgtggtgctgaaaaagggtcagagggcttctgtgttcctcagaaaagggaactgggattgattagtaatatctgctttgagttcaggagcagggacagtggcccaaatgccatgtgtttgtaattagccatttccaagatacctcccaacttctgggctctgtgcagagagtggtggggcggggagggggctttctccaatgttctctccattcaccctcactgcaaagtgttgatgctatttccatgggaagatgttcatggaaagatgttaaggaatcaaaagcaggatttaaaagaaacatacaatgtataaataattacgaacaaattttaatatatttggaaaagaacctggaaggaaatatatcataatgttcataattgttatcactgggtgataagattgtggatggattttgctttttccttcatgctcatctatatttttctatttttgtgcaatgacccatattcctttttaagcatacataaattatatgtgtgagttggtgtgtgcattcttcaatattacatatgtgcagatttggtggcatgcttttttcactttataaattcatcaggaacattaattactcctcctcaatgtaattttttagttactacttaaggtaattctaagccttttgcttcatctgggctgaaaggtctggacagcaacctcatcatcatctcctcatatttttttttaaagtatcaacttttatttagattcagaggatacacgtgcaggtttgttacacgggtttattgcatgatgctgagtttggggtatgactgatcccatcacccaggtattgagcatagtgcccaataggtagtttttcagtccttgcccccctccctcccttccccctctagtaattcccagtgtctgtttttcccagctttatgtccatgtgtactcaatgcttagctcccacttgtgagaacatgcaaaaccccaccatgtttggttttctgttcctgcattaatttgtttaggataaattaatttgtttagtaatctccagctgcatctgtgttaactgtaaaggatatgattttgttcctttttatggctgcatagtattccattgcatatatgtaccaccttttctttatccgatccactgttgatgggcacctaggttgattccatgtctttgctatcatgaatattgctgtgatgaacatacgagtggaggtgtctttttggtagaatgatgtattttcctttgggtatatacccagtaatgggattgctgagttgagtggcagttctgtttgcagttctttgagaaatctccaaactgcttttcacagtggcttaactacctcagtttctaatactagacacacattaactttcttccaaaaggacgagcaaaagataaaaactcaacagaaatctgaaagactctgcagcccaaaggaggggggtatcctgaggaggaggcctacataagactcatagaagagagtcttacatcatagaagacagtgttacatcataaaagacagtcttacatcagagaagagagtcttacatcatagaagatagtcttacatcatagaagaaagttccacatcgtggaagatagtttgacatcatggaagacagtttgacatcatagaagacagcctgacatcacagaagatagccttacatcacagaagacggtctgacatcacagaagacagccttacatcacagaagacagccttacatcacagaagacagtcttacatcatagaagacagccttacatcatagaagacagtctgatgtcatagaagacagccttacatcatataagacatccttacatcatagaagacagtttcacatcatagaagacagtttggcatcataatagaggatagtcttacttcatagaagacagtttttttttttctcctgcctcagcctccttagtagctgggattacaggagcatgccaccatgcccagctaatttatgtatttttagtagagaaagggttgcaccatgttggccaggctggtctggagctcctgaccttaagcaattctctcgcctcagcctcctaagtagctgggagtatagacacaagccaccacgcccagctaatttttgtatttttggtagagatggggtttcgccatgttggccagcctggtctcgaactactggcctcaagtgatctgcccacctcggcctcctggagggctgggattacaggcataacccatcaaacctggccagaagacagccttatatcacagaagacagccggacttcatagaagatagtctaacatcatagacgatagtcttaagtcagaagatagtcttacatcatagaagacagtcttacttcaagatatttagaaaatttccagtaacttccaacacacttcaagaagacttggccaggcgcagtggctcacgcctgtaatcccagcactttgggaggccaaggcaggtgggtcacctgaggtcaggaggttgagaccagcctggccaacatggtgaaaccccgtctgtactaaaaatacaaaaattagctgggcgtggtggcaggcacctgtaatcccagctacttaggaggctgaggcaggacaatcacttcaacccgggaggcggaggttgcagtgagccgagattgcaccatcacactccagcctgggggacaagagcaagacttcgtctcaaaaaaaatgaagaagacttggcatctataaaataagacccacttatgcagaggggaagaaactgacatctgaaaagattccgtgggatctagagcttctctaattatggggaaggagattgtgaatagagagcccttagcccggtgcctggcccataggctctcaaaatatgttactgttatcattcttaaaataagttatattcacacacaacctatttttctaatgttttcccttattaggatttatgccaattggggatttttaacctgcagttttagcaattctgccaagccaggcccttccctgcctctccctagactcatgcaagttacagagtgagacccgaatgtggcctgggagctgctgagccagccaagggccagggcggctgccattctgccacgtgcctggtcgactccgattgctttatttctctggtggagccactgtggttcgcatgttggagctgggaagggttccatctggctcacagccaaggaggaatggagaattccttcagacttaggtaggctgacaatcaacatcattgctcccaagaaaaaatattttgagtcatgacccctgggtgggattggaacccttcagtttctgcccagatgtgcctgcttcatgggaaccagatgtgttaaaaagcaaaacacgggccagaaaacctgccatgtgtgtaaagaggctgtctggagcagtcttcccaagggcccgcatagctttgcatgttctccagtggcttgactgaggaaaccctaacatgcacacgcaggagaggcagcctagagaagtgaactggtacctaccggcagcttttcatcttcaaagcacttctgcaaggcagggattttttttttttcttttgagacagagtctcgctctgtcactaggctggagtgcaatggcgcgatctcgtctcatcgcaacctccgcctcccgggttcaagtgattctcctgcctcagcctcctgagcagctgggactacaggcgtgtgccacaacacccagctaatttttgtatttttagtagagaacggggtttcaccatgttagccaggatggtctcgatttcttgacctcatgatctgacctccttggcctcccaaagtgctagaattacaagcgggagccactgcgacctgccaaggcagggattattattcctgttttccaactgaggcacttgaggctgtgagtgactttctcaaataacaaggcagggttcatcacacagcaatccctttgccattactccagcctttctcgaacccctgtccctcagatcttagagatgcatgtgtggaccacagcaatggacttttggctgtagtcttggtctgggcaagaaaaaaacgtggatgggttgatataacacaagtatctgaaagccagattgatagatgtaaatttctagagagaaggacctagacatatagatttgaacttagtgagtggcctctgggggccgggatgctgcatgtttgttcgtttgttttttgagacagagtctcgctctgtcgcccaggctggagtgcagtggtgccatcttggttcactgcaacctctgcctactgggttcaagcaattctcctttctcagcctcccgaatagctgagactacaagcactcatcaccatgcccggctgttttgtattttagtagagacggggtttcaccatgttggtcaggttggtctcgaactcctgacctcaggtgatccccctacctcggcctcccaaagtgctgggattacaggtttaagtcactactcccaacagatgctgcatgttaaaggactcatgctcctcttgccttgagggcagaacaaacacaaatggagccgatgcagttcaaggaatttccataaaaggcaaggaaggaactccgggcctcaagagtttaaaactgagataaacagcccatgttaatatttgagtgtcctgtttcacagttttgggaggaggctggagatgatataattatggagttcagtccacagcatgacatatgtaaagcacttagctcaataagcattccttccctttcggggtaggggtcggggtagggggatcttagagatgcacagatactcccaatataaacaaaacataatcaactgcaaccatgtagaatcatcaggacatgaaatgtgagctgaactgtggttagcctggaggctgcagatgcttctcagagagctttgaagcaggatggctcaaagacaaacaagaagtgagaaagaaaggagggagagaggaggcggggtggccctctagtgcctgggacagagaggtgtgcgggaggagctttcaggctcctttaggactctgatctttcaatgatctgaagaaagctcatactgaaaggtaaagctcctcacacagggaatttgggagtcaggctctgcagttttcttctatttctgggagcacttatttcagcagggcatttgcaccaaaggaagaggaagcctcctcagacgctgggccggccataccctaactaagcatgcactttgggcaggcacagcacaacctcagctgcagtctcagtggtacgggtggcatggaagactgggtgacatggaggactgggcctcaccgcactggggccggctaccccctggggttgccatcagagcaagttcacacaccagcccacgggggaactcgtgggatctgtcagtgtgagcggaagaaggatcaggctcctagactagggtcccccaggaagtgggcaggctggctggacttcagtaggagaactgagctagaaatccaggcattctggtgtgggggaggcaagaggctgcggggcaggctggagtcaggctgtgctaacgggaaaatagggagtcagggaaattgtttcccatgcgacttccgtaagggcagtggaccgggtctcattcaactcaggattctgaagtggcttcacaaaatacgcttagtgttccttacggacgaaggaaggaagaaaggaaggactaacagtgcctttatttcaggattgtccaatctatccccctccctccatctcatctcctgctgccatgag

SEQ ID NO: 325 - DNA, 32742 bp, Homo sapiens
  source 1..32742: mol_type = other DNA
aggcggagtcggggagggctgaggtgggcctgaaggcagagtcgaggtcggagctggggacggagtcgagttcgggctgagggcggagtcggggcgggctgaggtggtcctgtgggcggagtcgaggtcgggctgagggcagagtcgggtcggagtcggggcgcgctgaggtgggcctgggggcggagtcgaggtcggagctgagggcggagtcgggggcggggacgtaggcggaacccgggtcgggctgaggtgggcccgagggttgggctgggggcggagtgggtgccagcctgagggcggagccgggggcgggcgggggcgggctggggcgggcctacaggccagactggtgtggcacggagctgaggaccggccggagctttgcggagggcccggcttggcgggtccgggggggagccgaacccgcggggcaccgggtccgggcggggccgagccgggccggggcgggagccagccggggtggggcggggccgaggccgaggcaggcggtcggcagtgctgggggttcaggtgttgcggcggctccacgtagccaggcggcccgtgggctggagcgggcggagctcggcccgcggcttgcgtgagctcaggccggtcccagcgtccagagcgccggcccttcggcttcttctaggccatggcagggccgggcccaggcccgggggacccggacgagcagtacgatttcctgttcaagctggtgctggtgggcgacgcaagcgtgggcaagacgtgcgtggtgcagcgcttcaagaccggcgccttctcggagcgccagggaagcaccatcggcgtcgacttcaccatgaagacgctggagatccagggcaagcgggtcaaggtgggaggccggccagggcccctggaaggcgctccctcggagggtggggcgggggcagcggagcccctggccgcggcgagcgcaccccgcgtccatctgaagtttcctttggcttcccctttttccttcctcgggtcggagcaggcctgggccccggggtctgggccgggttcaagtcctcaaagcgccggccgtgggttgctggggggggggggggcgagggagtgtggaggaggcggccctgccctccggagctcacaccctaggaggggactgtgctccaaaataactttagccattggaaggcagggggttagactcccctgttccaggtactagcggagcgccttggagtgcggagatcagaccccccacctccatccaccgcgatggcagcccccagctcagcccaccggcggggcactcagccagagaactgcatccccaccccaggactaggagcgatcaggaagtagttgcttttaggaccagagggccaaaactttttgtcagaatttccggcctggccacgcctccctgcagtctctttgtggacctggtggtggaactttactcgactagggccagccccggttccctcccccagctggagtttgatagaaactgaaaacttcacagataccggaaggtgggggagagaaccaagctttggcaatggctccgaataaaaacagcaggatgtggttgccacaatgtcctggcagtggtttgataaatatttgtgatgaatgaaatcagagtttcttaacctaggtgttagtactccctaatcaaccaggagatcctgggctgaaggcactcagtaacttttctgaaccgcactgtacagaaatctttgcttgctttcatggtttcgagcccccatgatcttcaggacaccctcagggcacagggctgggacgatctctgccagggagatgggagtcactggagccttgctgctgctgggctctgcctctccgggtggctctaggcctgctccttgttgcctttggctaggatatgtagctctttgtctttgtttctataaaattgggataatttctgggtgttgcctccctcctgccccaaggtggagaaaaaagtaagtcaacagtctttatgtgtccacagtgcctctcagtagatgtgacggggaagcagaaactcctgcctgaggggttttattattattatattttaatcgtcttctggggtctgtgttttggtctccgtggatggaaaagagcaaggtgcagaaggcagctttgagtcactcgggaccacccttttggagcaggtagccagggaagggctggagtgggtggagtgtccgttattgagtgtgcccagtgatgatgccagcagctgcagggaaatgggagtgtgaaaatacaggctaaagagcagtggtgtcctcctcatgtgctatcggtctgtgtctggagtgtctgtggtggcccagtgctgacggtggtcagggagggggcagggttcctgtttacctgttgagataacagactgtgtcccagcagagctcctggtttactgcgcacgggttatgcaatgcagggccaggcagttcgttattttctttccttatggttgcctccagattgtccttcctaggaagcagcccggggcccagggagcagaagagctgtgtagctgtggtaaacacctctccaagttatagccgctgaccttcttgagaggctgttgggaatcagctgggttacaggtgcattctctgctgactggagggaattcttacccccgctcacacaggatggagcctgggcacacagctaagaagtgatagaggtgggaatatttttcccagtttttctgactccaaagcagatttctcccccatagtggacagcttttcagaatcccgttgtctgtggtggggaagcctctggcaattgtttaccacctcattttgccggcaggaaaacctgaagtctaactcactgcagaggctccaaattaaagctgggcagccgtgaacttgagggaacactgtccttcgagtcaggcttcctggggtccgctgccgcagcaggagcaagccattttccctcctccatctgtaaagtgcctctgagtagtcttttggcaatgtgattttaagtcaagttttttgaggtctaatttacacacggtaaaccttcaccacttgaggtgttacaggtctatgaacttctcaaacttacacagacaagcagccacatcactatcaagatggagaatttttccaccaacccagaaagttcttttgttcttctgtagtcagttcctttcacctcatcctgtggcaacccccgatctgttttttgtctctgtagtttcagcagtgtgattttaactgaaagccttgatgaaccagagcttattgttgttttttctgtggaaagcaagtgcacatcagggattcagtgtaaaacctttccaggggccgggtgcagtggctcatgcctgcaatcccagcactttgggaggccgaggcaggaagattgctggatgtcaagagttcgagatgagcctggccagcatagtgagacgtggtatctatttagaataaaataaaataaaccttctcagggcctgtcttgggaagcccgagatgcttgtccagcaagcatccagtcttatatcctaaagctttccctgtgattctttacaatgatgctgggttttattagagcttcaggaagcttagagatggatcacctggtggttttctagctcctgtgagcttggaggtactgaaaggtaaggagaaaagccaagaggtcagagagagggtcagaagggctttaactagcttcccaaccagtcagagcaatacctttatctagttgtaggttgaaattcttgttatttgactaaagaattctcctgctaaaaaaaccgaaacatttgagaatcacagatttaatcaaattactttatttctgtagccacttcccattacaaccagaataacctccaaacaccttccccaaagagatggacctctggaaggagacaaagttggagaggcagacagaggcccatctctacccttcactgcctgctctccagcttcactagcccttcaacatggtgggcttacccctgcctcaggacctttgcatctcttcccgtgcccatcatactctgcctctagatccccacgtaactgctacttcatcattcaggtcccaacgcaaatgccacatcttcagagaggccttgcctgatctcccaggtcctctattctgtaactctattgtatctggtcataacacttaccacagcttcaaattaactgtttttttctgtctgcccctatagaaggtaagctccttgaagacacagggatccagtgggccagtgtcaaacacatggtgtccaatatgtgcctgttaattggttcctttatagagagaaagctgaggccaaggtcacttacaactctgtggcaaaaccaagggtttggctggctcctaagcccagtcttcatttttacttgaccacccttctgatttgctctgagttcataaagatgaccgtgagattctgaaagtgaatggatctaataaaaatgcagttgtggccattgcattcactgagagaagaatgtggaatggggcattttagaaagattggggttgacagttaaagagttttagggtgtttggtttattattaaccaaaacgtgtagatatacccaaacggctcagagacactgctgtacgagtcagtaaggctttgtatatggtgatcatttccagtgttcttgtggatgcatttgactgtagctatgagaactggacttataaagtgaatctgagtgctgcttatcttgcatactgtggagtctctgacagagagcactggactaggagtctgaagttctgagtcttgcttcaaccctgccacagacttgggcaattcattttttttctccttggagcctcaggcttcctcatctgtgaaatgggactaatggtctttgctctgcctctttcttagggttgtcagaaaactttgaacatgcttaaaataaagtttccatgacttacttttgaatagataaaccattcacatggttcaaatttcaaaattttaaaaacttcaaagggtatatatagtgaaaagtctcccttccgtgtttgtcccgtaagccacccagtgtcctctaagaagaagccatcagtgttactcatttcttatttaaaaacaaggatttataaatatatatttttttattgctgcagttactgttttcctccctagatgagacagattaggtctgaatttgcccctcccccacccctccctcctccccacctcagtgtcctcaggaaatctcagctggctctaaatccttaaaacattctgaagctcctctactcactcttatctgggacaacacaaaggcctgttatgtaaactcgtttttgcagatcactaggcacaccggcctcaagtccagcgcagaggtcagccttatggaactgtacccctctattcagctctctctcaggctcactgtctgctcgctagggatgctgccagatctctccttcatagaggtaaagtctgtgcccttgggcctggacctccagatttcaggacctttggccttgactctcaagcttccccttgccctaggagtcaaatttgtttttgtagctgctcctggcacttcaaaaagagggggcagggcgggataagaggaaatggtttctggttaaagtttgcattcacagtccttccaatcaagagtctagttctgctcatctgttcttttcctatttggataaagtttgtttgactttttcagttttcattagaaatagcaaaaggactgttagataagaaagaagttctaggtcgtgctgattttctgaagaaatctgttcttgataccagggacagccatcctaattgcaaaataaaccttgcctctcgaggtttcttagaatcctgagacagcatgtctggtggagagatagtggaaagagggccagctttagaactgcacagcaccaggttaaatcttatcctcaatggatatgttctaagacccccagtggatgcctgaaacttcagatggtactgaacgctatatagactatgttttgtcttatacatacatgcccatgataaagtttaatttatgaattaggcacagtacgaaattaacaacaataattaataacaaaatagaacagttataacaatatgccagcatcgctattcctgcgctttggggccattattaagtaaaataaggattctttgaacacaagcactgtgatacagtacatgctggacaaaggtatgattcacatcccaggtgggacggagcaggatggcgtgagatttcatcatgctactcagaatgatgtgcaatcgacttatgcattatttctagaatctaccatttaatatttttatttgtttttttgagacagaatctcactctgtcgtccaggagggagtggagtggtgtgatctcggctcactggaacctccacctcccaggttcaagcgattctcctgcctcagcctcccaagtagctgggattacaggtgcccactaccacacccagctaatttttgtattttttggtagagatggggtttcaccatgttggccaggctggtctcaaactcctgacctcaagtgatccacccacctgggtctcccaaagtgctgtgattacaggtgtgagccaccgcgcctggcctacttaatatttttattttttattttattttttgagacggggtttcgctcttgttgcccaggctggagtgcaatggcatgacctctgctcactgcaacctccgcctcctgggctcaagtgattctcctgcctcagcctccttagtagctgggattacaggcatgcaccgctgtgcctggctgattttgttttttgttttttgttttttttttagtagagacaacgtttcaccatgttggccaggctggtttcgaactcccgacctcaggtgatctacccacctcggcctcccaaagtgctggaattacaggcatgagccaccacgcctggccctacttaatacatttagagcaaagttgatggcaggtagctgaaaccttggaaagtgaaaccatggataagtgggggatactgtaccataggcatgtgactttacctcttcaaatctgtcttacctgcaaaacccctacccttaaggacctggcccatagtggatcatccacagatgggaactgatgttggtgtgtaaccacctgatgagagagagtggattgcggggggtgggggtcaggaagcttggtttctcagcctagttgcccagctgaccgtaaacaagtcacttcattgacctgttgtcctatcagtaaagtgaagacaataaaggcaagagactggcccctgtggctatgctcgtactagaaatagagctatacagtgaccccaaactgatcagggattgtgggaagtagaggcacacaaggcctttaccaccttttgtctccatgctgtgactcaggatatccacatgtctgctttccttgctttcctcttgttcgttgtttagcccttgtaggtttctttaccttgcactggcctttgtgtagtgctcgggctgtgattggcctttgctgagacctcatgctaggcggttttcctgggtgctttgggtatgaggaattctcagagttcagtaataagaggagcaactctccctcaaatgtgcatgcgttttataagtttccatcgcttttctcatgagttgttgcatttgatcctcatagccaccctgtgggagactatccccatcttacagaagaggaaatgaaggcccatttgtggcaaagtctgaaccagagccaagcttttcagctcctagtctggtacttttctcctcattgctgtcttgtgccctctcctactaccgcaaacacacacaaacccacaaatgaaaaaagttgggactgatttaaaatctaggccatcttgtattgcttgcattttacacattgattagcagtgtcatgtcaacattttaatgcccagtacttattaaataaatgtttattaattcagatgaactgggggtagtgttcggaatggccagtgtgaatgacagaaaaatcccactttctagactggcctgtgaaatgctgttttattgttgatgtggcagcagaagctaaccaaatgctgttacataccagatctttcttttttttttctttcgagacggagtctcgctctgtcaccaggtggagtgcagtggcgcgaggcgtgatcccggctcactgcaacctccacctccctggttcaagcagttctcctgcctcagcctcccaagtagctgggactacaggcacacaccaccacgcctagctaatttttgtatttttagtagagacggggtgtcaccatgttagccaggatggtctcgatcccttgacctcgtgatctgcctgcctcagcctcccaaagtgctgggattacaggcgtgagccactgcgcctggccacatatcagatttttctaacctgctttgggttcatgaataaggaccgtttgccattaatagctcctatccagataccattaaaatcagctctcctctacttgcaccagtttgcctcgcaaatctcccttttctggattggaagaaggcaaacttaatcccagaagcggtgtgtgagcactacttgttagaggttttcacctgtgctcgtgaatgaccactctgaaatcccaaaaacagagtgtggctagagagtaatgtgactggtgttcaaaaatagcctagggccgagtgtagtggctcatgcctgtaatcccagcactttgggaggccgaggcgggccgatcatgtggtcaagagttcaagaccagcctggccaacatggtgaaaccccatctctactaagaatacaaaaattagatgggcatggtggcgcatgcctgtaatcctagctactcgggaggctgaggcaggagaaccacttgaacctgggaggcggaggttgcagtgagccaagatcgtgccactgcactccagcctgggcgacagagcaagactccatctcgaaaaaaaaaaaataataataataataataaaaataacctaaaactcaaacgtgtatatgagtgctatccctttcagagtcatctctttgagtaattgtatatgcatttcccgaaggtttcatccgctgtgatgctgtgttcagaaacttctctagaacctgcacctgctttggtgggtattccaggggtgggtttgataaataaaaacagtcaaaagaagcctggacaacataggaagacctcatctctacaaaaaaattaataattagccaggtgtggtgatgcatgtctgtagtcccagctactgaggaggctgaggcgggaggattgcttaagtcccagagatcaagtctgcaggtaactatgaccataccactgcactccagcctgggtgacagagtgagaccctgtctcaaaaaaaaaaaagcaacaaaaaccagcctgcctaccataatgttagcagttcttctgtccaaaatgaggtctggctataaaataattctggttcatgttaggcaattcctgtatgtgctgggcactggcagctgttggagtaagtgtactgccttctgaggtgacgtctcttaaagggggcaaggtgcattttgatttgagagacctaaaagcctggccttcagctaacagcatgagggctgggagtcatttcccctccttgcatcagtttcctcactgttgcgtgatgaagtgagactgggtgatctcagaagcctctctaggctctgttattctttgaaaaaaggcccttgtcatttcaagccagataacctccatgcccaccatttttatggccatggagtataaaaattggatatttttaaaattaaaaaattctgtttaccatttccaattaaaaactttgattttgggggttttttattcttgactttttttttttttttaaacagggtctcaaggtctcactctggttgcccagaatggagtgcagtggcatgatctcagcttactgcaacctctgccccttgggctcaggtgattctcccacctcagcctcctgagtagctggaactacagggcatgcgccaccacgcccggctaattttttgtatttttagtagagatagatggggtttcacattgttgcccaggctgatcttgaactcctggactcaagaaatccacctgcctcagcctcccaggagtgctaggattacaggtgtgagctgccgtgcctggctttactcttggcttttaactgtgtgtaggtccataaatagtgggtgatttcgtgaccaaaaaaatggatcttagtgtcagagtaaacttcagtttgctagttaggaattgttaatatctgtcatgtttatatatttttttcaatattcccaataagaataggactctcatgtttatatagaacagaatcaattttatgaaatacatgaaaattctatgaaatatgtagaaaaatctcttagaaaaaaatcagttttattattgaaatctcaaggccaatacttcagtgtaaactctgacgctacagttttctttgggtttctttcccagaataagccctcaacatgtgttggctgcatgagtgggagagtgaggagcaggatcaacatctgatgggagggtgctgctggatcccatggctggcagcacaggtctcttttttttttttttttttttttgagacagagtctctatcacccaggcggagtgcagtggtgccatctcagctcattgcaacttcggcctcccaggttcaagtgattcttctgcctcagcctcctgagtagctgggaccacaggtgcacaccactacgcccggctaatttttatatttttagtagagatgaggtttcaccatgttggccaggctggtctcaaactcctgaccttaagcgatctgcccacctcggcctcccaaagtgttgggattacaggcatgagccactgcgcccagccatggactcttgaagctctactagaagctctactagaagagttcaggaaagggctggagggcaccctccacattttaacagaacacacggagggagaaatgcatgtgaagtgaaaaaaggagaccacctaggaattcgaggagtcccctacccttgggaaggcgcatggtgatgggtggaaggtgaggtgtgaccagataggcttggggccagtttgctgtgcatttgtggtacaagtgcatacatcaacagattgatattttgctttccctgaattatcttaccttactatcctgtctaaagtagcactctcccaagttccttaaaaaaaaaaaaaatctttatggagatataatccacatatgataaaaattcccccacttaaagtgcgtgattcagtgttttttttgttttttgttttttgttttttaatatactcaaagagttgtgcagtcatcaccacagttgattttaggatattttcatcaccgcaaaagaaacctcatcaccataagcagccactctcacttctcaatccccaccaacccctggcatttttaatagagacggggtttcaccatgttagtcaggatcgtcttgatcttctgacctcgtgatccgcccgcctcagcctcccaaagtgctgggattacaggcgtgagccaccgcgcccagccacagaatgttttcaacattatgcccttacttgccttgttttgtttttttgtcctagtactttgcattgccccaagtcatacttcacttgtttgttactgtttgcttccttccaccctcaggcactcagcgctgctgggcatggactttgtcttaggtatcaaagcacttggcacagtgtactttaccttttggttattgaatgaatgaaggcaggcaagaaggaagcatactctttccccatttatccagctacctcttggcttgcttttgttgaattgatcagttctcttccacgttgccttctagtaagttggaaatatagtgctgtttctattgattttattaagttttaaattcatgtttaaatttatctaccaggatctgtttttttcacctaaagaagacaagaaccaccataatcccaacactttgggaggcagaagcgggcggattgctacagcccaggaatttgagattagcctgggcaacatggggagaacctgtctctgcaaaaaataaaaaaattagccaggtatggtgttgcttgtctgtagtcccagctactcaggagactgaggtgggaggatcacttgagcccaggaggtcgaggctgcagtgagccaggatcgcaccactgcactccagcctaagtgacagagtgagagcctgtctcacaaaaaaaaaggaaaagacaaaaccaagcacacttttactttctcctcattgcccattccaaaattttttttacattatgtaccaagttacttagacttaattctaacttttaatattattattattattattattattttagatggagtctctcactgtcgcctgggctggagtgcagtggtgcgatctcggctcactgcaacctccacctcccaggttcaagcacttttccttgcctcagcctcccaaggagctgggattacaggcgcccgccaccatgcctggctaatttttttttgtatttttagtagagacggggtttcactctgttggccaggctggtcttgaactcctgacttcaggtggtccacctgcctcagcctcccaaagtgttgggattacaggcatgagctactacatccggcaacacctcctttttttttaaatgacattgattttttttttttttttgagacggagtctcgctctgtcgcccaggctggagtgtagtggcgcaacctcggctcactgcaagctccgcctgccaggttcacgccattctcctgcctcagcctcccgagtagctggaagtacaggcacccgccaccacgcccggctaattttttgtatttttagtagagatggggtttcaccatgttagccaggatggtctcgatctcctgacctcgtgatccgcccgccttggcctcccaaagtgttgggattacaggtgtgagccaccgcacccagccaaatgacactgattttttaaattaatttacagatcagtacaagccatgatttttttttttttttgtaggagtcaccttgtagttttttctcatggtttccttatgttgtcttttcacttgtttctttattccttgtatttcctgtaagctagaaatgtggggactcgatgagcctaaagttaaaccattctggcaagaatgcgtcctaggggatgttgtgggcttcatcctgcagcacaggaggcagcccccggtgccacgttccatactagtaatggggcctgtttgatcacctggttagggtggtgtttaccagctttctccatttctgttgatttctaaagatttctctttgttctttggacttatttcttgatcgcttaagagccacggccttccatttggagcaccagaccagttgaaatagggctaaaagggaagaacccttggaacctggaaggtggtactctgtcgagcttagttatggttgttggctgagaattacccatctgacaccctgtatgtaaattacatagcatggcaacttgtgcatggtttatttgttcattgattccttaggtacctgctctctcccaggcactgttctaggtaccagagagagaaaggtaagtaagaggcagtctctggggactcacctctggtggagaaaatatatgtagacaggtaattagcatgcaatgctattaatgctgtggctgtggtaactgaggcttctgaaccaagagttggactgcatggcctgacaagtactcatctttcacctccacacattgtggcaacagccagccaaacatggacagtcagggctgttcctggaaggcagggccatgtggctgccgtggctgtcctagggaggtgtgctgagttctgtggagcttggtggggggctttaatccacactcctcagggccacagaggcgtgaaggggagggaggccctggaagattcatgagagattcctagggaagtgagatgggcagggctttgaacgccatggctgcctctgtgcagagctgtggccctgggagggaggagtgtgatgtttgtctaagctgcatgcagctggagaatgggggcagatgagagcatggcaaatacgagggccagcctggtggcactggcaggctgtgggcctgggggccataggcagcgaaacagccagctgtgcctgggagcccggggaggagggtttgctctagagagttgaagaggtgaccgagtggcttggagggtgagggtgagggactcgtgaggccagtctgggccatcgttgatgaccaaagtagcagggaactggagggatggtttgagggttggggttgttcagtgtgggccataggacatctgaatcccttgtgcctgggcccttgcagcggaggaatttggggaaaagaggtgtggggtttacgggaattcttgtggaggctgtgagggctccaagaggctgtctaccagggacactggcacttgcagccctgactctgaggatgctgtcaatgtttgctgaaaacccttcctgatgggccccccagctgagcggtgcccaccgcgagctcctgcacgctgccttggtttcctcattaccccaaatgtttccctggtgctgaaaggagcctgcaagcaagcaaggtgtttgggtggcagcaggctggtcgtggatgcccttagcttcctgcgaggaagaggaatacccggaagaggtggcacttggcaagcagatgaggcaggacttgttggccagaggccagggtcgtttcccacagtgcacctttttctcatccaagctgttcaggaacgggtttgattcctgcaggaggtgccagtggcagtgagatttcttggaagcagtttctatgtgcttgcggaggagccgcgtccatggtaaaggacaccaggcttcggagtcagacagacctctgctgatgcttcattcctgtgacccctcagacataaggagtaatgagacccaccttctagggttgtcacgggatgaagtggcctgacacacagggagcactgacagacagtgccaggtgcccacagaactctgccttcctggctttcatggcctctggccccttgctttcaccaggcctgcaaaacgtcgtgggttactgtgcttcctgggtgactggggaggaaacttgaactgcgagaagctgacagggccatccctcatcacgtgctggtggagtacaggaacaggaacgcacatcctggatttttcttcactctgcatcgccaccaagcctcccaaggagagctgcattgtaacaagggacaaagaaagccatttctcatgctgggccttcaggcactcatttttaagaggtgggaggaattttgggcatgagagtctgtcctggtcctctactcccctattgcagaggagaatttgtgcccccgacaccagactgcatgcattgcagtctgctctgcctgccgccagcctgtgtcgctggtccagcctggtcttacctttcttgtccttgctttggtctctctccacctgtctggccagatggtggcaggctgtgtccttagctggttaatatgctagaggttttgctgtcttaccatggtgcttcacagtgcttcactccctggcctgtggcctgcttgtgagcccagggccaaacctttccctggaggaccacagcatggtgggaggagggacagcggcagtcaggagctcgcatggcccacaaactccacctcctggtttgacttaccacatcccaagacacaatgaaaaatagctcaggaacttgtatttgggtcagtctgaccagttttcagagtttgtcctgagaactaacttttccaaggtccctctctaatatgaagaagcaaggaactttccactgcctgcttcgttactcaggagaaagtcttgtcaagtaaaaccttcctctgtttccattgggagggacagatgctggacacaggtcccagagccgaacttcagtggtgcttttaacctagtaagcaggattgatttcccactggggcacatctgaactcactcagtgggaacgtgaactaggaatccctggaaagcagctttcagccctgctgcacgggcctgactactgggacctgcccacagtggactgctgatgtgttgaggcccttctctgtgcaggcactgtgcaagtattgatggtgccaagaggaataagacagggtctttctcctcagggaacccattcctgatggcaagagagggacataggaaccaggagccaagtggtagcccgaggtcaatttccactacaaagcccgctttttgtttgttttttaatgttaacttttttttttttttttgagatggagtttcactcttgttgcccaggctagagtgcaatggcatggtctcggctcactgcaacctccacctcccaggttcaagtgattctcctgcctcagcctcctgagtagatgggattataggcatccaccaccatgcacggctaatttttgtatttttagtagaaacagcgtttcactatgttggccaggctggtctcgaatcttgaccttaggtgatttgcctgccttggcctcccaaagtgctgggattacaggcatgagccactgcgcctggccctgttttttttgttttgttttgttttgttgttgttgtttgttttttgagatgaagtttcactctgttgcccaggctggagtgcagtggcacgatctcggctcactgcaacctccatctcccaggttcaagcagttctcgtgcttcagcctcctgagtaaccaggctgacagacatgtaccaccatgcccagctaatttttgtatttttagtagagacaaggtttcgtcacgttggccaggctggtcttgaactgctggcctgaggtaatctgcccacctcagcctcccaccctggcctaaagcctgttttgtttggccggcagaagggtggttggctggtttgttactattgaacttgttttagatagcatatccttttctgatagccagcgggtcccacaagtcctgtctccttactgccttttatgtcacttgtctggccccaaagcccaatagtgcgggacattttgacttagatggataacccattctgtgatgtgtgttgttgtaggggcaagagtaaagagctatgggaacatgaaggaaagaagagttaattctgctcagggttggaccacaggcccatggtgtcagggaaaatgagagacttttgaactggggtcctgaagggtaggtaggagtgcaccaaaaggttaagatgaatgcagtttatcccagaaaagataacggcgagaacagcactgccttgtcatgagtgtggagactcagagcgtagtataagctgggagttatgtttagagattagaagaggaaagaagccttatccctcacccaacatgtgcttcccgactgaggcagcgatgggcaggactgagcccttctgtcaccaaggtgaaagaagggcctgaagcccaggactgaaacccttgcagccttgaaatccccaccccatatgaaacttacctgccaacccttgctgagtgggagaggagggggagtgctgcttttctgagcatacacactctgggagcccttttcctccctaattaggccttacccataccctctgggtccagtagatgcttctggacttcacctttccccgaaagtcaattataagacaagcctgctgggaaaagttcaaatagctggtgatatgctaggtgagagggcttggagctcattcacagtttacagtccctgttggctggtcaggttagtggctggtcaggtgagtgtgcaggaggagagcttgggggtgggggatagagaaagtgcggtttccgctctcaacttggcagatgttttcagcagtttaaggttgtttatgtcccctgggcagtgaaaaacaccttagccataacaatgtacagctcgctcagctgacagtgtaaaaggttcacggggcaaaatggtcctcagtactctcctccagattatgtttctgtcgggcaccttctacatgccaggcactgtgctaggtgctatgcagattgcagaaaactagcctgatgcagcccgtgcccttgtggaactcatgaggcagagaaagtaaacctttaaaaagtgtgtgtgcatgtgtgtgtgtgtgcatgtcaggcagtgacgtgcactaaagaaaaataaattggggttgggacaggatgggactgctcttttaagaaaggcctcttggccaggtgcggtggctcgtgcctgtaatcccagcactttgggaggccaaagcgggcagatcacctgaggtcaggagttcgagaccagcctgacaaacatggtgaaaccctgtctctactaaaaataaaagaattagccgggcgtggtggcacacacctgtaatcccagctacttgggaggctgaggcaggagaattgctttaagctgggaggcggaggttgcagcgagcagagatcgtgccactgcactccagcctgagtgacagagtgagacttcatctaaaaaaaaaaaaaagcatagatgggaatgaatgaggaggccagtcacatgggcgtctgggagagcttttcaggcagggaacaccaaggacaagggcctcggtgcagaggccttggagtactccaggaatggccagcaggcagctagaggcagatcctggggttgccacctaagggttgacggcagaggagttacaagatcctagcactgtttcagaagctgcattgttctgtgtgcagaaaatggactgggtgaattggaggtgtggagacaggcctgaggccgtttgtgtagaccctggtaagaggctggagtggcggtagggaggtggggataagtgggtaggaggagggcacagctagggcagatgcagtggggacttggagcccaagtgtccctgctggtcccagcctctcccaaggcagagagacagccagcctggagtccaggactctgcgttgggatgccttggccgagtcccagcgcccctcagagcctccctcttttctctataatgtcggctcctggtctctgcctgcaggcagtggcaaggacgagtgagatggccgggacccccaggagtccacagggtgggtctacttgccttctgagacactgagcctaggcctggcctctccaatagatggtaagatggtttctggttgctgtgtcttgtcacctgcctgtttcaaaagtaacgtagttaaagtgacagatcagaggcattcagctctcatccagcctcccttgggtgctgcctaatgccagctggcttggttggggtggggaggggtctggtctggggaaggggctctcctggcttggcttccgcctcctcttttggaatatagtaggcatgggtgaagtgatcaagctgcctgttacactaattcctctctgtgatcccatgacaagactgctccacccagtgacctgagtgatttttttttttttgagatggagtctcgctctgtcacccaggcctggagtgcagtggcactatctcggctcactgcaagctctgcctcctgggttcacaccattctcctgcctcagcctcctgagtagctgggactacaggcgaccgccaccacgcccagctaattttttgtatttttagtagagacggggtttcaccatgttagccaggacggtctcgatctcctgacctcgtgatctgcccgcctcggccttccaaagtgctgggattacaggtgtgagccaccatgcctggctgtgatattttaaaaacaaaccagagcacatcttgtcttagcccaggcttcccgtggaaaacagagccagagagaagggctcacatgcttagcttttgttttggagactgacctggagaaggaggcaaggcttagatagagctgcatctttcatttagctgccatgggcagtggtcttgaccctgaggactttacaaggtgcatgaggaatgtgtctcacagtggtccctctgagaggtgggagagaagagctttatccctgttccccgttggtcacaggtgatccctagggtgcggaggcctctctcttctgggtcatggaggcatgagcacacagtgctttccggcaggcctccctggccagactcagagatgctcccaggcagggagtgaggggcacggtgtgggcaggcctttgtgtgtgtgcaaagctggttgctgcagcagtggctggagtgcagggtgcgctgataagatatgtgagtgggagaaaagaggagactggctcatatttccctgcctgagacaatctccagtggctttacgttgcaagaaaaatgaaatccacactcttaactttggcctgcaagatcctatatgctctggctctggcccatgtctctgaacgtgtctcctcccagtttccttcttcacggccatctggccacactgccctttccatgtctctaacacggtaagcattctcctgcctctgagcctttgtcctgttcccctgcctgaacaccgtccatgtggttggctcttcatcactcaggcctcagctcagacacttgctcagatcatcaaataggctggcatccaccccctgtgctgtctgcctggctttcacattctgtagcgtgctcatgatcaccttctaaaaggatctgtggcacattctgtctcctcttactaggatggagctggttttgctccgttccctgctatatccccagttaccagagcagaggctgggacaaggcaggagctcagcgcatgttgaatgaaaaatgaacgactcatgtacacagcctagtatgtttttcttttggtactatatgtattctcttttgcatttaagttcctttgtgtatattaaaaacatttgccacaaaattataatagctcagtaaatattgttaaacggatgcatttatcagcaccttctccatgctagcacttgggcacatgggtttggtcatttgactctgacagcacctttttgtacggatgaaaaacagaatggccgggcgcagtggctcacacctgcaatcccagcactttgggaggccatggcgggtggatcacctgaggtcagaagttcgagaccagccaggccaacatggcgaaaccctgtttctactaaaaatacaaaattagctgggtgtggtggcacacgcctgtaatcccagctactcgggaggctgaggcaggagaatcgcttcaacctgggagacagaggttgcggtgagcagagatcacgctactgcactccagcctgggcgacagagcgagactcgtctcaaaaaaaaagaaaaacagaatgaagttttagcctagagacacaaagctggtgacagagcatcaggtcatgagctcaggcttgttggccccagcgtaccaccgctaccctgtatccttcccttcctctaatttgggggaataggatgggaatactaccagccatgggaagggtctactttcccaaaatatcttctccattactgcccacagttcaccagctggttggcctacataccttaatcagtagttattttgttggtttttcatttagtttttattttaagcaaacttaacttgtgtgtggtttgaggagtcatttggttctacaaggattggtagcagaaggtcttaggatattgccaaccccctgccctagagcagccacttccacctcttcttttgaaatagggtctcagtctgttgctcaggctttagtgcagtggtaccatctggcatttcttgcagggcagcttttttccaaggagcttctctctacttccatttatctgcaaacgtcttgatttcaccctgtcttatgagggaaaattttgtttgacaagtacttcagcattgagagttttttctttccgcacttgtttttttctttttagcacttctcagcattgtcttctggcttccattattctgagaagtggttgtcatttgtattgttgttcccatgtatggaatatgtcttttatcagactgcttttcatatttcccctttattcttgttttctgtcattttgactgtgatctgcttttgtgtattttgtattttttctgcttggggtttgctgagcttcttggatctttaagccaggtatgtttcatcagatttggagatttttcagtcattagttctttgagtattcttcccccattatcactatcttttcctggaactgcaattatgtgagtatgagacagtttggtattatctcacatatccttccgattttattcattttcttcaatcttttttccccttcctcatattaactctttattgatttttcttcaggttcactgattttttttttctgccatctataatctgctattaagttcatccagtgaattttccacttactataatttttagttctagaatttccactaatttaaaaattaagtttaggctgggcgcagtggctcacgcctgtaatcccagcactttgggaggccgaggcgagtggatcacctgaggtcgggagttcgagaccagactgaccaacatggagaaaccctgtctctaccaaaaatacaaaattagccgggtgtgatggcacgtgcccataattccagctactcaggagactgaggcaggagaatcacttgaactcaggaggcggaggttgcggtgagcgaagatcgtgccattgcactccagcctggacaacagagcgaaactccgtctcaaaaaaaaaattaaggccaggcgcggtggctcacgcctgtaatcccagcactttgggaggctgaggtgggcagatcacaaggtcaggagatcaagaccatcctggctaacacagtgaaaccctgtctctattaaaaatacaacaaattagctgggcatggtggtggacgcctatagtcccagctgcttgggagactgaggcaggagaatggcatgaacccgggaggcggaggttgcagtgagccgagaccgcgccactgcactccagcctgggtgacagagtgagactccgtctcaaaaaaaaaaaaattaagtttaacatatatatattttttgagacagttttgctctgttgtccaggctggagtgcagtagcgtgatctgggctcactgcaacctctgcctctgaggttcaagggattctcatgcctcagcctcccgagtagttgggattacaggagcataccacgatgcctggctaatttttgtatttttggtagagatggggttttaccatgttggccaggctggtcttcaactcctgacctcaagtgatccacctgccttggcctcccaaagtgctgggattatgggcatgaaacactgcacccagcccgtaattttaataataataaatagtttaataaaacatttatgttttaagaaataatttttcatttatttccttaaatcccctattcgtccactcattatggcgatgtttttctttaactctttgaacatactttccttgtaattttctgaacatatttaaaatcgctgctttaaagtctccctactaaatacaatatctgggccattttggcatcagtgtcaatagattgctttttcccttatctgtggttcatattttcctgtttctttgcacgtttagcaattttcaatagtatatggaaattgtggttgataacttaacgagactctggattctgttaccttctttagaagagtgttgattcttgtcctagtagtcaattcagttactggctgatcaccttgaagttattcgtttaggcttgttttttatgttttgttagggtggatatgtggaaagactaaggtgtttctgagcctcgctaatgtggcagaactcaacctccaaacccaaggcttatgttggtgagggcaggtctatggaggcctattctttaggcatggtcctcacccatagtgacgttctgatagctcatatacgggtcgctaatgagacactaatgaggcctgttcactgtgtctggcttggaacttcagcatcccctagcactcctgaacctctatctctggtctgttctcaactctggaaggggcactctctggtcaagagctcactgggacacctcacatagacttttgggctccccctacttatgtcttctcatttcatcacatcatctgctccagaccctgatctctgcctccttagctcagtgggaccactgtgctctgcttggattctagccccatggtcaggaaactcccaggtagagtgtcacaatgatcatgaggtgcctttcatgagtttttccttttttaggggttatggtctcaggccgcttgttatctacattccaaaaacgacagcctcatatattttctccagtcctgtggtgtgtgtggagggagggctactctgccaccagcgatgctgccatggctggaagctgctccaggagccctctgaccggctccaagttggctgatgtctaggctgctgctcaggtattatcctgggatttatctctctttccatcatcctggcatctccctttgcctcccttttcagttgaactctctgttttctggatcccacattttcttattttttgttgatttctttaggtagaggaactttcagtcactccctgaggaagggtagcaggaaggtgaatttttcgaggactgtatgtctgggagtgcctttattaaaccctcacacttgactactggttggttgggtagagaattctaggttggaaataatttttctcctcattttaaggcattgttttgttggctgtctaatgccacatgggtcttttgtgttctttcttcttgcctgttgttctggaacttctgcccatggatgcagtgtggtctgctctgctccattgtgtgtgtgcctggtgggcccctcagtcaattctggatacttttcttgaaatacttgatttcctctccttgattgtattgttctctttttctgaaactctgattatcctgctctcctaggctgcttcttaattttcttttcttttcttttctttttttttgagacagtctcactcactctgtcgtccaggctggagtgcagtggcgtgatctcggctcactggaacctctgcctcccaggttcaagcgattctcctgcctcagccttcccagtagctgggattacaggcgtgcaccaccacacctggttaatttttgtatttttagtagagatggggtttcaccatgttggccagcctggtctcgaactcttgatctcaggtgatccttctgccttggcctcccaaagtactggaattacaggcttgagccaccgcacctggctttcaattttattttctctcttttccatttctttgtattttttctctactttggagggatttcttcaactttatcttccaaccctgatgttgcatttttcatgtatgttaatcatatttttaattgagctcttttttctttctgaatgcgcctcaccaaaaaagatactattctttccttgttccatgaatctttccctatttctgaaacattgacgattgtttgagtactttgcctctgtgttgtttcttctgtgttgtgtttttgctgttgtttggccggtgtctttcgtgttatgtgtggagacgagttatctccacaccagaggttatctggatcccaggcttgtgtggtacacacataaaccttgcacttcaccccatgctgccatgcatgagctgcaagacgcatgaactatggaacataggcctggttttcttagagccactcactgaggagtaaatgggacaactcaggaaagaggagtcttatttggcacattgtggcccagagctttcactctcagacttctgtgttggggctggggcaatggtggtcacctccacagtgccaggggcagaggccctgccttcaggaactgtctgggcctctgtggcttttccccaccccagacagaccttgagagaaagacctttctcacataccttgagaactaggtaaagagacaccccgagtgtttgtgcctgcaaagggggctgatggacctgcagcttggcacacgccacaagctgggtgtcagtcttcagagagccatgagaacctgtgattggtggggcagagaaggcacacccgatccccaaggtgtttggtcaccaagatccctggcatatgccccttggctggtgatctctgcccagagtgggcagcctcctggccccgcacagacctctgcccctacctggcctggtatccatcctgccagactctgcttctaaaagacactagggaagctcctcccacccatgggcacctcttctccacagcccacatctggtgggagatggggcagagtaggtgttaaatgaagacatgggtggccaaagctccttgctttggccaagctgggtcagctggtggaaactgccttgtacttaaaggccccatgggaggactctgcccattgccaccaccagtcacccttcccacagtcctcatcaccaagctgtagagtcctgagggaaccctaatgctggaggagcctcacacacagctgggtacgtgatgctcttgtaggggagggtacctggccgtgcctactgctggccgtgcagtgcacctggagccagctttccagccgccggccgcttgagcactggtggttctgttttcgcagcagtgggcccagtcctgaggggagaggggcacacggaggggcacgcggaggacctgggtcagctcagagtgtaccccttcctccatctttccctggggaccctagagggccaggacaggggctgctcaccttccctttgcttccccatttttccaacaaggttgagccattgagttgctttctaaggactcagaaggcctcctagcccagtggaaccacagctctgggtgtgggtctgtggggtcactctgcctgtccccatgttcagcctgtgccactgggttcactgaggaaccttatttctttagctgcagatctgggacacggccggccaggagcggttccgcaccatcacccagagctactaccgcagtgccaatggggccatccttgcctacgacatcaccaagaggagctccttcctgtcggtgcctcactggattgaggatgtgaggaagtatgcgggctccaacattgtgcagctgctgatcggtgagttggggattcctcgggaccacaaatcccatcactctgcctgtccatgcctccctctgctttttaaacacagtgtaaccctgagttcagagggagtcccagccagagtttgagccatggttttgcaaatcctgatcctgctaatcacttagaaagttacattcaaggccgggcacggtggctcacgcctgtagtcccagcactttgggaggctgaggcgggcggatcacaaggtcaggagatcgagatcatcctggctaacacagtgaaacctcgtctctactaaaaaaataaaaaaaaattagccggttgtggtggcaggcgcctgtagtcccagctgctggggaggctgaggcaggagaatggcatgaacctgggaggcggagcttgcagtgagctgagatcacgccactgcactccaacctgggtgacagagcaagattcgtctcaaaaaaaaaaaaaaaaaaaaaaaaaaaagaaagttatattcaaaattggaattagaggaaagaagaaagagagctgaagtttgctctgctgttcttcacatgtgtcaagatttagctcttgtaccccggcttctcctcatttgacaggggctggggctaggctcagaaaagtgcagtgatttatccgggtccacatggcctgtgagcatacacatgtaggctttgagtttgcttctgctgacctcaagtctgtggctttctctgttgtgccgcacacagagcagggacacttgatggcttccgtgcctcagaatcccacagaagtcttcttcaagtgcagctgcagggcctcaacctccagagcatctgatccaggcgggctgggtggggcccatgaatgtgcgtttctaacaaattcccaagtgacacccaccttgctggtccaaggatcccactttgagaactgctgctgtggaaggatgctgtttacctttgttttccttctatataaccttcccagacctggactggagaagctctttagctcttatgttatccctggggtcctcaccccaacaggttgattcttttttttgagacagagtcttactcagtcacccaggctggagtgccgtggcgtgatcttggttctgcaagatctgcaaaaccactgcaacctctgtctccctggttcaagcgattctcctgcttcagcctcccgagtagctgggccaacaggttgattcttctgactcaaatgtacagacagggcctggacctgactccagccaggaagagggtggtgcctggttccatgtggcctgccttccacagcctgttcagactaggacatggagtgcttggcatgaacagagctttcctcacgtagcctaaccatttccccaccttttcttgctgggggtgggggacggagtctcgctctgtcgccaggctggagtgcagtggcacgatcttggcttactgcaacctccgcctcccgggttcaagcaattctcctgcctcagcctcctgagtagctgggactacaggcacgcaccaccacacctggctaacttttgtatttttagtagagactgggtttcaccatgttggccaggatggtctcgatctcctgacctcgtgatccacccgtctcgacctctaaaagtgctgggattacaggtgtgagccaccacacccagccaccaattcccatttatccaggacatttctgaaaaacattccagcctggcatggtggctcacacctgtaatcctaacactgagaggctgaggtgggtggattgcctgagttcaggagttcaagaccagcctgggcaacatggtgaaaccccatctctactaaaaatacaaaaattagccaggcatggtggcacacacctgtaatcccagctactgcggaggccaaggtaggagaatcgcttgaacctgggaggcggagattgtagtgagccgagatcgtgccactgtcctccagcctatgcgacagagtaagactctgtcttccaaaaaataattaattaaaaaacattctattatagaacttttttttttttttgagacagagtctcaccctgtcgcccagactggagtgcagtggcgcgatctcggctcatggcaagctctgcctcctgggttcacaccattctcctgcctcagcctcccgagtagctgggaccacaggcgcccgccaccatgcctggctaattttttgtatttttagtagagacggggtttcaccatgttagccaggatggtctcgatttcctgacctcgtgatccacccgcctcagcctcccaaagtgctgggattacaggcgtgagccaccgcgcccggcctatagaacattttatacagctatgaaaatagtattttatctatttatttatgcatacttatatacatacatatatttttagagatgcagtcctgctatgttgcccaggctgatcttgaactcctggcctcaagcaatcctcctgcctcaacctccaagtagttggaattacaggtgtgagccactatatctggcttagaatagtataataatgagcccccaggtacccattaccctgcttcagcaattagcaactgaagtccaacctcctctcatctgtaccatgtcacctcccctccctcggattattgagacaaattcacatcaaaccatttcacctggcagtattccagcatgaacctacaaaatatttaaacacttaaaaacagcaatattattttctcatctaaaaatactgacatttccttaataatataaaatagccagtctgtattcagatttataattgcccataaaattcatatgtgttttattttttccagtttgttgagatcaggatccaaataagtttcacactttgaaactggttgctacatcaattaaggttaccaaggaaattttagatctttacagactttttttttttttttttttttatgacggagtttcgctcttgttgcccaggctggagtacagtggcacaatctcggctcactgcaacctccgcttgccactcctgcctcaggcacccgagtagctgggattacaggcccccgccaccacgcctagctaattttttgtattttttttaagtagagacggggtttcatcatgttggccaggctggtcttgaacttccaacctcaggtgatccacccacctcggccttcccaaatgctgggattacaagcatgagccactgcgcttggcccagactctttttttttttgtcttccttataaccacattacaaaagtcaaccatgtagagacttttaaaaaattattctagaaattgggtcaaggagcaatttaacagattgtttggaatgtaatgaagtcatctcataccatctaggaggatctgggtaaattgagacggggtctcactgtgttgcccaggctggtcttgaattcctgggctcaagcagtcttcctgccttagcttcccaaagtgttgggattacaggcgtgagccactgcacccggcctaaaaaaggttttttaaagaaagacagatgaccatgccaggggtgtccatttatagtggtggaagggagtggcatggggctgtcagcgtgaccctcccaggtgggactgggcttgcccagcccccatggcctcatgctgccccggctttcctccgcagggaacaagtcagacctcagcgagcttcgggaggtctccttggctgaggcacagagcctggctgagcactatgacatcctgtgtgccattgagacgtctgccaaggactcgagcaacgtggaggaggccttcctgagggtggccacggagctcatcatgcggcacgggggccccttgttcagcgagaagagccccgaccacatccagctgaacagcaaggacatcggagaaggctggggctgcgggtgctgaccaggggccgggccggcagactgggggttccccacctccttgctctccccagcctgccaagcccagccctccagagccagccctcctgggtaccggcaactacagcagccgggtgaagctctggagctctgcatcctgtggcctggctgcgggatggaggctctccttgaggaaggggaagcaggataccctggcgggccaccctgccagccagcagctggccctccaccatcttcacattccaagactggcctgaacccgccggtgtgggccacagtaggaggggccagcagtcctccctgtcccatgcctgctggctctgaccgtttcctctcatgggtttgctttacctgtggcagcaggttgctgctttccagggatgtgtccagtgccctgggttcttcccggtcatcctggggctctgcacagagcagcagagctagagccatgagacccacagacttggtgcctgagcgcagctccagggaagccccagccccttccaggcggggaacctgcttcctgccttcactgcccccgcagcactcacagacatctccctggggtctggctcactgccttatcaggacctctgagttttctgactttctgtgtagcttctcattttcatcagcacagcatggggtcacggcccacagctaggtggggtcacggcccacagctaggtggggactgtctgctggctcagggcccagtgttttgccactcaggttgcaaaattagctaatccttcagtgccagcactcagaagtctggcaggtgggggaatgagatgagaaagtggacatttaaggtccaagtagaagcttgcatccttgaggctcagggatgagagggcaccgcaaggcacccagccttaccccacaagcaggaatcctgccagccgagcgtgggtcccagtctatggaatcgagtctcccagacaaaaaaggagaggccctggcggtccttggcctggcccattttattccctggacccttaactgcctcaccctgagctgggcaccaaggttagaaggcaaaagtggggtagggggatgtgggaagcagcattgtcctctgggcatgtggctcagaggtatcacagtgacaaaagagccagggctagggctggaggggccaggtgatcttccttagccaatcccagtccgtctgtgtcagcccagctctgcctcgcagccccctcagcatgggtgcccccagaagtaagcagctcttggacccacgagcagggctgcgtcggtttgtggtctagctcccaggggcaggccaggcatggctcagtgcagtccctgggccagtgagaggcctcccccatgcctccctgccctctgcactaagcactttccaggcaggcctggccatagggcaagagcaggccttacagcagtgccacggtgacccaagaggcagggttggggcctggacagggtttcctctgctgagactgagacaagcagggcttgatgctggtggtggagccagcatctcacctgccaggcttccttttgggcagggaggctacctgtggaatggctgagcctggttctgcaggggaggaaggctgccaggagctgaggggctagcacctgcattgaggggagtctgggtgcatcagattggggggcgccagaggcgaggctgcctggctccctttctcagcagc

SEQ ID NO: 326 - DNA, 32742 bp, Homo sapiens
  source 1..32742: mol_type = other DNA
ctgccccgccccgtcccgttccgttcctctgccccaccccgtcccgttccgttccgctgcccagtcctgctggtactcactaggtagtagcggcaacggacgccatggggaccgcctcgtcgctcgtgagccccgcgggcggggaagtgatcgaggacacgtacggggcgggcggcggcgaggcctgcgagatcccggtggaggtgaagcccaaggcccgcctgctgcgcaactcgttccgccgaggcgcgggggcggcagcaggggccgggcccgggtcgctgccccgcggggtgggcgcgggcgggctgctgggggccagcttcaagtccactggctcgtcggtgccagagctggagtacgcggcggccgagtacgagcggctcaggaaggagtacgagatctttcgcgtcagcaagaaccaggagttgttgtccatgggccgccgcgaggccaagctggacacggagaacaagcggctgcgggccgaactgcaggtaacgccgggctgggccgcgacgccgggagacccttgggaagcacggccgtcctgctccctctccaaaccaagcggctttgaaagttcggcggaaactgcccattttaatttgagaggccatattctcttcgagtctgaaatgattccttaaccctcccctttttctgtctctttttttggagacagggtctcgctgcggtggcacgatcgcggctcactgcaacctggaactcctgggctcaatgatcctcccgcctcggcctcctaaagttctgggattacaggagtgagccaccgcgcctggtccccgcttttctatttctggtttattcattgaggcacctagaagaaattagccggaaagtgtcctgaggaggcaaatgccaatctccagctccactgccgcccccgcgcccaccccctcagaaggctggtgacatctgttgaagcaactcagcaaactcttcctaggagtttcacccccctccccaccataaaaattttaagtgggtctccaaagtggggctcaagtgtcggtttctttgtaaagtttcatcgctcttgcattttaatggtcttgacatgaaaatttctggaagcctcctgatctcaccatggttgaaaaccttctctagatgtagtcaaatttccctagtccatttgattaatttacgctaaaagcaattattgcatgccctccatgtagcaggtccattataattcaataaaatagtatgtaaagcagccgggcgtggtggctcacgcctgtaatcccaacacttttcgaggcctaggcggacggatcacctgaggtcaggagttcgagatcagcctggccaacatggtgaaaccccgtctctactaaaaatacaaaaattagccgggcatggtggcacgcgcctgtaatcccagctactcaggaggctgaggcaagagaattgcttgaacccgggaggcggaggttgcagtgagccgagattgcaccattgcactccagcttgggtgacagagcgagactccgtatcaaaaaaaaaaaaatagtataaagcaagaggttgcttttctgtgaacgaatctctaaaactttttgccctcagtttggggcccctctggtcgttgttgtgtcgtttgtgtactctttactgtgggagagacttataggcagcctaagagttcccggagtcgttacagtcggggtgaaataaatacctcagactgatttttctaaaagaaaaaaagcctcctgtcttcaagactagacattcttctagtcaggttttgttgttgttgttgttgttgtttttgtttttaaactccctcattagctgttgtgtaattattgtcgttgtctgggaagaagtccgtgtagcagtttatctgttgtcttatcagttttcctactgggcaaccttaatgcacttgcatgtataaaatggactagtgcatttcaaatatctgattcaatgtatccaagccactgcccaacagacaccgcacgttggaaacaactgtgaggtgggggtagaaaaggccaaaccaaacagggcggagtgcaataagggttggcaagtgtcacagtcactcatgtcaccaatcctgattccctgtgaaacatactggttcctttctcacatatcgaggcatgaaaaaacttatccatatttatttcattcattgtgtcagacatttactggagacttgcagtgtaccaggcactgtgaagtgctcaagggatggtgagatgaataagacatagtgccaacaggcacacagtctcttagaactacttatccttcaagttaagccttacaaaatgtaatttttactatcacaaagatggaaaaggcataaggaagtttaagagctgatgcagtgtttcaaaaaaagttaatttccattgaaagcttaatgttggtctttatttgtggtagttcaagcatggttgcggtttttttccatcatgttttgaataaaatggcaacatgaagttcctgataattggtaaaataataagtagacttaaaattctaagatacgtaacatatatatatatatatgtatatatataagaatgtaaaattgaggagcaagactatttttgttaggaaataacaaggtaaattattctaggcacttcaaaaaacgtatcagaagatacttcgagaaaaagaaagtgctttagaagcgaaataccaagcaatggagagagcagcaacatttgaacatgacagagataaagttaaaaggcaattcaaggtaaattccttacatttttacccccaaagcaacatagaataaaatagtatattctaaaagtatatataatatataatgcgatgaataaatagaagtaagtcatgtaggattcaggaaagttgtaagaattagtgtagagcactttcacatttttgagttggacgtggtaaacttgagatcatttcaaagaaaaacgtatgaaagtgaacattttaatagtaatttcgaaaaaaaggaaagcgtttccatatggggaaaagcatttggaaatgtttagggatgttgtattattggtatttagtgggagagagacaaatttcctaaacatcatgcagtgcacatgacagacccacaccacagacacgcatcctgctggaattccagtggcttccagttgcaaaacagtaaggtaaaggtactaggacattcaccctatgaaagaggaaatcgaggaccaaatgaatattggttttatgaatgaaatatttttcccttaaagttgatgacacaactttttgattatgaaaaagctttcaacattaaaattattctttttaaagatttttagggagaccaaagaaaatgaaattcaggacttactgagggccaagagggagttggagagcaaacttcagaggctacaggctcagggtatccaagtatttgatcctggggagtctgattcagatgacaactgtacagatgtcactggtaagtgtatatcctatttatattttgagctttcaacatggctgtaatgacatgtagagccaactttgaattctgctagatttcttttacttatctatattaggttattgctttaactactgttgcaaatagtgtcgtgtgttctctctgtcagctgctaagacacctcttctccacgaagtgtatgaatttggggactgaagttccttctaccttgtcactctgccaaccctaacccataacttttactctctagtctaagatatctaccccagctcccaccagcacatctgcattttagccaagggaaagaaggaaggggagaacacgttcctttcccagaaggtacaacctaagatcacttctcaaatcccattagtcagaactataactgggaagactggatagtgtaatcagcagccaggcagacatgtgtccaactaaaatgtagtgttctgttactgaagaaagaagaggagaatggatattggagttactagtctctgcaatgttatttctttacataatgatgtattctttgcaactatcatttagaatacttgccttatagttcactgagtggtttccagtatagccttgtgaactattcaaaaagtatttgttttataattaaacaaatgaaacatgttttctggaaataaaagcttgaaatcacagagtgaaagggtttacatattctaagaaaatgttaaagtgtgattgatactgaaaaaagaaaaatattctattttaaaatgcagtggaaaaatgtagtcactctcccatttgtaatgaactgtaagtatattctcacaaatggatgcattttggagtaaaatatggtaactgacagttccttcttaattttcattgtagtatcattggaatctgaccaacatcctggaatttttattgctaacttttaaggaaaaaaaatgaaggccgggcacggtggcttatgcctgtaataccagcactttgggaggccaaggcgggcggatcacgaggtcaaaagatcaagaccatcctggccaacatggtgaaaccccgtctctactaaatacaaaaattagctgggcatggtggtgcgtgcctgtagtcccagctactcgggaggctgaggcaggaaaatcacttgaacccaggaggtggaggttgcagtgagccaagatcgcgccaccgcactccagtgtggcaacagagccagactcatctcaaaaaaaaaaaaaaaaaaaaaaaaagattcttaatggccaagagtagctgagaaaatgctcttttataccccaacacaagtcttagtgattatttcagtattgacatactcaaatgtacagtgtttcaaaactattgtaattgtcttggcaagttagaaacaaattcctttctaggtcttttttcatttttgttttaaacatgaagaaggaacacttgagggggaatgtcacccatgtgagattcaaagagctacaaatagtaagctcagttttgccagagatttagctcaaataaccatttacttaaggttatcaaggatgtagatattctgacaaatataattgattagaaaatcatcatgttcataagtagctattgattcagacattaattttgttgctctaggaggttgagaaggaggtacttcctgctgcaaagagtttatgtcctaataaattatgaatatttttatatttatgtgtgttagtaacagtctgcctttgaggttttttccttcagattttaactggtgtctaagctgtacagttggaaatgttttttagaatttttttttgtaaaatgtttttaacttccttcttattatgatttcttttttattgtattcttgtttattttcatctttctctttttaatcctctctttgaatttgagatgataaccagaattatgttaatcagtatctttgaactttgccaaaagtcgatggcaaagtattttcaaaatcatttgaatatttgtaatattttcatattttttaaaatcagcaatcctgttcggtatatgtgatgagtttttgaacattcaataagttggctttcacaagataaaaatctcttgctgaacagctgctggaacccaatgtgaatattggactggcggagccttgggaagtgaaccttccataggaagcatgatccagcttcagcagtccttcagaggccctgagtttgcccatagttctatagatgtggaaggaccctttgcaaatgttaatagaggtaatacatgctgtttgtcaattacttgcctagtggtagtgactgttcatgttttataatcttgtgctggaactattaataccattagcaaagcatgaaatttgtgttcctagtgctttccattgacaaaccatcatacagtggggctgtaactaacaaggaaggatgaggttgcataattcatatggtgatcagatggtactcctgccaacctggccagccaggttctagtaactgtgttatggtctgaattctctggtgttttagttgagcagcaaatctaatgtagattaattgaaaaacagtaggttttaatctttccctctgcttctttgatagtgttgaagattagagcaggttatggagataataccaaaaagctctattaggtaatatagtacagttttccttctatatccacagatccactcaaccactgatcaaaaatatttggaaaaataacaatgaaaataacaatgcaacaataaaaatagaaataagaaacaatacagtataacaactatttatatagtatttacattgcatgaggtattgtaaataactagagattatttaaagcaggggtatccaatcttttagcttccctggcccacattgaaagaagaattgtctttggccacaaataaaatatactaacactaatgatagttgatgagctaaaaaaaattgataagaagtcttacaatgttgtgttgggctgcaaagccatcctgggccacagattggagaagcttgatttaaagaatatgggaggatgtgcgtaatttatatgcaaacaccacatgattttatgtaagggacctgagcatctgtggatttggtatgtgaggggaagtgctggtaccaatcctccattgataccaagggacaactgtattcatatccaaaagaatattttccttatttttatataacatagtgtccagaatagctctaagatctgttcagaatttcaatatcagtgcagacctaagaagttataagtagttctactctttttccttaaaaccctacaattatttctctatcagcaaaatgaaaatcatttttaaaattgtgctttttgaactagccaaatatgtgttaaatttttactctcactaaatatagttagcataaggctacttttcattttatgccattcttgaacattcttttaactcaatatatttcaagaataataagaaagtaaagctataaatcctcttgggaatgtaggctaacttcaggtaaccaactaattgagtaactcatgtaaaattttttcatgacacttgactggaaccactggtgcctcagggaagaccactggtgacattcattgcttcaagtcctaggatagaatttgagtttagaaaactaattgcctttgaatatattactctagaaggtatggcagtattaacatgtaagatcagattccattctatgatgcctgttatgtttttaaaacttttttagaatgatcaaatgtgttctggtaattttttcatgaacttgagaaattttattttcagatgactgggatattgctgtagctagtttattacaagttactcctctgttttcacattctctgtggagtaacactgtcagatgttacctcatttatacagatgaaacccagcctgagatggatcttttccttaaggtgaggatatttataaattctgtatcaaccaatttaaaatataagttaatattatattctgtttctgatactactgtatctcaaccaaatagtttcctactagattatatgtcttaaagaacaggaagcgtcttgggcttttcttaagagaaaatattgttcaatattatatgtaaagaaaggtggtgaattgagagtttatttatttatttttactttctggaattaactttcctaggacaggagctaagacagaaaaagaaggttttaactcgttttagttagttttaaatgtcaaactaaggtgttggaactttctggacttttttttgtttgtgtgtttgtttgcttgttttgagacagtgtcttgctctgttgcctgggctggagggcagtggcacagtcatagctcactgtagcctaaaactcgtgagctcaagcaatcttcccactcagtcctccagaacagctaggactacaggtacacaccaccacatacggctaatttaatttatttattttttttttttgcagagaaagtgactcattgtgttgcctaggcttgtttagtgaatttttcattgcatattctccacaatgtttaagactcttgttgattgtgtctactttagttactctctcttccagctctatccttgagtctgtctcaggtagtaaaattttctccttactgtggtttaaattttccaaggcagccgttggagttattctaaggcaagggtcactatagccagttggtgaaatctggcctgctgcctgttttaaatggcccagagataagattggttttcacattttaagtggtagaaaaaaatcaaaaggagaataatattttatgacatgtggaaattatatgaaatacaaatcttagtgtctatcaagttttattagaacattgctgcactcattcgtttacgtatcatccatggcagcactacaacaccaattcaatggcagagtaaattgtgatagaaaccaaataagccacaaagatccctgctaaagcagccaagttgtaaagctattattatttttgtagacatatttgctatctaaccctttatataaaaagcttgcctaccagtgttccaagggaattttatagaatctgtgtgtcacatgctatacctgctatattaacatcttccctgttgttgattaccaaattcatttagctttcctttgtgatattattcaattttagtaaaaagataaaatattttaaagcccaaagcttccatccagtaattgaaaatgttattcccaacgacattttgagggcattactgatttctttcataataatagtcatcattacttactaacttaattatagatttatgtgtttttaacttatatcgctctgctttagcgttctgatatatcatcgtggatgttttttactatacagatttatggatctatattttgcactctttatgacaataaaacagattgttcatagtaataataacaaaaagaaacaaataccaaagcaaaatagcctaatactgtctcctgttgttctagctttactatgaaataagtcattttctgagctagaaaaaggccaagttgctaagctattattatttgtatttgagagaaacttgcctttttaagattttctttaaaatgtgattatttttaaaattttatatgaaaagatatccagtataacctgttttaaagcgtgctttttattttaagtagtatgaatctcacttgatctttagttaaatacattaaacttttgtatgttttcatttgtttttaggactattcacctaaacttaagagaatgtgcgagacaatgggatattttttccatgctgtttattttccaatagatgttgaaaatcaatacctcactgtaagaaaatgggaaattgagaaaagttctttagttattttatttattcacttaacattaccaaggtaagctgaaaaaaaatgtaatttattataagcagtaaactgtaaatagaattgagtttgccaaataagcttcaaagataaattttattgcatccttataataaaaaaatccatgaaattcaataaattctacaactgtttcacacttaaataaaataattaaaagttttaagctgttagacttgtttcataggtcatatgatcaacaccttaatttttagcttattttaatcagagtttggcaaatatagcccaagggccaaatctagccaggagtttgcttttgtaaataaagttttattggaacacagccacattcattcattcatatatatataaatttttttttcttttttttttgagacagagtcttgctctgtcgtccaggctggagtgcagtggcgcaatctcggctcactgcaagctccacctcccaggttcacaccattctcctgcctcagcctcctgagtagctgggactataggcgcccaccaccacgcctggctaattttttgtatttttggtagagatggggtttcactgtgctagccaggatggtctcaatctcctaaccttgtgatccccctgccttggcctcccaaagtgctgggattacaggcgtaggccaacacacctggcccattcgtgtattttctacagctgccttcatactataatagcaaagttgaatctttacaacagaaaccatgtgtcctacaaaacctgagttgtttactatctggccttttacagaaaaagttgataacccctaatttcaataatcaacattaaccttcattcttttctttctttggatacaaactgagaggtatttgaactatgtattttacatataaagttcatgtacttgatcacttgtgtaggtgttgaatcataatttacattttttgaggagcttactatttaaatagacccagtaaagtgaacaatgttcttataatgtgaatataatcatgctaatgaatcttgtctgcaagtaaagattttttttcaccagttagatatagagataaaggacaaaataagtttaataagaggctaatttttctttctagatttactgtctaaatttaacctttccaaagcattttgcttttttaattgtggaccaactctgactttaactgtgtatagatatatgtaaggccttaagtttcaccagtttccctgtagcataacccattgtagacccttaagactttgcctagtggccgggtgaacagggaactacctggtcaatgagccttcatccagaatatgtttaaggagttcttcaacttgattgccttcagtagggtttcattgctatccaccccttcccttttctttccctgtttttatatttattaaggatatatcttatcttattacttaatgattgagtagtttttttatcttacttggtaatatgttatttgttgttacattattttttctaattcttatctttgatccataaaaccattttgttttttctttacattaaagaaactttctgggtgacagagtatgaccctgtctcaaaaacaaacaaacaaaaaccttactttttaataaaacattgtatacattattcttacactttaacatttatttttcttttccaattttaaactcttcttaatgttttcctccccatttatttcatattttattacttttgcttagatttcagtttatccccttttagtaaaattttatattgtacatttttaaaaattttattcttattaaagaaatgaggattttaatttcttaaatttaataattttagtctctactttggctttattttacttaaacttttcttattccagttgcttattattttattatttgtttctttcatgcctgtcaagaggtatggcagtggggatgggctccacaccacaaacaagggctgttggagcctttgtttcagatttttccttcgcctaccctgatgactaccccatccttcccaaaagatgaatctagaaaagcctctcctgagcagcttggaagctccatggggaaacactttcctgtcaataattattccctgtgtgcagatggtatccacagagttatttgaagatagtgttcactggcttctcacactattcaggcctcttataagaaattatgaagctcaaaatgtatggttttgatgtatgaaatgattggatttggagcaagctatgctaacaacatacttagttgtaggctgggaaggtaggcaggaagtcatgcttagtgaggtgcacaggcactgtgcctctcggtgttactgactggagaaggtgcattagagggaaacggccaggctcctgcactgcttttccaggggttcttctttaatgcctttaatttgaccagcctcacttcatggaaggagaaaaatcccgggagaaatctcctacaacgaagaatgggaactgaaatagggtgagtccgggagaggctggctgagtaggaatattccagataaaggtttaaaaatgaggaattctttgctcatgattggccctctttcattacatcagcacccttgttgggcagaccagactcactaagaaagcttgaacctacgtagaaggagaggtgcctctccctttgcacagcagcacagaggggcgactgtgactggttttcctcagggcatcatcagtctttctcaagggatggggaggcttccgtgcctaaatagtaattcagtcacctttcaggacttcttaggccctattattggtttcattcagctttttttttttttttaccagatcacctatagagtttcgttatagaatttaggcaagtggaagcccttgtttgttctatacttgaactttcttcattatgcctcagctttactgttttaactcctccagccccacaaagctacatcttctcttgcagctcctcccctacatttttgtctgctcaggctactttctgaagggatcctaaagtgcaacttatcaacatattagctggcctgttatactatctaacttcagcaattatcacctcatgactcgttgtttcatctgtagcatctgcttccgttccaccagattatttgaataaaataccagagatcataccattttatctgagccccatgggtcagttttgtagggaatgccttgaaatatggacgtgtgcctgaacagcaagcccattgtttggtcttctaatgggccacagacttttcccacaaagcactgacagatgaatcattgaaattccaaaattcgatagaacatggccagagtgattttaatatagaaaacttctgtggtttgggtagaatggattggcgcagaaatatacaacagaatgtttcttaatttttaatattttgggctagtagtctaatttgcagattctgaatcatacaatatcgcccttctacacatacacacacacacaccccccacaaaaacatttgtttccctagacaactttcatttaatgctttctagaaaggggaattggtcgcagtgtcctttgttgtgtagaaaaccccagtagatgtgggctgcactcagtggctcatgcctataatcccagcactttgggaggccaaggtgagaggatcacttgagcccaggaattcaagacttgcctgggcaacatggtgaaaccccatctctacaaaaaatacaaaaattagctgggtgtggtggcgtgtgcctgtgggcctagctactcggtaggctgaggtgggaggatcgcttgagcccaggaggttaaagctgcggtgagctgtgattgcaccactgcacaccaggctgggtgacagagtgagaccctgtctcaaaaaaaaaaaaaaaaaaaaaaaaaaaagggagagaaagaaagaagggagggagagagaagacctcagcagattattagttctaggacttttttttctagaattttcattaaaaatataattttggttccctataacaaagttgttttttgggattttttttaccttcacctcagtcacccaacctcttccaatctgtctccagatctttcctgtagtatatattgggtataaggattagggtcatttattagatgagaaaagtctgaaagaactgggaaagagaaaactctcaaaactttggggctgccatccaaacagagaagcacctctccttctacataggttcaagaattcttagtgagcctggtctgcccaagaagggtgctgacataatgaaggagggccaatcaagagcaaagaattcctcattttgaaacctttatctggaataaaggcctctcctggacatgccatattttagctcctatgtttcattgtaagagatttctcctgtgattcagccatgaagggaggcgggtcaaattaaaggcattaaaaagaactcctggaaaagcagtgcaggagcctggctgttgccctggatggtgcctgtgtacctacccacgcatgacctcctgcctacttgtgttaacatggaaattatacatttttaaatggaattttgtttgccatctattttcaaagtctcatgagtctagtccattattttgagccaagtttaagagtatttttgagatcttttttaggtttaaaaaataaagttttatgtgctttacaatttaatgcataatttattatatttatgctcactgttggctaatgaatgtattatattttaagaccaaactggaagagagccataacacatccatttttggaaagcttcacttgttgtgcagttggaccttttctggccacttgtcactgtagtaaaactccattattggcacttaggttgattaactaactgcttgctgccacaatgcagtatagcacacaaaatgctgatttccaatctagccttttattggaagactgtgaagaagcttttctgaaaaaccctgaaggaaaacctcgattaatctttcatcgtttggaagatggaaaagtcagttctgactctgtccagcaattgattgatcaagtttctaatctaaacaagaccagcaaagccaaggtaaaattcataggcatttttgaaaaacacacttagctgagggaaaaactggagcaaaggccatgaggtgggcataagcctggcatatctggggaggggagagaaaccagtgtggctggaacagataagtgaggggagtaggaggagagggggcctcattgattgtgaagaacctcggaggccattttgaggatattagcttttcacttggagtgagattgggagccactgcaggactataagcaacagaatgagggctggcgtgatcatctgacagtgatctttctggctgccatgttgagaataggtggtcattcaggggtagtgtgcagagtctgagagccattgccatcatacaggtgagagatgctggtgactccaagcagggtggtggtagaggaaatgatgagaagtggtaggattctgagtaaattttgacagtagagccaataggatttcttaacagattggttgtgggttgtgagaaaagagagagaaataaatcgcagtgtgtggctagcaagagtatgatctgtatgatcagatggtattttgtgcttttctcccaagcacagagttcttctgtctactgaccaaggattagtgtcaggaggagacttttttttttaagagacagagtctcactctgtcacccaggctggagtgtggtagcttgttcatatctcactgaagcctcaaactcctggactcagagatcgagcagtcctcccacctcagtgtcttgagtagctgggactacaggcacaggccaccatgcctggctactttgttaaaatttttatagagatggggacttattatgttgtccacgctgcaggaggagactttttatagtgacttttcctaagagcattggggaaagcaaaaagctgatgatgggatgagagaaatttgatcattcctagatgcatgttgggataatttttagaatacatattacaggctttttattactgtacacggaggcaacttggtaaatgtctgtagttaatgtgaataatacaattgaaaacaactctaggatttttacagagttttcacttccctgtgcccagccaagaaataaaatcaaatatgaatacaagcatttttctttccatcatttagtattgaaaagatagcttgagagcagcatgacacataaaactaaagagactaagacaaaaaggaagtgcatttttattataatttccagagccatttcattctttgttttaattattgtagtatcagcctagtccactacgtcccacaaaaaagatattaatttatcttttttattctatttattctataacctttactttaaaaaatttagtatgctggaaggatgagtttattttataaaataggagtgaaataagatctctctgccatgattataaatgtaaatgtagggtaaatctccatgcttgttcacttggtatgtattgtaaaatcattgccttattctaattgtatcaaatattagtagtagtagtagacatgttcttacagattgggcattcttctttcagccagctcagtgagactacatagtatactattttgcttttgtcttttatagaattatagctttattgacataaaattggattttgatgcattttgaagggtaaatatgttgagtggtatggaaatacataagagaaaatttggagacagagcaaaaaaaaaatgtatacttcttggttttttttttgttttttgtttttttttttgagacagagtcttactctgtcttccaggctggagtgcagtagagcgatctcagctcactccaagctccgcctcccgggttcacgccattctcttgcctcaacctcctgagtagctggcactacaggcaccggccaccacgcccggctaattttttgtatttttagtagagatggggtttcaccatgttagccaggatggtcttgatctcctgacttcgtgaaccgcccacctcgacctcccaaagtgctgggattacaggcatgagccaccgcgcctggcctacttcttgttttattgctccatttttcacactaaatcccttgtgtgaccttggacaagttacttactttgcctcagtttactcttctataaaatggggataataatagtatctccctcctaaggttgttgtgaagataaattagctaatatgtgttaaatatttagaatagttcctgtcacataagcagtataaaagtatttaccaccacttccttctgatattatggtttttctcattgttcttaaatgatttttatctagatcattgatcactcaggagatcctgcagaaggagtatataaaacttatatttgtgtagaaaagattattaaacaggtaaatatgcattctctgtaagttttcatctaaaatattttaagatcactttctatgaaattgatttttccagagaaaaccacttgcttgtctttttgaacacagtacctgaggaaggcgctgttgtttctgttgggagtccatcctgtggtatgttcttagtattactaggaccatgtattaatatctttatctctcatctatctcagaggactatttgatgcttcaatacctaagtgtaaaacatattacaaaagtgctagccaaaaactatttaagagaaagtgttcattttattcaatagggaggctcctctgtgaattttgaatttttatatattaggaaagtctctctcaggttttccccccatgttatccctaacagaagagggggatgaaagcatgcctccaggggggtgagaacatggaccagggaggggccttgagctggaagtctctatgaagtttcatgtgctatcttgaaaatttatgtgagttatatattctgcctgatattatgtctatgtttgtgtttaatataaaaaaattttaaattatatattagaaaaaaatagtaatagtgattatttattattcccctctccctcaaacagaatgggcgcagtgggaagatgtaccatgtttagcctgtggttgcccacaccttctgacacctcccccagccaaccaaaaaccctatttgagaagtaggaagcttgaagatttattattagagaaaaagagtgagccccaaaatgatatgacctctggcaacacattttgtatggtgctctctagtataaagattgtctttatcaaatttgagcttcacaatcttgcaaattttaggaccaagataaattaattgagcagaatgaatggcagcaagtgaaagtgaatgtacttaccatcattagtgcttgaaggataacatattttcagtaacctaatataaaaactgaatatgaccacagagatacttgagatcaagaaatcacatcttagtaattcaattcttatagcatatttcctagccattagtactttataactattcaccagccagatacaaccaaaatgttgtgtaacatttttcagaaaacaaattccatgggattcaaatattcctttaattttatttttataaaaagaggtattcatttctattattttaatatttttatttctttgtttttaaattagtgatttttttgtagttatcagtttattcttgtaggtattatacaaaggctgtatgtttgaacttgccctcccaaaagtaggtgaagcccactttgggcctgggtgaccccgctgtaagatctttattttcttcattcatttttgtgtggttgttctttgtgtttaggacatactgggttttgagaacacagacttggagactaaggatttgggcagtgaggattccattccagaagaagatgattttggtgatgttctgtgggacatacatgatgaacaagagcaaatggaaacttttcagcaggcttctaattcagcccatgagttgggatttgagaaagtaagtgcttggagtattattgcaacaaagatctgtcaccacttaaaggctgtattatgattgtattttcatctaaatatagttaaggtttatgattatattagttgtctaatctcatggcttgattatccatgttgagatgtgcttaggtttgtgtcataagaaagatatgtgagattcaaatgtgcttataaagaccgaacatttttagttatggactagaatttatcaaccacatgtttattatgctaccatctgcaactcactcagaccaggattaggatagctaggaaacttgataaggatagtaaggctgaggccaggtgcagtggctcacgcatgtaatctcaacactttgggaggctgagacaagcagattgctttaagcccaggagtttgaaactagcctgagcaacatggcaaaaccttgtttttacaaaaaatacaaaagtttaccaggcatggtggtatgcacctgtaatcccagctacttgggaggctgaggtgggaggatcaattgagcacaggaggtcagggctgcagtgagccatgaccacacccctgccctccagcctgggtaacagagcaagaccctgtctttaaaaaaaaaaaaaaaaagaaagaaagaaagaaaagaaaaaaaagaatagtaagtctctctgttcttccaattcttgaatcaaaatattacattcagaaaacaaagcatagtagttcatgaaataggcagataagtccttctttatcagtcttatcaacatccttaaatatctaaacaaattatcagaacttgaaatatacaatgaaatctatgtgcaagttaaaaaaatataatagttaaaaattaatgtaagaactaatattttaaagaatactatagtagctaatattaacagttgtatttttacagaactttttgaatttagactgtccgttaatgtcctggttccatcatttactaactagatttcttcaagttacttggccactctaaactttgactttcttggctgtaaaatgagaataactaatagtacctacctcataggtacttgttgcaaggattaaatcagataatgcacataaagtgcttagcacagtacctggcccatgataaatgttagtcgttattttatgagaagtattgctattgttattttataaataaagaaactgaggttcagattagggtttgcctaagagtacacagtgagtagattgcagatctgggagttgaacctcgttcttttctggctccagatcctatggtttttcttttatagccatgggtcttaacctgggaagcatggatcctataaatgggctttctgtgggaccatgaactaagttgttaggacttatgaggtagtaaatcaagactttcttttctccttcagaagtatcatttctatttgaattatttgagttcctggggaatatattctttagagatataatttttctgcttgttaattaaatataacaagtagaaaaattgattgaaaaactataccaagtaattcattatagttgctggagaattgtgttattctaaagcaagcctaaagctggctgcaaactacttactatacacttttttaaattcctcatcagctatcatttagaccactggtacactgaagaaaaagtcaagtctcaagataatttttgaaactccttaataagtactaagatattttggtttttgagtgtgtcctttttagctttgaaccagttttgagtttctggggaaaacttgggaaataggaattcttggactttacactgaactcacttagtttcaaaaagatctcaggcagcctaggctaacctgattgtcttgagcagattgggagactccaagtccccagacaaaacctgctgttatttggaccttttctcacccccagaaactgaggtgattcccaggacaggtgtttattcctctgaccaggagatctaggtggtctgctagtaccttcaaggtcttctgcagtattttctgtgatttgggggctacagtgagctccctgaaacattctgcaaacatttgagtgttgcaaaaccccacagggacctgaaatgttgtcctttacccattaatttacagcaatactacatgtagaagaaattggggcccattttttgtttgtttgtttgtttgtttgttttgagacggagtcttgctctgtcgcccaggctggagtgcggtggcactgtctcggctcactgcaagctccacctcccgggttcacgccattctcttgcctcagcctcctgagtagctgggactacaggcgcccgccaccacgctcggctaattttgtttttgtatttttagtagagacaggatttcaccgtgttagccaggatgttctcgatctcctgacctcatgatccacccgcctcagcctcccaaagtgctgggattacaggcgtgagccaccgcgcccagccatttgaggcccattcttagtttactagttcagtcatgtttttgccagccataaaagtaggcaattatgagggtgctgtcactaaaaatagatttcattttctcacacagcttttctccagtattttcaaagaataatcagaagttgactcttcagtagtctcagaggcatgtgcttccttacaatgtaaattcatttttttttctagtattaccaacgccttaatgatctagtggcagcaccagccccgattccacctcttctcgtgtctggaggaccaggttctgggaagtctcttcttttatcaaagtggtatgatgcagtgcaattaaattattgttgtcattgtttgaattactgaatctattcaacaaaatgtattgcatgcctgccttcctgcgcggcctacactaaacattaacaaagtaaaaaggaataaaacaataggttcatgccctgaaatgcatagaatttggatgttagagagaagacacagaatgagaaaggaataggaagcatgaacatttatgattatgtatataaatcacataagtaacagctatgggagtgctttgtaaggaagtgatcatatgtgatatgtcatataacacatgttattaagtggattgtaatgtgcctttatttgtaattattgcctttatttaaaagtttcattgatactttaaatatttgaaacgacaaaagcatactagttagagtgaaatacattctacagaacatcaaaattaaggataatcttcaccatgaatgcaatctagttcttcaaattatggactaaggttcatataagctaataaactttattatttcattatgttatttaaaaacaagcagtaaaaatattttctttctttcataattatttatattgaagggttagcatatgtagttgtctcctttttattacccttttatttaaagttatgtttggaaaataatatttttgtatctaacaaattttcctctagtaggaatttttaattaaaagttaatgcttgttttactaataccttaccctcatatgtaaagtactttggtttctgttaattaacatctatttgtaattaaaatgaatctacaattttttaaaagattatttagaaggatctaaaagtggagtaaaaacagaaatctccatatttatttaaaagtaactgaccacctgattgctcagttaggcaacatttgatgtttactgcattgtgaattctttttttattgacagtcaaggaactttatcggttttataaaagttctgtctttttctttcaggattcaattacaacagaagaattcccccaacacactgattctttcccattttgtgggaaggcccatgtcaaccagctcagagtcctccttgattattaaacgactaactctaaaggtatagtatcccatcttttggaattacagaattttatttagattcagaaattgttgggactaataagtacctactggtaaaccaattttcagtattatccacctgttttggttttatataaggttaaaaataatattcgatacaatcgggtcctcttggtgacttgattttggtttataaaaaagtaagaatagaaatatttcccccagctctgtaactacttcagtaactacgtgtaactacttcagtttgtgtgtgttcttatcttgtagttgatgcagcactcttggtcagtctctgctctgacactggatcctgctaagcttctggaagaatttccacgttggctggaaaaactctctgctcgtcatcaaggcagcatcatcatcgttattgattctatagatcaagttcaggtaccgttttccatttgttacctattgatatgctcagaaagagatgtaaattcagtaatagctagagcaggcatttatatgtttgtgagaagaaaatatgatgttattttttatatttctgctttatttctagggaggtaacatggattaaaaaaatatatcgtatgcccacagacactaatatcttattaagaaagaccaactgaatttacacaattaacaaagactattcgttctgacatatttttagggccttgacatttcctgacgtgtccagagttcagattggtgataataatgttttgctacttgttcttttaaaattctaaaataaatcaccccaaaataagatttttatccttaataagataaacttaatgagaatttcattttatttggggagctattattggattgttttgaaatattttgattaatagattgaattttgtttttatatttttaagcaagttgaaaaacacatgaaatggctgatagatccactgccagtgaatgtaagagtaattgtttctgtgaatgtagaaacatgccctccagcatggaggtacgatgccaactttagttctttcagagtacatgaaatgttttaagtacaaacaaggaaagatttttaatatgcatttatggttttcacattttttatgtaacttgcagtgaggatggggagaagtgggtgaatttatgaaaaaaaaatacaatctatagaattgtatagatggtgtgaacctgtaatcccagcactttgggatgccaaggcgggtggatcacttgaggccagcagtttgagaccagcctggccaacatggtgaaaccctgtctctacaaaaaatacaaaaattagctgggcatggtggcgcatgcctgtaatcccagctacttggaaggctgaggcaggagaatcgcttgaacctgggaggcagaggttgcagtgagcagagatcatgccactgcacttcagcctgggtgacagagggagaccctgtctccaaaaaaaaagggatttggggggaggttagatagatctgggatgcaagggaaaagaaagagccaggatgattctggagtttctgacttgagaaattaattaatgtagcttcatgaactgaaataggaaacacaaaggacaggcaggttgtggggaaaaggtgatgagtttagtttttaatcatggttagtttgagtagctccacgtaacgatgtctagtaggcagttaaatttatagatgaggaaaatagagaaagggccgggctgggaataatagacacctgttattttgaaatgcaagctcactttaatggttctttaaaaagtagtagagtggccgggcatggtagctcacatctgtaatcccagcacttcgggaggccagggcgggtggatcacctgaggtcaggagttcaagaccaacctggccaacatggtgaaacccatctctaccaaaaatacaaaaattagccaggcatggtggcgggtgcttgtaatcccatctactcgggaggctaaggcagaagaatcgcttgaacccaggaggtggaggttgtagtgagctgagattgcaccactgcactgcagcctggacgacaagagtgaaactcccatctcaaaaaacaaacaaatggctgggcgcagtggctcatgcctgtaatcccaacactttgggaggccgaggcgggtggatcgggaggtcaggagttcaagaccagcctggccaacagtgaaaccccgcctctactagaaatataaaaaattagccaggcgtggtggtgggcgcctgtaatcctagctacttgggaggctgagacaggagaatcacttgaacctgggaggcagaggttgcagtgagccgagatggcactactgcacaccagcctaggcaacagtacgagactctgcctcaaaaaaaaaaaaaagtagagcaattggatcccatggagcagtgtttctcaacctgtttttgctcctataaggagccattttagacattttatttgtaattgcctcccccaagaaattttaataccacacacatattgtatatcagcttgtgtatatagatatatgtgtctatgtgtactttatacataaaaagagtaagttttttcactcccccacaaatgcaattttcagtaccatatcaagaatgtatattgtaatagttaaatttcagttgcattacaagtgcttgtggacaataattgtgtctgatgccactcctcatagatactcatacctatgcttagttttactgatagtatggaacatagaactagaaatgttttaccatgtaactatctaatgtatatactgtttattttataacactgtttgttgtgattcattgctcaaagtaatgatacacatattagaataagatatattaattacttaatatgattaatagacattagttttgcttattttacaaaagcagtataaagtgttaattcctgtggtggattttaaattgtgttatgggtaattacagttcttgttgtattattaaaatttcatttttcttttctttacataaaaggttgtggcctacacttcatcttgatcccttaagtccaaaagatgcaaaatctattataattgcagaatgccactctgtagacattaaattgagtaaagagcaggtgtgtatttttcattttgatgcaatcttttactctctcatctttcctatgaaacatcttatgtgagacttaaaattcaatataggggatctgttataaggaaaactggagtttagtaattactttggtaaatgtattgcctcttaaactaatgacaggtagaaaagaagcaataaaaagattttggtcttaaggttgactttagtatataatattaagcaggtattttaaaagcaaaagagcattttcatactggccatatctgtggtctgcagttggaaggctgcccacagccgaggagccaccactgcatgttgtgatgtcacggatggcagcaatagtgttatttctgtcggggtacttgttgatggctgggtagtaaagaccgcttaattccagggtggtttttgtatttctgttttgtttttcttggtaaactggtgcaggagaagaagctagaacgacactgtcgttctgctacaacctgcaatgccctttatgtcacccttttcggcaaaatgatcgcgcggtgagtggtgattattttacatgatcttctgcatgttttgtgtttgctgcagaccctttctcaccctgcaaaactgagaactgatcactacaccagtctgttgagccactcagattttatttgaatagtgatactaacatttgtgagaacatggcttacaggtgcctactgtccatgattgtcagaacttgatagatttgtctaattttcttcacactaatctgttccctattggaggttgcaaaagaaagccatcctcaccctcatttgtggcccctagctttgggaaagtgaaggaaacaactgagggttacaatattatttcaggtatctttgaatatcaggaggtagatatatggatatgaatttttaattgtctctgttctcaagtcctgataaactttttaattataaaaatagttctattttagatatccattagtaatctgcctttagataagcattagagtatcactacttttatttcctcagtatagctttaccctattctatctattctcaaccgttagaatgttttactacttttatttcttcttcagtatagcatcactctactttgtcttttctcaatctgaggtaaaaaaaaaaaagattaatacattttttgttattcattgcaatagatggcaattctagcacacatatttccagacaccgaatctagtacttcttgtctctttattccatgttctcatcttgagaaccaaatttgaaataaaaaaatcttctgaaactttacattgcccatgatatttcatctttgtttttgtttttgagacagtgtctcactctctgttgcccaggctggagagcagaggcttgatctcggctcactgtaacttctgcctcccagactcaagcgatcctcccacctcagcctcttgagtagctgggactacaagagcacaccaccatgcctggcttatttttgtatttttagtataagcggggttttgccatgattgccaggctggtcttgaactcctgggctcaagcaatccacctgcttagcctcccaaagtgctgggattacagcatgtgagccactgtacccagcctgcctgtgatatttccactgtccttttccactgttagttgtagcaacacatctggcctctgtgaacatcagtgatacaatgagtatgattcaagagtgtgagtaatttttcatacatttaataatgttcattgaaagtattttactgtttttatttttgaaagtacctattttaaagagactatggaccctttgttttttctctttgtacatctttatattatttttaaaaactggtaaatattgtgtaatcttttaaaacatacccccctatttaatgattttctttagccttgtgttttcaaaattctggctccacacaaatttaatttgcatggctaactaacaatacttatcatcgtttccctgcttcctgtatgtaggtggcatgcttctggataataagaaccgtgtctgactcatttttatgttccataatgcatagtaattgcttaacaaataatagatttcagcatgtttattgcactgaattaaattatatatagtaaaataaacccaatgactctagcagccccataaaactaccactttcctttatcatgttttattgaatttgttattggttgcagtacaaaaaatagagttcacgttgtttttaatcgatctcaaaattttcacagatgttggcaatctgtaagaaattaaatctcttctcgattccaacagtgctgggagagcaggcaatttagataaaatccttcatcagtgtttccagtgtcaagatactctttcattatatagacttgttctgcactctatccgggagtccatggcaaatgatgtggataaagagctaatgaagcaggtagaatgtaataaacttataaaaaggaatgttagtttgctttgtgtgtgtgtgaatggaaataaataacaattcttttaaaatttgtgcttaaatatgtttcaggcatatgcaggaatgctgatagccatagtgtgcttgtggaaatttgtgtttacctgattatcattgagatttatcatcttttcatgttattggctatcctttttttctgaattgctggttcaggtctttacccattttttaattgggtcatttgtcttttccttatcgatctgtaggtgtcttaaatgttctgcatactgaaaacaaatcctttattagaaaatttgcaaataaatgtctttttcctgtttgtttcttgtcttttaactgtatggtatcattcattatgtttcattcattatacaaagctttgtttcatatatatatgtgtgtgtgtgtgtaaacacacacacacacacacacacataatttccttcaaaaagttttatagttttttcttcgtgtgtgaagtccttaactcttgttgatatctttttgtttattgtgtgaggaaggattctattttttaatcctctgtcatatggataattaattgttctttttactaaataatacatctcttctgctcatttgcaatgccaactgacaaatatcaagctcacaaataaatgtgggtctgtttctaggctcttctgttctgattttgcctattatttgccagtaccatactgcttagttgttagaactttaaagtaagctttggtagttacttgggtaaacctccttttattattatccttcacaattgccttgtctaattttccatatatatatttttagaattaagtgctatgtaattaaaataacattgtagttttttgttgatgtattcaattttggtttttgaaaatatatatctagcaacctcattttttttttttttttcccgagacagagtctcgccttgtcgcccaggctagagtgcggtggcgcgatctcggctcactgcaagctccgcctcccgggttcaagcaattctcctgcctcggcctcccgagtagctgggactacaggcacccacgaccacgcccagcttattttttgtatttttagtagagatggggtttcaccgtgatagccaggatggtctcgatctcctggcctcgtgatctgcccactttggcctcccaaagtgctggaattacaggcgtgagccactgcgccctgccgaacctggatctatttttatgttaacttttcagcttggtggttcccagggtttggacttctcagcccactccaagcccacaagcttcctcgtattctctccacgtctgtgggctaatgtttttctcatgcaccccttcactgagggtgaaggtccttcaaagcccttcaaagatcctggtgttgacaagaaatctaattctacctccttgcctcacacagcttaagggctcaccttccatcccactgtggctgtgaaaacctgagctcttactgggggatgctgcctgtcctctagctccactgcccccatagccagcagttccagccctttacactctgacttcaatttcctattcatttttggcagttggaggatttccctttatttatctaaaaactgtgcttttagaaatgtgtctgatattcatacgtgtttataataggagggctattttcttccactgtcttcctggaattggaattctgccattaattataataatacattttatgcagttttaattttcactgtacttttttctgtaagagtgttatctttggtgtgctagattttatatatacactatcttaatcttcattaatgtcttttggacagtgtgttttaataaatctgtttcttgatttattaaatcatttgaattataagttttggtaaaaagaaatagccttaaaagaattatggaacttttaatggccgttagttacttatacaggtgctttatgattactgttaatttgtttttctacctagatcctctgccttgtcaatgttagtcacaatggtgtgagtgaatcagaactgatggaactctatcctgagatgtcctggactttcttgacctcccttattcacagtttatacaaaatgtgtttgttgacttatggatgtggcttgcttaggtttcaacatctgcaggtaatgttattttaggcatctttttatttatttatttaagaaacagggtcttctctgtcacccaggctggagtgcagtggcaagattatttctgccaaaggaataaattctaaagatctgctatacaacattgtccctatagttaacaatactgtagtacacttaaaaatttattaagagggtagatctcacgttaagtggtcttaccacaatacaatttttaaaattaaaaaataagtcagacacaaaagatcaaaaaaagtttcttaaaggtagtttatttcttgaagagaaaaaaagtctttttcaattatgtttcattgaattgcggtattattatacagtcatgcattgcttaacaatggggatatgttctgagaaacacatcattaggtgattgtatcattgtgtgagcattgtagagcgtacttacacaaatctagatggtacagcctaccacacatggaggctatatggtatggcctattgctcccaggctacaaacctgcacagcatattactgtactgaatactgtgtgtaactgtaagtatttgtgtatctaaatacagaaaagttacagtaaaaatgtggtatgaaagttttaaaacggtatgcctgtatagggcagcttcattataattttataggctcatcatcatgtatgcagtttgttgttgaccaaaacattgttatgtgcacatgactgtatatgtattaagagtttggactctgtaagccagtcagcctccttttcatggattaatgcctatctaaacttgggcaagatctaagccccaggcggactttggcagtttatgaaaggggttgtgaagcaaattaattgaggtcgttcttggtccttgtgaggtactagaaagatgtttagcacatagaagtaaatctttaggaagttttggctaaaataattcctatcatctgcaatgccatggttgatttatatatatatacaattgtaaatgaagtcttacatttgagtatgctgtatcatatttgtagatgtgaaatgtttgcaatttcacagcctttttcctttctttattgtgtattgtttgaatataatttattctttttagtaacttttcattccacacttctgagatttttaatgtattaactaaagtttgaattaaattgtgttttgagcttataaatattagtacagaaatttttattctagtaacagtttatcaaataaatatgtcctaaatttaaaaacatttaagtgacatttctattatacagctataaaataggaataattataaattcttttttgcaaatctcttgttagatgtacagtgacttacgtgaaatagaactcagtatttcttctttttctccctaggcttgggaaacagtgagattggagtacctggaaggccccactgttacttcttcatacaggcaaaagctaatcaactatttcaccttgcagctaaggtattgtaaatgttcctgttgttcttctgtaacttctgcaacacactacctttgtgtccttatttctgtttcttagcttacaacttaaagtacaaaaacttaattattacaaaaaagattaaatcctctccctattctgttaatgtcaaaagagcaaaagatgattttgtcttttaatattatgctaaaagtttaaacaaggaaaatcaatgtaggatcattttattatttttattttattccaatagtttgtgtccatgtatctgtatgtgtatatacgggtccattgagtgtttttttaaatagttcaattttaggaaaatacttttagagtttggttgatggttctgcatatcactgaatttattttcttagattggtaaagtctctgattttgacctaacttttttagtattaaattatacttaaagaatcagagatatatgttaaatatttttcttcctttgacatttgcctgaagcctttttgaagcagtctcattgtaggaagatattgaatattgtctcctctcttttgatagtcaggacagagtgacttggagaagtgcagatgaactcccgtggctttttcagcagcagggaagtaaacagaagctgcatgattgccttcttaatctctttgtgtctcaaaacctttataaaaggtaagaaacattatagaacatctttccccagaaagagagatttaaagttgttcagtttaacaaagaaaaaatggtatttttaatttaaaaattagtctaagtatctgaaatacaaatagtgtaggagaaatcttgagacaatttacaaatctctattagatctgcttttcccaagaggaaaacatagagtactgctgctttatgaaatcagagctggaatgatttcggttcaactttttatcttatgcttacatttaagcatgtctaaatttaaaccactcagagaggtggttcgtaatgtctgcttctttgggccttcagatatctgaaagcgtagccttcaaaccagactcgggtccaagtagaatctgtctggtgttgaatttatttgtttttgtttgtttgtttactttctatgtctggtgttgaatttaaagaaagaattaccctaattcaaaaatgtattctgtttgtctcttttgatatgttatagtttgtcagtggcagaactacctttttatgaggcaactgtctaacctactaagcttcatgagggtttttttctgccttacttagagatttagacatttcttatacaataagtatcataatttattttgctcctacataaactctctcaaatttgttgcatctcttatttctgatctccattccaatttttcatgattcctttgaaatcagatattttttagtttaccagccccatactacttaagatcgcctacagatgaataagcttacttttgtcattcaatttcttgatgaaaatacaaagtagatactctgtga

SEQ ID NO: 327 - DNA, 32742 bp, Homo sapiens
  source 1..32742: mol_type = other DNA
ggggtaggggcggcgccgagtcgggggagggggctgtgcgccgggctggcgcccgaccccagccaccgccctgcggccagcgcgtcccccgactcgccgcccggagaccccgaggctccaacgaggtaagtgaggcgcggagtggggacacagctcctccccagccccaactggggttcgcgatgccttctgtggccttcaggaccctcttttcctgtcctggtaactggccctggagccggcgggtgggcctttgacgccgagaggacgtggcttccgtgatcccagagccaggccttttcctggagatgggaaccggagcatctagccttatgcagggccaagaccatgctaactggcttccatgtttatatttaaaatctgtttactgagggatgaacgtacctcgcaggccgtgggtatccgcagggacagatacactctgtgtatccttaaaacaagtgcaattgaatgtccattggcctaaagggcttagagccttcatagcagggccttcctcagtgtattcaattcgggttaattttgctgtctgatttgcaaggattggtgttgtcatcttttaccttggctttgtccaagttccaggatttcttagaaatgccgttgacgaattcacgggcagagccagaatgtctgtctttaggcattcttgtctgcacagaaaaataggtaggttaaacatgcaactttttatctaatgtggttttgttcttgttaatggttcctttattttgacagttcagaaatgtccagaaatgacaaagaaccgttttttgtgaagtttttaaagtcttcagacaattccaaatgtttttttaaagctctcgaggtaagagttgaaaacatcttaataccgtgaattcattttcttgtttttaagtgtttttgatttgttgggctttatgtcttagaagtagatatttcactttcataataattttatagtctacattaatacagatatatcattatcacatatttttgaattgatctaagtacatcattatgtatttcggggggctggaagtctattatcacattgctgtttaatatggctgacctacagttcttggaaattaagttgctttcatttgtctcctagccagagtggtcctttgcgtgctgtagaaatttgagtcagttgtgtactggtcatacttgaaaattttttggttaattgttaaaaattatgttttattatgtacagtataataattggatgatagtaggggtgatgtagatccttgcttctcacagaacccagcagtatcagcatggcctggaagtttcttcgaaatgcagaatcttggcctccaacccagacttagaatctgcatttctaacaagatcttcagtgtgcattaaagtttgagaagcatttgtagcagatttttttaaacttcattcattcagcaagtatttattgaagtgttcatgatttgataggcacttctctagtacttgggatttatcagtgatgagaacaggcaaagatttctgttctttcagagcttacattctagcaggaggacatagacactaatcagacatgataaattaggaagagaaaaaagcaaaacacgttaaggggttccagaggatgtttcttggggtgggaagagaagggggttataatcttaaatagggtgtgatcagggtaggctttatgaagaaaaagatattgagtaaacgtgaaggaggtgagatagccttgcagatatctggagaagaatgttgcaggcagagagagcaaccttatacagcccctgggaaagtgcctgtagtctctatccaagtttagtgtactgttgtgtagtgagtgagggatgggggaagagtactaaggaatgcgttagagaataatggtaaagaggtcatgtagggccttgtgggccatttttctctcagtggagagccattggagggttgataatcagaagagtaaacatgatctgacttacagttttaaagggattactgtatttaacataaggacctcaaaattggttcagaacatttctgagtgcttactgggtgtcaggatatagtagcaaacaagatacatagaaacttccaggggagagagacaaaaactatatatatatatataaatacgtatttttaaatagaatagactagaagggtagaggaagggtatttgagaaagcctgattaggatgggcatctctggggaggtgacatttaagcagacctgattgaagtgggggattaagtcaggtgaaaacctggaaaaaaagtattctgtgctgcaagatcaagagcagagcctctaaatgaggttatggttggcttgttccagggttggcaagaaagcgggagtggctggaatagaataagcaagagagatgagaagtaggaggtaaaggtggaaagataggcaggaaaccagactgtgttgtcttgaaggctgtagtaagaaatgtggattttattctgggtgtggtgtgaagacattaggttttgagcagatagtgacatgatctgacttgtgtttttgaaaagattattagctgctgtgtagagaacagatttagggcaaggaagggaaaaagagaccacttgggagccttctgcagaggtctaagtgagatgtgatggtggctttcaatagggaaaaggctggatttgagatggaatttgaataggacctaaatacaggagagtaatttcaggtacattcttattttattttttctttcagtccataaaagaattccaatcagaagaatatcttcagattattacagaagaagaggcattgaagataaaggagaatgatagatcactttatatctgtgacccttttagtggcgttgtctttgatcacctcaaaaaggtttgctgacttctagtgtgtacctttggtagtctattttttggtttatctttgctttaatggacatacattctttgcggattataaagtactatgcaacttatgagtacattggaattcttttggtttggcaagaccaggattgaaaggctaattatgttacagtaggctttttttgtttgtttgtttgtttttgtttttgttttttggagacagagtcttgttctgttgcccaggctttagtgcagtggcacaagctcagcccactgcaacttctgcttccttggttcaagtgattcttgtgccttagcctcctgagtagctgggattacagatgtatatacacacccggctgatttttttatttttagtagagaaagggtttctcgatgttggccaggctgggctggtcttgaactcctgcactcaagtgatcctcccacctcagcctcccaaaatattgggcttatagatgtaagcagtaaggcagttttcagtgaaaggggcttttgaagtttatttcttttcttttctttttttttttcttttgttatagggtctcactctgtcgcccaggctggagtgcagtgacgtgatctcagctcactgcaacctccgcctcctgggttcaagcaattctcttgcctcagcctccctagagactgggactgcaggtgcccgccactgcacccgactaatttttgtatttttagtagagacggggtttcaccatgttggccaggctggtctcgaactcctgacctcaggtgatccacccccgctcggcctcctctgaagtgctggcattacaggcgtgagccactgtgcctggcctgaagtttatttcttttgatagcttgcattgtttgatttgcttttgtgtgtgagtgtttaatgtatagtatctctgagaaattatatagtcatctttatttttttcttgtaatgatttgctgatttctctacagtggtcatcaactttggtaaagaattggtgaatgttacaaaatgtaattttgtaagactggtggtcttttccttcttaactcatttaaacttttctcttttttgtagcttggctgcagaattgttggtcctcaagtagtcatattttgtatgcaccaccagcgatgtgtcccaagagccgaacatccagtttataatatggttatgtctgatgtaaccatatcttgtacaagtctggaaaaagaaaaaagggtagatattgatctcatgatgattgatcaatttatatatctatctcttattcttaatttttcactgcatagaagatagcttaaaagactttccgcttattgttcgtgacttttaacaaagttcagtatacaaccacagtgtgtatatatgtatacatgtacattttttaagtaaattgaatatagtagaatttgttttgttgaaaactggctaattgaaattttttgttttaatttaaaaggacactcattttttaatcacttacatttttccactataggtggacagtctttaaaaaaaaggattctaaatcgtttgaatcagggaggtggaggttgcagtgagccaacatcacgccactgcactgcagcctgggtgacagagcaagatttcgttttggaaaaaaaaaaaaaaaagcattctaagagagagctatagaaatacatatatatatttgggacagggtcttactgtcacccacgctggagtgcagtggcacaatcacaactcactgcaaccttgatttcctgggctcaagtaatcttcatgcctcagcctcccgagtagctggaattacaggcatgcaccaccaagcctggctaaaaataaatatttatatattatatagatataatttatgttgttaaaaatacacatgtatatttatatagaagcaaagattaagatttatacatcctttgtataatagtttaatacattcatggagttgaaagggataaatataggaaaataatattttaaaaatataattcatacttatctcccaaaaaataatttggttaattatttaactttataatgttatgtaacacttatgtattcaaactgtcaacagcaaaatgtatttatgagatagtgtataaaagtggaagcaatattgtttgcttcagcattaatgtgttctcttttggggctgcaggaagaagttcataaatatgtacaaatgatgggcggacgagtatacagagaccttaatgtatcagtaactcaccttattgcaggagaagttggtagcaaaaaatatttagttgctgcaaacctgaagaaacctattttgcttccctcttggataaaaacactttgggagaagtcacaagagaagtaagaaagacatttttatattttctagatttgaaaaaatgatgcattcaatcatttttggcatgtgatatactctttggacttactattcagggaaaaaaatagtgtcattactcttttctccagcgaaaacggaagagcagaatctacaagctcttattaccaagatataagttgacaggcatagaatgggccaagggtttagcattagctacagagtaggaaatgctttggtgataaagttctcagctgtaaatatttctgaaataattgagaaaacgagtttggcaattctgtagcttttatgttgcattatccttcaacaccattcccatatgttaagatagataataaattagtcattttggcagttgcattccttccaaaagatggcatatgtaaggttgaatataaacatatgcaagtcatcagctgagatgtgatcatttaataaatgctaattgagcccattttacgtatctgacttgaggtaggcattaggtatatgtagtaagcaaaacaagatagtcacttccctcatggagcttagagcctatttcaaggggcacacttcagtttcccctgcaactagataaacaaccacaagaccaaacaccacagaattgtattggcatacgaattatatcggcacttttctgggcttgttttcaacaccatccagcatatcccaaatatgtctccatgtcagcaactctcattcccaatgtgattacttcatcagcacacctccctagcatggcaacagaataatgatatttttgttggtattttgccaaaaatcattgcttttacttgtatagaataatggaaagattaaaaagttcatttatctaataggcaaccaaattacctttgggtttttaagtagagattcagacttatcattttggaaaatatactatgaccagcaagggctagagttaaggaaatatatatttttcccttaaaatggttttgagagactgtatctgaaacaattactttgttttagagacatgttattgaactaggtgaacaattagtgtaattctgttttggtggttctcctttgtaaaaaaaagattataaatcctaaaaaatgagggaagcaatagtgatatttgtgttgtttttcattattcttctggtaaatttaatatgttcttttttaaccatttgattcccacagaaaaataactagatatactgatataaacatggaagatttcaagtgtcctatttttcttggttgcataatctgtgtgactggcttatgtggcttagacaggaaagaagttcagcaactcacagttaagcatggaggtcaatacatgggacaattgaaaatgaatgaatgtacacacctcattgtgcaagaaccaaaaggtaaaactgtgtttcacaaagggacaaatgaaacattttctctagtatttaatattttatttttatttatttatttatttattttgagacagagtcttgctctattgcccaggctggagggcagtggcacaatctcagctcactgcaacctctgcctcccttgatcaagcgattctcccaactcagcttcccgagtagcgggattacaggcacctgccaccacgcctgaataactttttatttttagtagagacgggctttcaccatgttggccagactggtctctaactgacctcaattgatcttcccacctcaacctcccaaagtcctgggattacaggcatgagccaccgtgcccagccactaatatttaatattttaaaatctttacagaacagcttttacttctgacatgtcattaatctagtttgatactgttttctctaacatcttgcaaagatgttttctctaacatcttgcaaagttttaactggaagacacaccttgcggcacatgaggcagtaaaaaatgaaaaagacattacgaacaagaaaaattctttaaaattgctattaagtttggtgttacataacattattctggataattttttatcagcactcttaaaatatacacaaattgataaaagatgagttttgttaatgtttttattattgccctttatatgtatactgtgttttactaagctatctagattgagaagaaattacgattaaatggtaattgtccttaagtcagaactttgagtatggctgattgtgataggatcactgtgagtagagttgatactgctgttctttttctgaatctgaagacagttcattgttgattctctcaagaatgccaaaaaacctttcatgtgacatattgacctcaattcctctgtgatactgcttcaaaatacattgtgttgaagatttttaaggtaataaaagatacatattttcaatataatttatcttttggcttatctatcctggactttaagtagaagcctgttgacattggaatagtctgttcaaagttgggatttattatatagcacaaatttacaattttcacattgtacaagctggtttaaagaaattaagtgatggagcctatatgcaaacccaagtccaatattaattaagttaccccacagttgcttctgtcttcctgcagtttgtataaaagataaaacctctcacatggcatatgtatttatactacacatagaaaatataattaggcaataagctaaaatactactttgtaataaactgtgtagcatactgtttaagagtaagtactggtaactttaattttgttgataggtttttgaaataacctgttatagccgggcgcggttgctcacgcttgtaatcccagcattttgggaggccaaggcaggcgaatcacctgaggtcaggagtttgagaccagcctagccaacatggtgaaaccccgtgtctactaaaaatacaaaaaaattagccagacatggtggcacacgtctgtaatcctagctattcaggaggctgaggcaggagaatcgcttgatcaggagggaggtggaggttgcagtgagccaagatctcaccactgtactccagcctgggcaacagagtgagactccatctcaaaaaaaaaaaaaaaatattaacctgttataatttgaatatttctgcaaagatagattgtaatggttttcatttcttggtttctcctattttctctatttctttcttaatgaacgccacaggtcagaagtatgagtgtgccaagagatggaatgtacactgtgtgaccacacagtggttttttgacagtattgagaaaggtttttgtcaggatgaatccatatacaagacagaacctagaccagaagcaaagactatgcccaattcttcaactcctaccagccagatcaacacaattgatagtgagtctcattgagattaaaataattattctgaagacagtcatatttctatgtaataatcagtatgttaataggatcactgagatagggaatttctttttcttgtttgctgtgcttctaggcataattgtataatagtcaaattgtataaaaagttagcactgaactgttcgtaattttcttttagaatgaatgaatgctgtcttttatactctgttgtaatgcaaaagatgatcaaagaaattaagaacaatggtagctgggggcttaagataaaagtattaatcttttaaacattacatgcatatattaatctttccttaatttacagttttgctgcagttatagatcatctgtatttgtataaaaattaaaaccatttctattttgtaggtgtcgtgttggcaaaatgtttaaaatattttttcaaatgtaagcttcttggaccttaaagtcagcaacttcagatttttatgggaaacaagacactattaagaaaatgtgttaaatctattttcatttaaataagataggaggcttaattaatttcattttccctttttatactttgccactaagatttcagtaaacacccctgaatcttactttggaagttgtttattgccctatatttgtaagaaaagttaatccatagacaatatgtaatcatgattattttatctcccataaatttatacgttttcaaaatatgtaggtcgtactctttcagatgtcagcaatatttccaacataaatgcaagttgcgtaagtgaatcaatatgtaattcacttaacagcaaactggagcctacacttgaaaatctagaaaatctggatgtcagtgcatttcaagcacctgaagatttattagatggttgtcgggtacgtctttattatataatacatgcagtagatgatatacattagcatttcctagcctgactttgaagacccttcagagttgggcttgctccttactatctatgtaaaccctccactctagctaagtagatgcacttactagaccatgtccatcctttggctgcgagagtccctctgcctgcaaggtatcttcctctgttatcttttaaaagttcatttcaggttttaactcttctctgaaccctcctaactacattaatcttttcatctgctatatttcgagagcacttagtttctgaacaacttattggattttttttttttaatttttttgagttagggtctcactctgttgcccaggctgggatgcagtggcacaatcataacttcctgtaaccttgaactcctgggcatcagccacccctcagtctcccgagcagttagaactacaggcatgtgccactacacctggctaatttttaaaatttttttgtagagacaaggtctcactatgttgcccaggtttggactttaaactatcatccaagtgtttacagtgtattagacactgtgctaatcattttatgtgtgttaatatatatataaaatcgcatttaagtcccacaaataactctaaaatggatattatcttgagggtaagacttagagaattaaaattcttgttcagagtcacacagagagacattaagtggccagttatctactccaaagtctgtattcctcaccattagagccactgctttgtttggtatttcttgggttatttagttttttagtatatgaataactgtcttataagtttgttgatggaaacagcatatgctatactttttccgctgtcttagattggaatacttaatgtattcctatttgtagaatgacttggctgtgcactaattttcacagagtagcaaaaatttaaccctaccttattgttaagaagggaaattggagctgggcttggtggctcatgcctgtaatcccagcacttttgggaggccaaggtgggcagatacctgaggtcaggagttggagaccagcctggccaacatggtgaaaccctgtctctactaaaaatacaaaaaaaattagctgggcgttgtggcaggcccctgtaatcccagctgcttgggaggctgaggtaggagaatcacttgaacccaggaggcggaggttacagtgagccgagattgcgccattgcactccggcctggtcaacaagagtgaaactccatctcaaaatttaaaaaaaaaaaaaaaaaaaaaaaaagggaaattcggcaaattaccttttttttttttaaacttgccaacttacaaaaggtgggttttttgtttttgttttgagacggagacttgctctgtcgcccaggctggagtgcagtggcgtgatctcagctcactgcaacatcttcctcttaggttcaagcgattctcctgcctcagcctcctaagtagttgggattacaggtgcatgctaatttttctatttttagtagaggtgagggtttcaccatattggccaggctggtcttgaacttctgacctcaagcagtctgcccaccttggcctcccagagtgttgggattacaggcatgagccaccacacctggctcagaggtgttttgtatgatgttttatcctagactactaattctagatatagcttttaattatttcttacatatagaaagtatatgattccaaatatttgttaaaatatattctagtaatgggggtgatttaatttggggtataaatgcagtttggagtagatttgtcatacttaaatttttttaagggcaccttatgtaaaatagaggtaaaatgattttatattgattaaattggtttaaatatatatatactgatagctaaaaataaattactgcatacatgttatcctcaaagcattgtgttcagttctttgacttatatatattttttgttcagtcaactctgtgagtaaggtaacatcaatttataggtaagaaaattgatttaaagagcgtaagcaacttgcctattgtcgttaatcataggcagctggaaaaaacaacccctccccccgccccccacacacacacaatttaagcccaggtgttcagaattcagacagttaactacagtttacttttataattactttaaaatttacaagtaagcttcacagttaaagaagttacctgcattttaggaattggtatgcactaatatttagaagatgttggactctggcttctattttctttatagccacaaaatacttatcaagtatctactgtgaaagataatgctgtatgagattgtaaagagtgattaaaaactcaaagttgcagaactgttaaaaaatcaaaagtttcagaatgtatttattcatatatcttaaatgtacacaagttgtcttatttatacacagtggatttagatatatatttttagtttttttctattgagagaaagcatgttatgtatattaaatattttctttcttgcagatatatctttgcggttttagtggcagaaagctagataaactgagaagacttattaacagtggaggtggagttcgttttaaccagctaaatgaagatgtaactcatgttattgtgggagattatgatgatgaattgaagcagttttggaataaatcagcccacaggtttttttcgtttttaattcaaagcaatttctactacataatttttcttaaaattgcatatccacgcagttctggaaactgcatgacaagtgggatgatggtctttatagcttgcactaatacataactatgtgctatttttgtaggcctcatgtagtgggagcaaagtggttgctagagtgtttcagtaaaggttatatgctttctgaagaaccatatatccatgctaattaccagccagtggaaattccagtttcacataagcctgaaagtaaagcagctcttttaaaaaagaagaacagcagcttctctaagaaagactttgctcctagtgaaaagcatgagcaagctgatgaagatctgctctctcaatatgaaaatggtagctccacagtaggtaagaaatgcttgattagtatttgtagttagtaagaaatattttagtagcctaatacgtacatatgtgatttctgccaagttttctagattttaagttaaattaacctttttctttccttaaaattttcctcataactttttttctgagcaggcaagacaagagggtcctgaaccctttaaccctctctcctgtctccagctaactagctctattttgatttgttatatatacaggcattgcttggtttgtgtgtgagtttgtaatatcatgagccttttattaaaaccttgtaacaaatacctcttactggattattgtggtctttaatgcatgaaactgtactgtggactaccacctcagtatgtactcttatcatgtagtaaggtaaattgccagtgaagcattataaacatcattacttcttttttattaaaaaaaagcctttataaaatacctaatatagccaaaaatatatacatttaagtaaatttaatgtgtatcataacttaaaatctgaagttaatcagaattttaatctacctcgaataaaacaagaaccttagaaaactttttttttttttgaagcaggatttcgctcttgttgcgcaggctggagtgtagtggcatgatctcagctcactgcaacctctgcctcccaggttcaagtgattctttctgcctcagcctcccaagtagctgggattacaggcatgcgccaccacccctggctaattttgtatttttagtagagatggggtttctcagtgttggccaggctggtcttgaactcccgacctcaggtgatccacccgccttggcctcccaaagtgctgggattacgggcgtgagccactgagcccagcctaaaatactttaatgatcacaactagccctgctccctctctccactcatcaacatactcagcttatgtgattttgtctagtattttcattatcttttaacatcttacaattaggcgttattatgcttttatatggtcagtatttgtttcatttactaacacgtttaactgtttctttgctctccccagttctttttacatctgagacctctcttttggaatcattttctttcttcctaaaacaatatcctttagaaactcctttagtttctctaagactcttcggctgggtatacagttctagacagtttctttaagcacagagatattgtttcattgtcatctatttccctgactgctggataggaggtcagatatcagtctgtcattcctttacagataatctgtctttatcctctggctgtttttaagatagtcttccttttggtttttgtgtcctagagctttaccatttatttgtcctgcttgagattcactgtgccttctgaatctgagaattagtagattttttgctttttgttaggtcaagaaatgtttattatctctttgaatattgcctctcccccattctctatattctcttaactcccatttgctttgcatataggtcacttaacctgtccttatcttccatctttttgtctttctgtgatttattatgtgtaattccttcagatttttttccagatcacgaatcatctcttccgctattgcctaatctgttttacccatccattaaattttctgttttaataattaatttttcaattcctagaagttttagctttttaaatagtctgtcatttatttttttacttttaaaaatagagatggggtgctactatgttacccaggctggtcttgaagcacctcagcctcccaaagtgctgggattgcaggtgtgagccaccacacccagccaagtctgtcattttgtatttgtattttttgttctttatttcttaaaacacattaaacctatcaaaacatctgtgaattgttctgttggctgttgtttatggtgcctggttttcttgtgttttgtgatttttattgtgaacttgtacttactaggactctaggaattctaagaaacttggggtaggggtttgttaccccagaaaaggttcatgtttgggtctgctaggtgcctaggagtttacaaactcaatatgcctttaagttggtgtattggctggaggtttcttagacctccagctatatgaatttatacccaaacctactttgaggaccagcctctgatgaacagattcttaggagagatgttgtttccccttgacacaaagccagtgttcttgacctcttcctttacagggcagatttgttgttggttggttggttagttttggtctgtttactaaagatatgtctcttcatgggttctgggcttgttctctcagggtatactctccttcacctctaagttttatgaaaccaaaggattggctcctatctcttgtgtgatacctttacattccaagggtctgggttactgcacagatatttaatagattttgactaaccattagctttagtaactacttaatgttctggatttagtaaccactttagtggtctggattttaatattttatcctgtattttgaagtgtttttagtgagagtgtttcaaagatcctagcccaccatatttctagagagggaattcctagcattccttttttatttacactatttccgtactacaaaattgacttttctcaaaccatttacttatgctttagtattgtatcacatcaggaaatcatcttgattttccaggatgctgtggtataactgaaagtgatttttttttttttttttggagacagggtctcactccatcactgaggatggagtgtagtgtcacaagcttggatcactgcaacctcctcctcccgagttcacgcaattctcttccctcagcctccttagtagttgggagtacaggtgtgcaccaccacgcccagctaatttttgtatttttagtagagatggggtttcaccatgttggccaggttggtctcaaactcctggcctcatgtgatcctcctgtcttagcctcccagaatgttgggattacaggcttgagccactgcacccagccagcaattttacatactatccttcagccaagggtacttggtgtagggcaggtgattagtttcttaaaccttcctaagacagctagtggtttactgactttataaggattaagtgatggtaaatcttagtggatcaccaagcatcttagaaagtctataataaagtattttataattaattcttaaaatggcttttgatttaagggagttttttgttttttttttgagatgcagtcttgctctgtcaccaggctggagtgcagtggcgtggtcttggctcactgcaacctctgccttctgggttcaagtgattctcctgcctcagcctcccaagtagctgggattacaggcacgtgccaccatgcccagctaatttttctatttttagtagagatggggtttctccatgttggccaggctgctcttgaactcctgaccttgtgatccacccacctcagcctcccaaagtgctgggattacaggcatgagccaccgcgcccggccctaggggagctttttgaatgataggtttattatgtagtatctcttaggcttttgggtgcggtctgtttgaaaagagatcctactgctaaaataaacggaaagaactgctgtagaacatgttagtttattatgagtctcttaataacttcagagttttactgatggtttataagaacttagtatttctactttgtttttatagtagtagtctaaaattctactggatttcttcctccttcccatcttaccaacaacatatagacgtcgaaaaaagttatttttttctcctagatgtgactgcaaaataattgtacttgcaaaaaataagaaggtttttacttataaaacaaactttacattttaacaaaactgtttaaaaaactttccggaatgttttatagtattgcctcacctttaattccatctaagcatattcattcccatgagtatatctgtaaattataagtatactattaccctttattccttatattatgaaaccaagggtcaaagagactataaaactagaacccagctctcctgacttactgaccagtaaactccctagacaaaactatgcttccttagtgcgaataagtacaattttaatacttatgtttagtaggagtcataagttcctaatatatattgcagtgtacttaatttacaagttcctaatgtatattacaatttacttaaaaatgaaaatgctagtgtctgttggagatgaggatagaagtacgaagatggcactataacatggtggtgtgaactctggagttagacagactttggtttgtatctcatttctgccacttaactgtgtgaccttaggcaagttacataacctcttcaagcctgagactccttttgtacaaaagggatgtactgatagtatcagcctcacagttagcattatgtgagcattacatgcatttgtaaagcacttagtcacagtgcttatataaatgaaagagtgattcttggatagcttccagccttgttggaatcacatagcagggcaaactttttctctaaaggagtagacaataaatattttaggatttgccagccacttccttatagttatttccatgttaacatgttccatgttaaggacttgacagttataccatttagacttgttaatttttttcttaatgatagtttcttaattttatggtgaatcatctaaaccagttttggaactaagtcctgttggagctatataattttaaactaattcaagtttccattatactaggaatacctagaactaacatgattgctcttgtccttcccaatggatgatggtaatactgataaggactcttggtaaccccgaagacggggtgaatccatatccctttattatacacgtaagctttagttttgtaagtatggtcaaaattatcagattccatgttacgttaatatccttgctaggaagtaaactgtataaggtaaattgttggttagaaaacatttacttttctctttcagttgaggctaagacgtctgaagccaggccctttaatgattctactcatgctgagcccttgaatgattctactcacatttctttgcaagaagaaaaccagtcttctgtcagtcattgtgtccctgatgtttctacaattactgaagaaggcttatttagccaaaagagtttccttgttttgggttttagtaatgaaaatgaatctaacatcgcaaacatcataaaagaaaatgctgggaaaatcatgtcccttctgagcagaactgttgcggattatgctgtggttcctctgctggggtgtgaagtggaagccactgtgggagaagttgttacaaatacatggctggtaagacaacactagtggttgaaataaagtatcgaaggatatctgaatgccaagaaggttaatgtttatttcttagacagttcagttacagtaaatcaatgcttggacttgaacactcttgattttgcttttagcaagggaaattcaaaattaaatgtgcaagcttcttggcctaatcccgatacagtagagattactgtttcccagggccacagcagcaacattccttcttaggaggtcactctagggtcatctcatactatttgtcttgttttctcataaccaaagcatcactggtaatttcactgttgatttttttttttttaacattccaagaattatgagaaaaatagtataaactaatacattagaaggaatgaaatttaaagcaacattcagtaactctaataatagatcttaccgattttaatagcctaatgtaattagtcgatgtatgtatatgtgtgtatgtatatatatactctaacattatgatatgaaatgtattgagaatgagcatacacaagtttgtattaaagtaaaatttcttcttatcaaaactaaattattgcttctgtacctgaaccagtgttaaccactggttgcttatttcaggttggctttactatttcttttgtttttaaaaggttacttgcatagactatcagactttgtttgatccaaagtcgaatcctctcttcacaccagttccagtaatgacaggaatgactcctttagaggattgtgttatttcatttagccagtgtgctggagcagaaaaagagtctttaacattcctagcaaacctccttggagcaaggtatgtaatatttttaatgcacctgttgtattggtgtatctttttatttattttgacttcttggagagcattcaaattagaatttggttgggtgtctttattatatttatgagtgttatgtggttccttctccactcccactgcttcacttgactagccttaaaaaaaaaaagtgcctctgttgtccaaagatgaaaacttaggtatcattagaggtaataactgcagtgggtccaaacacatgaaatagtgtttaagttgtgacttcataatgacaccaaataaagtaaggtaattggtcatctttgaaagatgctagagaaccagtccattactttgaaagctgacaaaaggaaaggatcaaggaattaccttgcatttcctgtgcagtttgcatcagggtaacatgatagtggatacgacaaagtttccctttataaagatgtttcaacaaacaaataaataaataaggaatgataagactgtaacccctaatgaatgaaagaatctaggcattgaacatcaatagtcgatcacacaataaagggacaagacatgatgtgccttcttacaaagaatacaccaccactttgaagtagtcttgccaaaataatcaaacctcaatctgatgatgcttctagatccaattcccaatttataggaaatgcaaacagcagaataacacgttaaactatactacagtgatataatcagcaagacccagactttagtacaactctggcataaatgatccagtgtcttcaatgaatatatattaagggcatggaaaagaaggtaggaacctataagctaaaagacttgaaaaagcaaaagcctaaatgtagtctttaaagttgccattatttgattatagaaaagtaaagaagtgattactataagtatccaaataggccaagcacagtggctcacacctgtaatcccagcactcgggaggctaaaagattgcttgagctcaggagttcaagaccagcctgtacaacatagtgagacctcgtctctatttaaaaaataataaaaaaaaatgagccaggcatggtggcatgtgcctatggtcccagctactcgggaggctaaggcaggaggattacttgagcccaggagaccagggctgcagtgagctatgatcacacaactatactccagccagggcaacaaaatgagatcctgtctccaaaaaaaagcccaaatagtggctactattaagaagggagggaagggggtttatatggcatgttggagaggttctggggtagttagcaagattctgtcttctgacctgggtggtggacttaagggtttcaccttataataattcgtatagctgtatatttctttttttgctgttttctgtttgaattatatgaaataataaaattcttttaaaactgaaattgtggaagataataacatacatgatgacagactccactggatacagctaaagctgtactcagcaggaaagtcatgcaaattctgaaatagaataattgggactagccctaacagttattaaaatatattttgtggccaggtctggtggttcatgcctgtaatcctagcactttgagaggccgtggcaggaggccaagttcaacaccagcctggacaatatactgagaccctgtctttacaaaaaattttaaaaatgagccaggcaatgtagcataaatctgtagtctcagttatttgggaggctgaggtgggaggattgtttgagcctgggaggtcaaggctgcagtgagtcacagtggcgccactgtactctagcctggaggacagagcaagaccctgtctcagaaaacaaacaaacaaatatatattttgtgaaacttcactaaataacagtgtggttacgtgtagcagaaagtttaattaatggacagcaaatgtagcaggagacccaaatgtaaaaaggaatttacgatacaagtgacatttcaaatatatataaggaagacatggcttattcaataaataggattcattaaagttggagcagtatctcatatctaaataagtactgaatggattggtgggttaaatgtaaaaaatgaaattataaaagtactaagataaacacaaaacatagaaaaaaaaagtgctaggaaacatgggaaatttaaaaatctgaaaagttgggaactagaacataaaacccagaagtcataaaagaaatcacggaattctgttcaatctcaagtcgtagacttctttttctgccccgtattctctgtgtttaatatcctatgatcttgaggcacttaatttctctgtattttttcccatgtctatacttaaatattgagaggatcaaatgagataatatgtagaaatgctttggaaagttgtagtaggttaaaaaataataataatgttatttatacactttgctcctgtcattttttctgtgccttcttttgggaggaaaggacaaggtgtgggggtgataactaattaaggaggtaattttggctgtgtgaggtggttcacgcctgtaatcccaactttaggaggctgaggcaggaggatcacttgagctcaggagttcgagaccaggctaggcaacattgtgaaaccccatctctacaaaaaatacaaaaattagccaggtgtggtggtgtacacctgtagtcttaggtactggggaggctgaggtgggaggatggcttgagcctgggaggcggaggttgcagtgagctgtgattgtgccactgcactccagtctggacaacatagcaagaccctgtctcaaaaggatttttgctgtctgttctttgcatgtctaattatgtttttataaaaagtttgttacagcaatacatttttaccctagagtaagcatttgtaaggggattagcttaatttcagatagagtaaaccaacttttaatcagtatttttttttatacttacatgatctctaaccacactgttgtgttggaaattttgttagttttgcgggttaattgtatatgtgaccatttccacttctttaaacataaatttcagtgttcaagaatactttgttcgcaaatccaatgcaaagaaaggcatgtttgccagtactcatcttatactgaaagaacgtggtggctctaaatatgaagctgcaaagaagtggaatttacctgccgttactatagcttggctgttggagactgctagaacgggaaagagagcagacgaaagccattttctgattgaaaattcaactaaagaaggttaatacttttattctgttcttttatatatatttacaactagatggtttctgggatataaatgtgccaatgcttgtgtttaggaagggtcattgatttttgcttttcacattgggtgcagtgagggtctcagtgttcgaagtctacagatgtaagcttggctcctatttactgttgattctttctatggctcatagtaacacactatataattaacatgctatctctcctcttatctttgggcttctgcatgtttcctgtagaccacctcacagttgcctgctcttcctgcttatctttcagttctcagctaagataccactttccctgggaagcctttcattttttctttttaattattattacactttaagttctggggtacatgtgcacaatatgcgggtttgttacatatgtatacatgtgtcatgttggtttgctgcacccattaattcgtcatttacattaggtatttctcctaatactatccctcccccatccccccatcctacgacaggccccggtgtgtgatgttccctgccctgtgtctgttcaattcccatctatgagtgagaacatgcggtgtttggttttctgtccttgtgatagtttcctcagaatgatggtttccagcttcatccatgtcccgacaaaggacatgaattcatccttttttctggctgcatagtattccatggtgtatatgtgccacattttcttaatccagtctatcattgatagacatttgggttggttccaagtctttgctattgtgaatagtgctgcaataaacatatgtgtacatgtgtctttatagtagcatgatttgtaatcctttgggtatatacccagtaatgggatcgctgggtcaaatggtatttctagttctagatctttgaggaatcgccacactgtcttgggaagcattcttgactcaccaaggatggcctttgtcttggtataatgttttttgtttcaccatgacactctgtatcatcccttttatctcttacctcagtgttataatggttgtttattttgtgtcttcctgctaaatttaaagttccagaaaggcagtgaacatgcatgtcttgtgaattctgtatttcccatgtctaacactaggcctggcatggagtagctatctaataaggttttttgttaaatgttgaaaaaaggtggaaggcataggtggaagaatacagtaccctctcttgtaagataatagcatccatgggcaaacttcagggacatatcagcagcttgggaatacctctcagagtcattacttattttgccagacagactggtaattttatgactgaggctaagtgatgttcaggtcatattaaaatttgattaaggactttccaaaactagactgtagttaactctgagtacctgtaattgagatttttctttttactctgtcattgactagaaagacattcactgataacaatttttggcaaataggcttattgagacatagcaagatgaaacaggaaatctattattattttttcagttaatgtgcttgtctaactcaacatatatttaatgcataatctggtttgtttcttggaaagtaggtatataattttgtgatttaaagtgtacctgagaattgacatgaaaactaacagattaggatgccgaggtagatggatctcttgagcccaggagttatgcaagaaagaaaggaaagaaaacagtataaaatattacttcttgtgtaccgggaaaaagtgggcattagtggctcatatttgtttcttttcattttaaatctctagaacgaagtttggaaacagaaataacaaatggaatcaatctaaattcagatactgcagagcatcctggcacacgcctgcaaactcacagaaaaaccgtcgttacacctttagatatgaaccgctttcagagtaaagctttccgtgctgtggtctcacaacatgccagacaggtcgcagcctccccagcagtaggacaaccacttcagaaggagccctcgttacacctggatacaccatcaaaattcctgtccaaggacaaactcttcaagccttcctttgatgtgaaggtaaggtttataggcagtggtcccagagttaacagttttaccgtttataaagttaaagcaccaaatttggcatcacctctgaagtgtagtaataaattttccagagacattggcaagtagatttatgttactgagtttgaacgttttgagtcccagcatacatttagggttaaggtaacagctatagataaatatggtgtgaaattaggacatctgggttcaagtactggatcgatcttgaactgtatgactaggccaatcatttaacatatctgagcttcagtttgttttttcatacaaagaagataatatttgctctgaaaattcatagattataaagatcaaatgatgaaatcactttataaactataaaatgtaaacacactgatactttatatattggttctcagagtacacccgggatttgccttctgaaaatgtgtgtatatcaccttacttgaattgtttcctgtaaagacatgagttaagtctgtgttttagtttgatctcgtgagcattgtagtatggctccctttctgaaaaatgcatttgtaaatcaggggctaatgtaatcttccaaataattttctttgattttccaaaactgattttcatcattatttctttagtagcttttgacctcttaagtggctgttcaaacccactgtctatgatttctttatccacgaacctttgaagaattattttactcattcacgtgttgatatttttgcttgtagggtatttagaagcaatattttaataatttttattgtgttttggagtggacttactaaaaagtttatagattattcatattcagaaaataaatattaattgatatccaggacagttttccccaagctaatttatgcctttatttttggtcagaattccagtgacgcacattaaaaaaagtgtgtctttactattaaactcaaaattctaagttttcacatgaaatctcttctgaggtaacattttgtactgtgattaatactcaggtccatatcccttaagacatagaggaaaatcagtcttgagaactgtgaggtgtaggatcaagcctcttctttgcctcctactgccttttaaaagcaagtcaacctctttcggcttcattattctcatctataaaatccagatgatctctaaagtgtcatagctcacagactctctgaagagcaaatgtaataatattggtgggcaagaaaatagtagagatattttcagtcattgagaccattcttatatagatacattgcaataaaagttttgcagtggaaagctgatagttctgaatagcctcaatacaaaaaacacattaaagattttattgtttagagtcatagtttattgagcagtgtttttcctcttttttctttcttttttgatggcacataaataatgcttcatcttataatcttataagcattataatgcttcatctataatcttataatcagatgataatcttatcatcttcaaactgatataatatggtatgttgaattctttacttaaaacatgaaagggcccatggaataatcacaaaattgaccatctattaggcctcacccttgcccccctcaaaaaaactcaccacttatttaaacttaatttttaattaatatacatcagagcagtacaataaatatactgctaatgaactatcagggttaatcattgagaagccactatacacgttcagatagagaccatggtcagtactgtaaacccttccttgtggctccatcgctgcttcctccctaaagtatactcctgacttctaataactatagttttgttatgcttgtttttgacttttaaatatgtggaatcatagtatgtattcttttgagtctgttttttttttattgttctttaacccttatttagatttgtctgttttgctgcatgcaaatatagttcatttatttattcctttgtatggatatacagaatttacatttccagtgtactgttgatgggcatttagttggttactagttttttgcccttacaaaataattttactgtgaacattcttgtgcgtgtctcttggagtctatgtgtgtgtgttactatgtggtatatacctggaagtgaaattgttgggttatatttcagcttcagtagagaatgacaaattttttgccaaagtgattataccagttcatgcttccaccagtagtgtgttgagtgtacccagtgttcctcatctttgctgatacttgctattataagttgttttatttcactttttacttcaaaataatttctaacttacaaaaagttgcaaaataaaagtggtacaaggggctgggcgtggtggctcacacctgtaatcccagcattttgggaggctgaggtgggagcctcacttgagaccaggagttctggaccagtctaggcaatatagcgagaccgccatctctaacaaattttttttttaattagctgggcttggtggagtgcacctatagtcctagaactcaggagggtgaggcagcaagatggcttgagcccaggagtttgaggctgcagtgagctatcatcctaccactgcactccagcctgagtgacagagcaagaccctgtctcaaaaagaaataagtacaaggatggctggacatagtggctcatgcctgttatcccagcacattgaggctgaggtggatcacttgaggcaaggagttggacaccagcctgggcaacatggtgagaccccacatctacaaaaagttggaaaaattagctgggcatgatgatgcatacctcttcttacttaaatagtattctttattatttgtcagttttaaattatatttttgactcccactaattgcctgtatagaagatcttattctctttcccccttttctctcttctatttttcattgcatatttttttactttgtcaggagggaaaatatattttttcaacccacagaccccaccctcgttttggtcttaactctacaatcgaatatatgaaatgtgtactcttctttttgaagcttacctgtcacttttggtaggatgaagttcattttctagtaggttcctcaggaatctgtgtgtacacacgtgtacagtattccttgagttctgcatgttcataacttttactgtggccttgcttcttctacaaattgtttggatgtactattcttagcttgcagttttttttcttgagtttcctgaaaatgctcttccactactgccttgctttgtatgtgttgtttttgaaaaaaaatctgatgccaatctaattaaattacttgtctttggaagttatttcatctttttgcctggaggtcatgtggatttttcttttatcttttatcttttttttttaagacagagtctcgctctgtcacccaggacccaggctagagtgcagtggcacaatctcagctcactgcaacctctgcctcctaggttcaagcgattctcctgcctcagcctcccgagtagctgggattacaggcatgcgccaccatgcccggctaatttttgtatttttagtagagatggggttttgccatgttggccaggctgaccttgaactcctgatatcaagtgatctgcctgccttggcctctgaaagtgctgggattacaggcatgagccacaacacctggccttttcttttatctttgaactcaaatagtttcacgaggatgtctagatgttaagaattctcaatcatttgaaatcagttttccacaatacatggtaggttttaaaatttgattcttttcaaatttttggtctgagagatgagaagaatggagttgccagtccaaactgagttgaacagaacaggttgggattggagcctaaagatctagagttcacatgttagacacattaagtttgagatgcctattagatatccaagtagttgttaaataggcagttgcaaataacgctggaagtttgaggaatggtttgggctggagataaaaatttggggttctgagtttgtaggtaatgtgtaaagccatgtgagaatagatgccaagagagtaggagaaggcaaagaaaggaaaaaggttttgttttgttttgttgtgtttaagacaaggtctcgctgtgtcgtccaggctggagtgtagtggcatgatcacagcccattatagccttgacctctggactcaagcaatacttccacctctgccttcaaagcaactaggacttcaggtgcatgtcaccacacctggctaatttttaatttttttgtagatacggggatcttaccacattgctcagactggccttaaattcctggacttgagcaatcctcctgccttggcctcccaaagtgttggggttataggtgtgagccaccacgtccagccaaagaaaagagctctaagcaacaccttgaggtgctcacctttagaggaggaaccagcaaaggagactgagaaggagctataagagaagaggaaagcctagagcttatttcaaagagccaagtatttcaaagagggaggaggggttaactatgtccaggactgctctaagataaagaaaggtgagaatagaaaattggccagtggattgagcattatgaaggtcaatggcgtcatcataacaataagggttttggtggcatgatggaggtggaagctggtgtgggttcataaagaaatgagaagaatcggagacattgagtgtaaacaacgatttttgaaggaatcttgccataaaggggagccaagaaatggagttgtagttatggggcaaagtagggtcaaaagaaggttgttttctttttaaggtggaagaaatagccaggctcagtggtgcatgcccataatcccagcactttgggagcccaagacgggaggatcacttgagtccaggatttcaagacaaatctgggcaacatggcaagaccctgtctctacaaaatacacaaaaattagctgggtgtggtggtgcacgtctgtagccccagctagttggtaggcggaggcaggaggattgcttgagtccaggagatagaggacgcagtgggcagtgatcatgccgctgtactccagcctgggtgacaaactgagaccctgtctcaaaaaaagaagaagaaataactatatgccagtgtaactgccattagagagccaattgatgatgcagatgagagaaggaagacttgcaggaggcttgagtctgagaggcattgggatctacttcttaagtagaggaaggtactagtggcacgtgtgctgaaggcagatagatgtggtatgggagcttctgatttttatataaggaatcctctaaaatgctttgaagaaattttaaaaagtttagcatatagaaagacttaccatgttcttgcaaaatagatttaaacattgtcaagatctataaaggtgtattaatctgtttgcacattgctataaagaactaccccagaccgagtaatttattcttatttttatttttttattttgagatggagtcttgctcttgtcacccaggctgaagtgcggtggcatgatctcggctcactgcaacctccgcctcctgggttcaagcaattctgctgcctcagcttcccaagtaactgggattacaggcgcctacccccacacccggctaatttttgtattttcagtagagacggggtttcactgtgttgggcaggctggtctcaaactcctgacctcaagtgatccacccacctcagcctcccaaaatgctgggattacaggcgcgagccaccacgtccaactttataaagaaaagaggtttaattgactcagttccacaggctgtacaggaagcaccactggggaggcctcaggaaaattacaatcacggtcgaaaatgaaggggaagtgagcacgtctttcatggctggagaaggaggaaaagatagcggggggagatgccacacacttttaaacaactggatatcagccaggcgcagtggctcacgcctgtaatcccagcactttgggaggccaaggtgggtggatcacctgaggtcaggagttcaagaccagcctggccaatatggcgaaaccccatctctactaaaaatataaaaatgagccgggtgtgatggcatatgcctgtaatcccagctactcgagagactgaggcaagagaatcacttgaaccaggaggcagagattgcattgcaccaaggtcgcgccacagcccgggcaacagagtgagactccatctcaaaccagatatcatgagaactcactcattatcacaagaacagcaagggggaaatccgcccccataatccagtcaactgccaccaggctcctcctccatcattggggattacagttcaacatgagatttgagtggggacacaaatccaaaccatatcaaaaggtaatgtaggtcctagaaaaaaatgcaagcagaaacaatattaaaaaaaatctgaaaagtataattgcaggtaggcagtagccctaccgtttattaaaacctcctataaagttgcagtagttaaaacagtgtggtgtcacgtgaataatcaagttagtgtataagattatactccacaaataggggaatttattatgtaataaaggtggcattcaaattggacaattaggtagccatctgaaaatacgtttgtaattaaagctcacactttacatcagaatactttttagatgatcaacttttggggtttttcttgaaataggatctcactttatcacttaggctggagttcagtggcatcatcgtggctcactgcagctttgacctcctgggctcaagcagtcctcccacctcagcctctggagtaactcagactagaggtacatgacactgtgcccagctaattgtattttttggagaggtagagtctcaccatgttgctcaggctggtctagaactcctgggctcaggcagttctgccttggcctcccaaagtgttggaattacaagcgtgaacaaccacacccagcctagatgatcagatttaaacataagaaatgaagccataaaaattcccaaacatgtcatgaatttgtttctaaaataatcctagtgtggggaaggcctaactataacatacactccaaaagaaatagaagattcgtatgaatttgacagcattaaaaattctctaactgggtgtgatggcacatacctatagtcccagctgacaagggaggattgcttgagccctggaggcagaggttgcagtgaactaagattgagccacttcagtccgttctgggcaagagagcaagaccccgtctcaaaaaacaaaaaaattacagcgagtcaccgtgactcacacctgtaatcccagcactttgggaggccaaggcgagaggattgcttgagcctaggagtttgagaccagcctgggaaagacggcaagaccctgtctctatgaaaaattttaaaattagctgagcacagggttgtgcatctggagtcccagctacctgggaggctgaggtgagaggatccttgaatccaggagttagaagttacagtgacctataatcatgccactgtactccagcttgggtgacaaagcaggactccatctctgaaaaaaaaaaaaagctccatggcaaaaatttgacaaatgataaattgaaaataaatacgtgggtattatatcacagttgatacatgcacatataaattcatacaaatgaatataaaagtatattcatacaagcgaatatattaaaaaaaagactaacaacccagtagaaaaatgggcaaaggataggagcagatagttatcacaaaaaattagatataaatatacatatagccaggcgcggtggctcacgcctgttatcccagcactttgggagtcaaaggcggttggatgatgaggtcaggagtttgagatcagcttgagcaacatggtgaaaccctgtctctactaaaaatacgaaaaattagccaggcatggtggtgcatgcctgtagtcccagctactcgggaggctgaggcaggagaatcgcttgaacccaggaggcagaggttgcagtgagccgagatcgcgccattgtactccagcctgggtgacagagcgagactccgtctcaaaaatatatatatatatacacacacacacacatataaagatatttaacctcattcagtataaaagagtagaaaattaaagcatacagataaaattttttagtcttatcagattgtcaaaaaagaaaaatctgattactgtgatatcaagcacgtttggaaaacacacacactcatactttgctcatgaaaatgtcaacattggtagatacatgttggtcttgtttttttagtttttttaaaaagaaattgggtctaactgtgtttcccagactcgtctcaaaactcctggtcttgagctgtcttcttgcttcaacttctctggagtagctgagattactgacaggagccactgcactgggctggtagatacattttgcttaaaaggtttcctttactcttgtgtgtgcaaaatggtttgtgtacaaggttattcattgcatcattatacttgcaaaagactgttaaccgaaagcttatcagttgtacacaggttaaatacattctgatacatacatggaatactatacacatgcaaaagagaatgagcaagccatttggacaacagtagcttcctttcaggagggaactgttggtggctttagaacaggaatatattttgaacttttgaagatttttttttttttaattctc

SEQ ID NO: 328 - DNA, 32742 bp, Homo sapiens
  source 1..32742: mol_type = other DNA
cctcccctcgcgccgggaggagctggcggcgagcgccgagccgggcgcgcagcgacggagctggggccggcctgggaccatgggcggtgagtgcggcgcgggcctgggccggggcggttgccgttggggccgagcagcgcagaggttctaggcgggtgggcgtccagggtccgaggttgggagactgagggggtccccctaactcgccagtgggagaggggcgggaaggctgggggcgcttcgaagcgtcgggtccgaatcccgcgactaagcctcctcctttatccccgcgctcgcccctgagcctaggacttgcgccctctttcctgccactccccccgtgcgcccggtgtcccagccccggcgcccgccccatagcccccttctcccagagctggcgccgtctcacgcccgctgcgaacccccggctctgtctccaagccctcgccccccgcagccccgcactctcccgcggagcccgcctccacctcgcccccgcccttccagccctctcccgcacggcccccgcactcccgccgctggattccagccgagattcaagctcccgggatcccccttcccgggcggtcctgagccggctagtctccaggtaaggaggcggccgcaacttcgcggcctttcccggagacggggctggctcctcttggcagccacctgcagcctgacgcctccgggagtcccgggcctggccacggggccgcccgagcgcaggttaacattcctggatgcgcaggttaggaccgtgtggtgtagacccacgacgttgcttttgctggtgaacttgcctatgtcctgatcttttaaataagctgggtttgtcacacacacacacacagagagagagagaatggatttgcttagggtaggttgcctgctttgcagccgcagctgccttttaaattgtacctgtggatggtaaaggattcacggtgcaggacgtggagccatattttcccgcttcggctgtgagttcagcgattgcgagggggctctgtagtgagtgaggttatcaccgcctggctagccagtgtctttgtggaaaggcaaggatcctttgtaagcattcaacaagtaaaatcaggagagatggggaatcagatcgagctgtgaatggggaagtgtaggggggtggatgggggatcggagagtgctccacaaatggagccgtttgttgatatttgcagaaggcccgtgggtgtgaagctggcagtgcggagcccaccctttcaaacgggatgcgactgcggtcgggcttggcagtaacttaccctcctcagaggtgttggtgcccaatcgggacatctgtgggaaggggatttatagcagatggatcaaaaggcctcgggcgcggtggctcacgcctgtaatcccagcactttgggaggccgaggcgggcggatcaccagaggtcgggagttcgagactagcctgaccaacataaaaaccccgtctctactaaaaatacaaaattagccaggcgtggtggtgcatacctgtaatcccagctactcaggaggctgagacaggagaatcgcttgcacctgggaggcagaggttgcagtgagctgagattgcgccattgcactccagcttgggcaataagagcaaaaccctgtcaaaaaaaaaaaaaaaaaaaaaaccctcgtggtccctggagagaggtgaagatgcacgggacagcctgaaagccagtgtatgaatctgccccatcccttctcctggctttcattaagtcttggattaaattaattgcttatctcagagaaaggatgtgtagggggaacttctctgttagggattggctcctggccagcccatcctcactgatgccttgggaggctgcgtttgggcaccaggaacagcgtgggccacctggcctttggagcacagcactccgagtgtttgtggaactgcagtatctgtaactcttttttctattgatcagcttgaatagttagctcaatattacttcactattgattagataagtagcccaaggacatactggggctcagtagggtctctctgtccagaaattcccgtgggcttctccttggccctccctacaccgctctgtgatgagtcgctgtcagatgccccactgtgcaggagcatcttcagggatgggtggaaggaaccacctctgtggccccaggtccctgcctggtcccccctgtctaccacataggggtactcagtgtttgtgaggaaaaaaaatggatgccccggtgaattagtctgagttcacaaccaatgttttctacactttgctacactgttcaaaatgttacccttaaattcaacagttttttttttttaatgtgtcatatcaccagagacaaactcatttttgtgtgtgtttggagcagtgagtgcaatctacggatcagtctctgatggtgggtcgttaacctcagtggggactccaagatttccatgaagaaaatcagttgtcttcattcaagaattggggtaggtggtggtgggcgcccttggaagctactaagtttgtctgctgagggttgagtccaccatagcttaacctatagtgcccagagctgtagccccagtcccctttaacatttcctatccctgcccactgacggaggaagctcccagggagacagggtaccacttgcagagccccactggccacttcagattgcaccatccccactccagtgggtgttgcttcctgtggcgagctgggagtgcctcttcttgcacatttctggcactgtggcttgcagctctattggtgggagggaggttggtgttttgggccagtgctttggtctcttggaggtggctataacccactggcagatggggcaaggtccagctcttgtgcctctgtcaaaggccacccccaggcagtacagccaaatgctgagggggtgggaacacctcatgtccccctttttttgtgggggaatctggaaagggctaaaattgagactgccacttggctgtgggagcctgcactgcccctggctgtcacgaacttatctttcttacccagattgtctctgtcttcaggtctggctcagaattcctgcagctggtgaaaatctgttttctagaagaggtttaattaatgcctgcagtctgtgagtaagagaaagggaggagagggagaaagagacatactactatctagaggtgggtgggagaaaggataggagaatgttcaaggtcctgaaaattcatagggggagattttggccccagaacctgtccctggacaaggttcctggttggtggataaggaagtgtgcccacattccagtgtaggggttaccagttaggagcaaagtcactgagataggaaaaatgaccccatgggaatctgaaatccatttgctgggcccatcattctggttttgagaaggccttgaaagccagctgagacttgggcttagcacggcaggagagcactgagctgtttgaagtttttgaatgaggtgtgtgcccttttggaaataatggcttgagcaagattggtctggggtttggcctgggaagccactttaccatggcttaatttataggccctgagctgtagccccagtcccctttgacatcacccattttccaatggaggaagcttccagggagacagggtaccacttggagagcccccatggccacttcagattgcagccattgccacttcatctcacctgaggtgctgaggggagagtctaggtaagtgacaaaaggagcagtggcttggaaggtctgtgcacctgtatttaggaggtgaagaagagggagcagctttctagtaggatggtgggccttttgatagaagcatctcccagggactctttttgaacctgctgtgcagccttgcaggtaaacgacggcccattggagcctctcaacctggagatgctgcatggcagccacgaggaggcacccgtgaacccagaatgaatttcagggtccgctctgagtccaaaaggcaggagggccctggccaactaacacctaactgagccacagactctggcctgtttatcctccaccctcaaaaccagcaggcttctctgaccctttttggactttggctggggaagccactggcttttggaaaaagttcagtctgcagtgatggcgggaacaatctcaggagtctggaagaagttaatgattaaaaaggcatggaagaagaactggatggcggcttggggagtagtttctgcagtcaggaggcacccttcacctcattcccttggcccacagtcatctgtgcatgcgtctgcccctccctccatcagtggagctccctctgagctgcgtactcgagggtggaggagagtttgggggaactcaaacatgtggtagtagagactgtagtaactttaaaattctctttgtatttgcagaatcatttccccaatttacacactcatgtttcagtttacagggcatccttttgtcacctgctcgccacccttatgcccctgggtgtgaccagcttcctcagaaagagctgtaatcaatagcatattgattaaaaagcatattaagatgaaaattattgcacctggttttgatgcccccactctctcccctttcctcctccacttctgtttgtggttacagccatcatttacattaaagttacaaatcattttgaatactatttgtcccacccctcagttattcagagacatgtgtcttttcaaccaacaaaaccacagcttgctttcctaagcttacctcattcttggatctaacaccaaccttcaggccttcagagatccagcagtatcattttgagcttttaaccgtaaaataaaatgaagctcttacttgctgtttgttctctgcagacataggagaatctagttagaattaaacatttactgtcttgttaaggctttatgcttctaaaatgaaagtggcagttggattaccgtaaagttagtaaagttgtagaacaaatttttggaagctcagaaataataatggagggacttacagaaataaactattaagcttaaatcttaaaacatagatataaatatgaactatcttgaaagtatagaaaatttggcaagtatagattaataagtatataatattttatgcaagttatattaattattaggatcatgcattatgtttatacagtaccttactatataaaaaagcaactttgtccatatctcatttgattcaataagcctgcgatctgcttagagatggggagatgggaccttgggatggttaaaaggcttcctctagaattcagatctcataagcagagaaatactatgtaaacctggatatccctgcccacgttgcttgataaccaaatgtggttacatagttttttgaaaattgtaggtggtcctattcttagggataaaaataggcattggttttctctaaaactttctgcaagtcaaacaaacaaacaaaaactctgtatgtagcacccagaaacctgaaaggacttctcaaggtttgtagatgtcagaggttctctgttgatgacttcctaatactagagtacctgagttggttgtgtattcagcacagtgcagtgattgagtgtgtacattcagaggccaaactgactttaaaccctggctctaccattactagcaatgtacccttgaacaagttacttctctgtgccagtttccttatttgtaaaatttgggtggtgataataatacctacttcatggtactgttgtgaaactgaaatataataatacatgatgagggcttagaaaagcacctaccacatggtacatgctttaaaaatgttagctgctattcctattcatttgtttcttaaaattaccttttaggcgccaactgactgcactgagatgatggatacaggataatagtctctgtcctcatggaacagaggacattatatttcagtttgtggtgaaggacatgaatggcggtgcagatcgatttccaggcacttgctcacttacagccatgagaggctgtgaaggggctgaccatggggtggtgaccttgccagctctttgaaacaggcactcattttgactcatctgtgtctgacacatgctggttgttttaactgtcactcttggccacaggttgttagtgggaagcatgataagagatcctagatctgtttagtcacctggttttgccaacactatttttggtcctggttgacagaatgctgccctggctactattttggactggactggctcttcagcagccccagaaacctttggtactatcagagacccagttctctgagcaagaaatggcacagctgctcctgagagcaggtaggggactagccagaggcaggaagccagaacactgcatttcctgtgtctgccgtagctagaaacttcttgacccaaagaaactatgttgacgggcatgggtttcctaactggtgctggaaagagaggaccttcctcctcagacctcgctttgcttgctctgtgcgtcctacagagaggctccagcatggcagcctgcccgactagcacctgccatcacggagctggcacggcctccagcaatgggctgtcgaccagaaaatccttctgtgattgctgcttcaggaactcgagtgcttctctgcctcgtttgagcgtgattagcccagcttgtactcaacatacactggaatacttcataccgataagtcagcagtcagactggaaaaccagtcatcagttatcttagtggcaaccagcttatttttatttactttaaactatggttgacccttgaacaactcaggggttaggagcactgattccccccaccatggccccccacagttgaaaatccaagtataacttttaaatccccaatattgtaactatacatagcctactgttagccagaagccttactgataatgcagtcagttaacacatattttgtatgttgtatgtattatatgctgtattctcacaataagctagagaaatgaaaatgttattaagaaaatcataaggaagagaaaacatttcctattcgttaagtggaagtggatcatcataaaggttttatcctcattgtcttcacattgagtaggctgagaaggaggaagaggaggggttggtcttgctgtctcaggggtggcagaggcggaagagaacctacgtgtaagtcgacctgctcagttcaaatccgtgttgttcaagggtagacctatgtcctggaaattttaaatgaagttttgtcttaaaaaaaaaaaaaaaaccttgccccacacttgtaaaacaaagaaacagcaaataatgccaaccttttgtatgtagggagaattaaggtaaaagggggaaaaccctttctctgttttacaaatggctccccaggtgctctgacttctctggtcatgatcatctcttgatttcccagactggaacctcttttgtcgccagtgtgtctgtctccgttgcagtccctaatggaaacacagacctgaaaaatcaaagcttgggcatttatggtcgaaggtcatggcatggatggttgattttttttggctctgtcttcaaagtgaaaaatcactgtcttctttgagaaagaaagtatattttgggaggtggctaacgtcagcaggcaggaagatctaagcaagcctgtctcatcctcggttcacataatttctagcattgctaagttagcagcatatgattttttttctcttgtgcatcttgctctaatgactgctgattatcttgaaacagctgcattaattgatggtgtttaacgactctacttacactaagtaattgcagttggcttggctgaggatcccgagttctttttacttgctttttagcttgagaagtgtttatttactctgtgtgccaaatgcccgaaggggagttgggaatgcctcacctcagtgccagcccactgcccaatgctcacactctcctgggacatcatcatgtgccaccacagcatccattccctgtgtattctgattgtctgctcatgggcctctcttccagcttgatagggagcccctagaaagcagggaccatacccagctcatctgtaaagctttggcctttagcacaaggactggcatgaaacaggcctcaataaaagttgggtgaatgaatgatgagtggttgcaaagcatatcagttatgaatgtgtctggctgaaagtagcagaaagccctggcttagtggcttaagtaaataggggtttgtttatcttatgtaacaaaatgcgtgaagataggtgattgctggtgttggtttcagcagctgacatctgtctgtactgacacttgtgttactctcttggcctttccttcatgatggcaaaaaacaccagcaaaccagatgtcccctgacatttcatggccagaactgtatcacatgggttgcccccagttaaacgggccatgtgagtgtgtagtggggcacactgaggaaggctcactgcttaaacaaagtatgtttaatggttcaaatatggtaggcattcactttttgctcacacacagtccaaaatggctgtttctgcttggggctttcctccaagaggatattcagggactcaggctctcaaggctgccatgctcctttgcctcactcagctgaagaggaaggaacatggaggatggtgtgtgggaggattttgtgggccaggctcagaggtgctgaactactggccctgacattccactggccagggctcagtcgtgtgagcataccttccaaggggaggaaatgtggtccagccacatgcccaggagggaaaggagatgggtatcacaattagctggcagtctctgctacactgtctgccccctcctccccccaaaaatcaggattctcttaacaagaaagaatgagtggatattgaggggctagtgggggtgttttctttagaaggaaatgctgtgctaagaaggctccagccaaaagtcgtcttcatccccaggagatcatctgttctgaatccctgcttctgttcctacctttgggaactgggccagatgactcagtaggacagtgggaggccctcattatccccctgtcttgacacaggacatgttcttaacagctttgtgggaatgtgtcctagttgattcacatcagcagttggaggttaccccagaggaagtggtctttagtcccccaaggccagaggaacctatgagagctccctgttttcaagtgcccctgcccactcaaccttccaaagcttctcttcctctccagcccccaccccaacccacatctggaggggaggagaggacacaacaaagagtaacctgattcccctctaattcattaaaaagtgttttcccactacttcctgctagttttcctcagtaataattgatgagtggtatattgatatactgggctgtagtgctttattcttgtttagtttgtcgtaggtttctgtgatggggctattccgtccgcagcattcttcctggtgctcacccttcctttttcccaccctccctcccttcccctacacacctgttgagcacctgctgcttgctctgctgtctctccacccagccctggggaaggtgggcaaggaagctgacatgagtctgtcgtgttgatgagtagagtgggaggggtaggctctgagggctgtggttgcccagtattggaagatgtcacccagccttggggtcagggaaggcttccaggggaaggtggtgcttaagctgagtttaaggataagcaggagttaaccaggtcaagaagacatctgggccaagagagtggaatgggcacagacattgagttatgaaaagggggaacagcaagtcgactgtgccagagtcgtgcgagatggtgtggccattcacccgtccaacactgctgtgccatggggcctggccttacagggtttgcagaaaaggaccagcccccatggaactcatgggctggctgtgagaggggatgagtctgcagaggagtttgggccagaatctgaggagggcttggctgctgtcccagactctgctctaaagggtctgctgctggaggctgagtaggagaggggccccatcacttgtgccgtcacgtcttgtgccctgtccctctgtgtctgattcttgactggtcctttgcccgggcattactcaggctataaaaatagaggctggcaccagaactccagcatgtagttggtgaagaaagctgaagctgtcattacatatcaagatacttgccagggagatttttgatggagcactttcttggagcccagaggatgaagttctaaagttggcttatagtttttttctcccttggacttataccaatgcttctggctactcacttggaatatgtactggttgtgcttgttactcacccccgccccaggctcatacatgccctcgaggacacattgaaatgaacgctcaatcctgaaatccaccaaatgagggctcgccttgccacagactggcctgattagaggggctgagtcctctccatggggcccgctggaggctggtgtgcagtccatcaggtgttcatgtcccatataaggcaggacaccctggcccgaaaaaggaactttcagcactgcctgagaaggtaagggttctgataactgtgctttctttccctaaggaaaagagggctgagccagggtttagcaaagctgtcagctgccttgattgtgatgaatggttccaagggtgatttccttcgttctccctcccagccctgtttattaaggtggactggagacagtgctggggggtggggtacagagagatgaaccatcatgctagtctaagccaagggctgaatgaactgcactttgcttcaagctgggttaatctgtatttgtagacagagactgaatagtttgatgctgttttttgggtgccttcttggtccaagtgctgcagggaatgcaaataataatgagaacgaaatcatgactgtcttatgttttccaggatggatctcatctaatcccctccatgccccctgaggcaggcagcaatattacactccactagaatagaagctccatgagggcaggaatttggggctggtttggtcacttcgaatccccagcttctataactatccttggcatagagcagatgctcagtaaatatctgaatgaatgaatgaatgaattactacttgcaggtgaggacactgcagctcagagagattaaataccttgcccgagctgttaggtggtggagtaaaaggcctggtctcagtgccagggagggaccatgagctgtgacttggggaccccaactctactgcccctggaatgagagctacttctaggatagcagtgtaggagggccagagcctgcctggcctggtctactgaacacagcacaatcttggaaaaacccaccagttgtatgatgatacagccacaaggacccaggaggttggagggtgtcttcctgctgccagcgccatgatgtaactcagaggtggggtgatatgcaggctgtatctatcagcagcttgagagtgacatttcaagaataccaccttcatccagtcaggcgtatgctgagaaactttcagtggctccctactcctacgggaacccagtctggctccagccctcctccaccctgttcactgatgactcactgcataaggcctgtcatccacggtacggtgacataggggtgggctttgcagcctgcctctgtaccatttatcctcacatcaggcacgcccactgacatcctccctgccttttagtttagcacagtttccgcctctttcacgcagccctctcgctgatcatcccagcacagtcccccacccctcgggtgcctgtagcctttgtctgtctgtacggtgcatttcctaaggatgttcttggaactctgggttcggcaggtggatggagctgctgctaagtggggcacgaggcccctcccagtccacctaagcacctccactgctacctgaattccacatcagattccatgttgtgatgagtgttgaaagaggatactgtttgaaaaccactggtctctataatttatcatgtgcctgccttgtgagatactgcttaactgcattgtttaaaaataatttaaatatgttttacagtactccttttttctgatttttagaagtaatacaagtttgtttaagaaaatttagaaaatgcagaaatatatgcgagcaaataagcctgccaggattcctacttacttaaggaatagtgagccagtcttctgtcttgtaatttgtttgttttaaagaaaattgagattacttgtcagtacagctataaccactcataatatttaggacatattctctccttttaatgtttttcctttttaaaaaaaaattgttacttttacaaatagcaattatttaaattcattttttaaaatagcacaggttcaaattctaaagtgtacaatgaaaagtcttgctcctacacctgcttcaagccattcagcccagcctgtacattctatattgtagcttgtctttttgacttaacaatataacgtttccctctgtcattactcaccttttttttttgttatttgcacccaacatactataaaatcaaagcattaaaatatgtgagtaaatattggaaagttcttcctacttcacaatagagatcacactgttaatttcagcagccatctcccgctagacctttttcggtaaatttatgttttccgaaaatttacatatatatgttgggatatgctagcgttggttttacctaagtgagattacactgtatctagtatgctgctacttttgttttctgtcttttgtttttaacttggcgatatttcttggaggtttgtctgtccacacctaagcccacttctttctttttttaaggctgaatcgtgttccattgtttggacaaactgtgattttccaactgtttccctatggatgaacatttcagtcattttcacatttttataatgactcctaatgctgctttgtacataggcggtaacacttttgtaggatagaaacctgaaatacaaattcttggggcaaaagatgtgcatgtttattgttttggtggagaccaccatttccccttcacagatactattctaattaatcctctcaccagcagtgtatgaaagaactcatccccctgagactaactaacattcatgataggtgagaggtgaatttttttggccaatctgaaaggtaagaaatgccactaactcccttttttttttttttttttttttgagacagagttttgcactttcatgcaggctggagtgaagtggcgcaatcttggttcactgcatcctctgtcccccaggttcaagcaattctcctgcctcagcctcccaggtagctgagattataggtgcccgccaccatgcccagctaatttttgtatttttagtagagacaggggtctctactaaatatagctttgtcatgttggccaggctggtctcgaactcctgacctcaggtaatccacacgccttggcctcccaaagtgctatgattataggcatgagccacccacacctggctgccagctcatttttaaatgtatatttctttccatcctggttttccaaacatatgcataactatacatattgattagaatcgtgccatgccttgttctctgtccttttttcctttcacattaggtcagggacgttttctctgttcattgcattctctccaaaagctcagttgttcagggttgctggcctgttgagctattgcagatcacctggagtgttttttattttagtttatttgtgtctttgatcttcaaagatcctgggaatgacaagtcatagaaaagaaaggagaagaaacacctcctgcagagaattggcacaaggagtgtccagtagacaagaaccaaatgaaaatcagaattagatatttgctcacgggctcatctcttaggtatttggcggagaggtccctaaaatatcaccatgagctcttgttatatatggatattgtatactctgtgttatatgttaagcttgacctgttccgtgcattctgctatgaaaagtacacagctttgctgttgttgtttggatagagagattatgatgttttcagagcatttaatgtcagtggaaacatccaggagtcagtgtggtatgatggaaatagcattgaactggaaagtcaggagagctggcttcagactctagttcttcccccgactgaccgactaaacctggagaagacacctagccttttgggtcgcctggggtctgcgtggcaaggatgacctgggtgtaatgggtttggaaagcttggtggggggtaggctagcagttagaggtcaattccagcttagtattaaaagagagctctctaagaattggcactttctaagatgagactggctgtatgttgccagttttcagaaatgttctgacaggcggtcagtcagctctctgcaaacacgcagacactacccctactgtcatgtggcttagggtcagtcgcaggagacagccagccacccaggaatttcaccatggtcatttgattacataatgaatagtgctgagaagtgtcatggaggagaaatacagggtaacttgagagtgtgagacagggtgctaaacaaggcgggtgagttgaagggcagcctctatgagaaagtgatctttgagctgggatccagggcatggtcagcagtcaacaaggtgagaaagtggaggcacagaagagaggcagcatgctggctggaggcaggttgggggattgctactggctgtagtgagtcctccattcattaatctcttcattcatacattcattcactctctcaacaaatattggttaagcacctgctctggaccaggcagtgttcttggccctggggatacatgtatagggagcaagactgacaaagttcccagccttgtggagctcagtgttgccacatagtaaatcattcccaaacttggtgccttaaaacagccgtcattttacacttatcctcatagtctggaggtagaccaggcccagctggctgtttctcatacatgtgtctcacacagttattcaggcaataactggtctcattctctgtgtttttgagcacttcagccttggcttccaacccactacctgtctcagctcaccagagtcctcccaaaaaggcagtccagtggcgttatgtgctggctccagcatgctccttggggtcttacctccctcccctgcctcaggcagctccaagagtaacaggtttctccacctcaggttcattcttggggagcaggagtgatgcccttttgacattccaggcacctgcccagctgacccaggcctggagtccccagtgagcaaggctcttctgtggggctgagagatgtctgggtctgggagaggcataatgtgagggcttgaagtgaggctgcactggtaggtggggccgtggaggccatgggcagtatttggttgacatccatggagcattatgggaaaccactagaagaccagagatctgatgactccctaatgggaagattacagaagacagtccttcttggaaaacaagattttaaaattaatctgttagaatgatttgtcttataaaacaaggctttcaggtatgtccctgaaatgcaagtgtcctctaggattacttgtcctctggcttaaagagaggaagcatagatgtccatcctgattctatcagttattatatcacaatcagtgatatggcaatctgtggttcattatcacagagttggtgggtagagtcaactttctataaccaagacttcacattctacaacaaacattcccaccactgcaatttcctataacacacaacagtacccaagcagtaactccatgcgccttgtaagagaactacaaaaacaaacctctaaataatacagtatagctttttgccctatttgaaagacgtattaagtaagaaactccatctagaaacttgattttattatgataatacagaataagtacttgctcagttagctgcagtttgtggaaactggtgtgtaaacaaggatcatggccacccccattgcttttcattctcaaaattacttgtgtcaaccactttggctcccaaatttctcattaagttacatcaacctggagttgtgtgtttcattacaactgttagctgagctgaatcaaagcttcggagcttttaagagtttttgttttgtttttttttttttttttgagatggagtcccactctgtcacccaggctggagtgcagtggcgcaattttggctcactgcaacctctgcctcccaggttcaagcagttctcctgccttagcctcccaaggagctggaactacaggtgcccgccaccaagcccaggtaattttttgtgtgtgtggcatttttagtagagacagggtgtcaccatgttggttaggctggtctcgaactcctgacctcaaatgatccacctgccccggcctcaaagtgctgggattacaggagtgagccactgagcctggcctcttaagagtcttattacctactttattggcagggagctgggactcgaggcagttcagatttcctccaaagctaaatgttgtaattgtgggtaacagtgctcttagctctatttttgctctacctgtcactttataagtgcaaaggagcaatatgtgtgcgtgtgtgtatatatatatatatacacacacacacacgtatatatatacacacacgtatatatacacacgtgtatatatatacacacatgtatatatacacacacgtgtatatatacacacgtatatatacacacacgtatatatacacacgtgtatatatacacacgtatatatacacacacgtgtatatatacacacgtatatacacacacgtgtatatatacacacgtatatacacacacgtgtatatatacacacgtatatatatacacacacgtgtatatatacacacgtatatatatacacacacgtgtatatatacacacgtatatatatacacacacgtgtatatatacacacgtatatatatacacacgtatatatatatatggagagagagacagagtgagtgtgtgtgtgtgtgtgtgtgttttgagagcttgttttgggatctgagtcagagaatccttggatctcagcacgtggagggctccgaaaggtcacccacatcagcccctctgtagcatcaccagcagtggctacacacacttggccacctccatgggcaggagggctcattctatactgacactgtcaacctcctactaagtgagacagccgtgttctcagatttacttctaaggatgtaaagttcatgcccactggcactggcagtgataacaagctacagggctcctggtgccccactcctcttcatgaatgagtcatagaatcacctgccagtgagaacagggtcttgccaaagctctgtaggtaagtgtgatcccagcctaaaaaggcctcattgggcaaaacgcctctcagtggcatgcgtgagtgctcctgtccatgagtccatccagagcaaaatcccgttcctatataatattgttaacacagaaatgcaggccttgataacctgtcctttcaggtgtgcctgatttacattgcacagctatgagtctcaggactttggaagctttttttttttttttttttgcctttaaaagtttgacttttatcattcaagccttgatattatgccacttgtacttccagtcttgcagcctgcctgtttaatcctctcgtgctttctttgacattttaagaaactttcaattgacacactttgcttgcaaaatttttttaaaaacagctatatttttaaagtggctttgcggtgagtaaatcatgccaactgcatgttctcctgtctttgttgaggtacttatagcttctcgacattctaaaataataatgccagtctcagatgtagctactttgaaacttaagaaagagcaaagcagtaacgttggatggaacacagacttgtctatgtcaaaaaataataataataataactgaagcgtacataaaagtgaaaatcctggcttgatgagttagttattttagtctgttctggccctgagaaatgatcagatgccttgacaagtttatcctttgtagagttggaaaaaaaatctcaaaggagagagtggttagaacatgtagttcacaaaggaaaaaaaaaagtttactatttcagggatttaaaaatactaaatctgcagattatcagcctcaaatccttttaggaaagaaatggtagctaaataattaatgctgcatattttaaaaacatgtaaaatatgaaacaaaaggtctgttagtggaagacgtacagtcagtaggctgcaggaggctgctctgctgtttgtctctgctgaattacacctgagcaaaccagcactgatgtttttaaacatataattatgactgtatgtgttttgattattggatctgaaaagttgtggtactgtcatcagatgattgtgtttaaaaataattttttagaataattgtgcatgttgtcacaccttctccagttgtgagttgtcacaaacatccccttgctcacttactcctaacagagccctgactctattcaggtctctgcccattctatccctgcgtgggcgtctgccaggaggtgcatcctgattggttccacccagtcgttgtatccattcccagtgtcagtgattggtttgagtgtgggcacatgacacacttcagccagtgagatgcgatgggcagcctgggggagggatttctggagaaggcttctttgcttccagtagagatgaacagagttatcccttctgcctttgcccatggctgagtatggctgtgatgcctggcagtgtggctgccagcttgcgaccctgagagaagccagcctagtaagaggacagacatggaaagctcttggcttcccattgatgcttggagttgctgaatcaactagccttggagctgctgtcctaatactatggtttgtcatgtgagaatgtggatgagtctctttgcttgctagggttttctgttacctgcagccaagccatctttatagatacatgaattatttaagataaaacaaaaactaaagtgcaaaaagaacaaaggtgaccacaacagtgtctcatatcatatctaagagtggtattcagcctggtcagtgacgaggttttctgcctaatgcagctcatgaacgcctgtgcacttactcattacacctccagaagggagccccatgaagagtaccagcgttctgctaacagcaagttctagatcggaaattggtttgtctgcttaaacagaagtgaaataacaatggattaaaatgctgtgagattaatttctctcacccaaaatgatttgagctggaaggcaatcaaggaatgggtggccttgccccttggggttatctagggtccttctctgtcatccactaggatgttgcttccatctgcatggtgaaagttgctcctcatcatgccagtgtttcagagcctggaataggagaagaaaaacgtcaggatggtctggggcaggcagcttccttttgatctggaatggccatattacgtccaatcacgactcattggaagaacttgaccacatctctacaacagttgcaagggagtttaggaaatattctctctagctggatggtcatgtatccagctaaaatccagagggttctgttcataagaggaaggaaggaatagacacttggggcagttagaagcatctgccacatagtatgtctgctacagtgaagaagaacgtgacaaggacagattgctgggtaccactctgaatgtgaagcaagggtttcagccatgcaggccagcctccctgagcagcttggagccttttgcccctcggacctgccctggcctctcttcaggtaaatgaaggggtttgaaccaaatgatatttaaaacctcttcaaactctgactttctctggcatggtctagtggagattctatttctagagttggggagagggaacaaagacaagggagaagtagggtaagtagctcacttgtggctggtgggtattaaaaccatcagcaaaatcactgctaatacttactgagagcgtatcagaggctaggtactgtaccatgttccttacatatcttaaccccacgactccctccctatacaacctatgaaatgggctcagagattgttctcacttcatagatgaggaaactgtggctcattatcacgtagagcagggctctagacctagccagctgaccccaggcccatgcatttaacagcctattgtgggtatgactgggaaatgaggtgggatttgtggggtgtggccagatcataacaggtccttaaagcagggcaaagaacattgagtttggtgctgccctttattcagggcctgcttcaggatcaatctgcagcactgatcagcacaccccctgtgttagtccattttgtgttgtaaaggaatacccaagactgggtaactcataaagaaaagaaatgtatttagttcatggttatgcagtctgtaagaagcgtagtgccaacatctgcttctgctgaggcctcaggaagcttacaatcatggtggaaggcaaagggggagccagcgtatcacacggtgagagcgggagcaagagagagaaagaggaggtcccaggctccttataaccagctctcacgtcaactaacagagctagagctcactcaccagcaagaggacggcaccaaaccattcatgcgggaaccactgccatgacccaaacacctcccactaggccccacctacactggggattacatgtcaacatgagatttggaggggacacatatccaaaccatagcaccacctcagctccccactggcttccccacagccaagaggcgggtgttaccactctatatcacatctgggcatgacagtgacgcaggtcaaatcacccctcaccaccctagggtagaagacaggctgtttttcaggaggagacccccaggtgagagagggtctgtggtgcggcaaagtgcaaaatgttccaggggagccacgcctcatgactattagatatccttcaatatgttgcccctgctgagaggggcagggaggcctctgggcctgttcctgtccagtattccccaaggaggccaggtgttgggaggagataggaccctggccctagaaaataagggtaggttcatgaagtgggcctgtctttcaagctggcctgcctggtggtgtggatcctgcaatcagacccctcttcccgctccatcctgcagctcagtcagcttagtgcccagagggcactccagggaaggagtgagaatcagtgagtgtgttttctggtcccactgatggtaggacaccttgaggtcagtggggaagctggcctgggtagagggctgtgggtgctgggccaggcaagcccatcccttggagaagcagacccagacatggcaggggcaccccagctccgcctgtgtggcctctgggcagctggctttccctaggcacaacacttccctgcatgtatcagtgttggatgtatcatccccctctctggctcctttcacaacccaatacctccccaccacctttaacaccatcccttgagttcattctgttttcctaaaattcagtcacagatgcaccaacaccaatctgctcttcaagatggagttctggcattgccacttcagaaatccaatctgccgtatcctagcctggatgcagtcttctttcctcctgacagcactggtttgatagagcctagtgatctgtttactccctacttccctcgccagactctacacttctgtttttaaaaaaacttcttgaaacttttctaaaaaaaaaaaaacacctttaacttctgacatacacagaagcagagaggagcagataatgaaccctcaaggatctgtcaccctgcttcaactattgtcaccattttgccaatcttatttcatctattcccctcaacctttttatctcctctggaatatatatatatctaatatatattagatatgtatattatatataatatataaattatgaatatatatataatttttattttttgagatgaagtttctctttgtcacccaggctggaacgcagtggcgcaatctcagctcactgcagcctccacctccggggctcaagcgattctcatgcctcagcctcttgaatatctgggattacaagtgtataccactatgcccgactaattttttgtatttttagtaaagatgtggtttcgctgtgttggccaggctggtcttgaactcctgtcctcaagtgatctgcccgccacggcctcccaaagtactgggattacaggcgtgagctaccacgcccggcccctctggaatattttaaagctagtcctaggtcttgtatcgtttctcccataaatactttagtgcctttcagctgggaccttccatatgacaaaaactgtgtcctgtatcctgtgtcctgtgttcttaccacttagaatagtgcctggcacttactggctctcaggaaatgttattttgaattgactgactgaatgaatgagtgcgtgaactggcttcagcttttagaaatgagcctgcaaattaagtggagaactctggaatgtgaataactgctgtgaactcacagccccttcatcccaggtgccttcctggggtttccaggaggctctggaatctgcgcatcttcatcagacttcaaggttggtttttcttgggcaagcatctttgatttggcaattaaactccactttgacgtgactttggaaaaggggaactattaagatatagcttttacctttgcttgactcatattttgttcacaattgcagacttgaagggtttttttttttaattgtaatgctgtatttacttaggccaaaataattctgaccaaaaaaatcaacgtgtagaatacatctgaagcattttctttaatactacctttctattcttggtaatggtattttaactgcacaaatgaaaggtaattgtacattttctttctagcagttgtggtcatgtttaaaaccctaaattctgtacactttgaaggacagcctggaccagagtttgtcactagatgtggtgttttcagctcttacaaggtgaaaaataggccaaggcttgggccctggaactctctggtggtagaacggtagcttgtaaaaatgcctttgacgtgttctttttctccttttaattcagaaatggtattcttcataatgtaatgggaactgcttattaactagtactatgtttcaaaattgtattctaaaatcttttctttcacagctcagacttgtaataaggttgaattgagttagctgggttttctgttttttgttttgtttttgctgtttcatcaggaattcagagtaataattcaatttctaggtttcagatatttgtaccacgtgggtttagcacaggggactgcagctgtgcccaacagacatgtgatgactgacaactattttatgttcagcctggacatataacagttgtttacacagaagtatttgtgggaattggatttggtcatgatgccatgttgagccaagagcatcttttccacagaaggtgatgggacttgagagatgtttggggattagaagatgtgggagctgtaatcccatagcacctcaccctgccggtgaagcagggactcttcctgtggatcttatttttaggactgtgagcaagcaggctgtgggggtcccgctctgggctcagaatcctggctgtcgcctggcatagcttgtatgagtctcaccagatgtcttgaggagctgctatagaccccaggggtaggcgcagagctcctatggaaagaagtgcaggaagatggcaggaagggaaccaaggactgtgtgacttcttgagtggctgtaggagcctcctacctacctggagatggaaagggggaaagggagctctggaaaactcaggctggagattgaaccacagtgccagaaagagccagttggctggtacctcatcctcttggagtggggcccaacagaagctgaggcagatgttccaggctggaaaacctagggcaaggcagggacacaacagctgagtcagcccccaggaaggctcatggtggcagaggagccatgaacatggttgcagacgtggctgcctaccctgatggatgggatggggccagtgagtaggggaggggccagtggccaggatttgaaagcagagccacagcatggagcagaagcaatagttcaaggaaaagggcgactccttgtgtttagattgtggtataggtgtctgtgtgattcttccggagtgtggaagtcagacatagtacatatctgctcgaccgcagggctctgcctgttgtgagatttgctccccaccgccacctgctcttttgtctcttatcctcagtcttatttaaaaagcaggatcctgcagctcagagaggtggagccagttgtcaagacacacagaaaataagcagcagagctaggaattgaacacagatctgcctatctttggagcctcgtcctttacaccacattagggctcctttcagtctcttccactgaagtgtccccagcaaagaaacacccacagcagcagaactacgcactccacttctcatgttggacacaggcacgtgcacgtatacatacacacacacacacgtatgcgcgtgtgcgcacacacacacacccctactccttggggtcctagcttcagctgcaaacttcttcaaatccatgtgaattttggattctatcatcatttagccattttaataaaccaagactaaagtatgatcattatcttcaagttttctagtgaaatgggctccaaaagaaggcatcctgggattcggtgttcctctggccaggctgtgtacatacacccctagggctgtgatcacaccagactactccctagcacaagtagaaataatggaaatgctgaccatgctagaggctatcagaggagagccagaagtgggagggtgcagaccccagagagtatcaaggggaaacggtggatgttcccactgttcagcaaatgaaaagtcacagattggtagagatgtcagcagtgcagactagaagcagtcaggcagttacacgatcccagccatctggttaacctaacgtatttaaatctaaaactaaatatagctgttttcccaaaaagcactccgcatattaaagaacgtagacaagatggagattttcatgtcgtgcctacagatgaggatattgagatctagatcctggcttagaatttcctggtgaagattcaaggcatttcccatttattgtatcagttagcttttgctttgtatcaagcaaactgtcaccacagtttgtttcaagggagcctcagcagggactgcttaccttggctccatgtggtctctcatgcaccagcagtctggcctagggtcttcacatggtggtctcagtgttggaaaagtagtaaaggaagacaagccccaatgcataagtacttttcaagtccctgcttgtaacacatctgctattgtcccatggccaaaacaagttccttggccaagccaaaagtcaatataggaaaagaccgggtaagcccatggatacaaagagcatgaaaaaattgggggctgttactgcgacaatttaccatgctataaaactgagacttatagcaagtagccactgtttccaccaaatgcccacctgaagacaactgtaaaccatactgtggctaatcccttatgaaaaggcagtgtcagccgggcacagtggctcacacctgtaatcccagcactttggcaggcagatcacctgagatcaggagttcgagaccagcctggccaatgtggtgaaaccctgtctctactaaaagtacaaaaattagtcgggtgtgtggtggcagccacctgtaatcccacctactcaggaggctgaagcaggagaatcacttgaacccaggaggctgaggttgcagtgatccaagattgcaccactgcactccagcctgggctacaagagcgaaactctgtctcaaaaaaaaaaaaaaaaaaaaaagagagagagagagaaagaaagaagaaaatgcagtgtcaagtaagaccataggaaacatacttagctgtcctactggcctctcccacaagtcagggagagggaaatcccttaagagcatggaagcaggaagtagttgagggacaagacatgacccagcagcagaaacaaggccctcgcctcccacatgcaaacgcagggcaaccagcaggcaggtcggcctctgaggtgatgacacaaaagacaccatgtggcatcagaaaccgggggtggatgattccccagggccagcacagtggcttcccaggcccagagtgagaggcctgaagacaagatttgcaccagagctgcagagggagggatgtgcaggagaacatgtgtacgtgtagtactgagcttcgggcacggaggcactgactctcggttagggatagtgactcatgggacagaagcgtttccctcaagctcttcctttccatcttgggcatgggagaatggctcccacaagaagggtggcaagaagaagggccattccgccattaacaagatggtgacctgaaaatacaccatcaatattcacaagcacattcaagaagcatattcaagaaagggcttcaagaagtgtgcctctccagcactcagagagattgaaggagagggggacttcagatgtgcacattcataccaggttcaacaaagctgtctgggccagaggactaaggcacgtcccataccgtcatgcgcggctatccaggaaacgtaatgaggatgaagtttcaacaaacaagctctatatttggttacctatgtacctgttaccacattcaaaaatctggtcaatgtggatgagaactaactgctgattgtcacatatgccaaatagagttacaaaaccacaaaatcaataaataaaatgaaattgggatctgtttgttaacagagatgctggttgctggacacacaggcgcaatcgtaaggtgcaagtgtgttttcatcaatctgttagcaaatgttctcttttggtagaaagtctgacaggtcgcttaaacaagtgggttttcaaagtcacctactgggcccttggggaggaggtggtaggcaaggggctctgggagtctggctcctgcttcattcccaaaagatgtgcttttcgtagtacagcttattgagataggattcaccccaggtgtacagctcaatggctatattcagttatattcacagttacacagccctcacacattagcagatgagcttttatctgattttgtctgtctgatctctgaagaagattatatttgaatggggaaaagattcaagtttgaaattaccgttacaatctaactgtagtttaagaaccttttctaaagagactatggtttgcaagttctctttaaaatcccaaagagaaccaggaaataaacttgacttctaaaactgatagggtagaagttatagtagtcattcattttttttttttttcccacagaagggacatttaggaccttattcagcttttttaaaaagtcctcttgcacacttccaatgtggttaggggaattttgaataggcaggacgaggcttccagaagacccatggatacagctgaaacaggcttagtggtccaggatgaagggaggtctcaattagcagatggagctagtcggtgtaggagcaaatccttttgcacacccagaccatcccccaaggcattgggggacatgttgtgatgattgttgttcagattaacaattacaattaaagaataccaagatcatttcagcagaatgtccaccaaaaaaccttgaagatttaaaggttaaaggtcacagcaagatgagtccgtgtgaagatttcccttattgtccagcacattgtaaatacccaataaacatcctttgcgtttttccttgggaaggtcatgtctgtaaaatatctcattccttgttgatgtcagataaggcattcaggaactagtttttgcttactaacttgaagggagcattctcgcttgggcttatttgggggcaaagactaatcatagagcatgctgttgttctccagctagagatgcatgcttccctgccgggggactgggctaatcagattattatcagttgacaagtttggttattttcagttgacaaatttagttctccacctctaaacactcatttatcacctctgctttattcacaggacatgttcccgatttgaggtgaaaccatgaagagaaaatagaatacttaataatgcttttccgcaaccgcttcttgctgctgctggccctggctgcgctgctggcctttgtgagcctcagcctgcagttctgtgagtagagccgggccccgcaggtcgtgggagggtaggggcttcataggaaacaaggaggccccaaaggcttgttttataaatgaatgatgaggctgaagacaacgaagtctttttattgttggcactcacagtggccggttgcaaggagggatcctaaaccaccgagcagtgttctgtgtgctcttttgacttttgcatgaattcctgaactgcctggttattcccagattttttgttcagattcaccagatggagacactgagtggccctgcttgacttcttatgctgaaccacacagagcagaggtgtttagccctttgattgggtccttgcaagttgggtgtctgtttagccttcagtcagccgcggggctggagttgtttcggggagggtggggagattaggtcaccagtatcaaacccaccccccaggcagcaggggctgcatgggaaatcccctgtgacgagacaggaggactctgataaagccaggccatgggcctcaccatgcagcatcctccactgagattcctaggctcaggccaggccccaaatctgtgcacactacagctcacctaagagtggctgttctcagacacagatctggccccaggacctccttagtggcaacacctcagtggtggcccatggtcttctgagaggccccttgccctcctgtggcccctctctgctgcttctgtgctcagatcctggtgctcctttgccaagagcgttctcctcctcaccccctctcattgtttccctttcagcccttgccccttctcctctaggacccttccaggaatacttaagggtttggtgcttcttttatatacatcaggatgccctgaatccttgaacctgtctccctccctccttcccttccttccttcccccgtttttttcttgaaatagggtcttagtctgttgcccaggctggagtgcagtagcacgatcacagctcattgcagactcaacatccgagtttaggagtttaggtaatcttcccacctcagcttcctggatagctaggactggaggcgtgcaccaccacacctagctaattttttgtatttttatagcgacagggcagggtttcaccatgttgcccagactggtctcaaactcctgacctcaagtgagaacataggtgttacataagcataaacctgtgcattatggattagtgccatttttttcagcacaataataagcaaccaataaagcaattaaataaatggagcaattaaactccatttctacagaaatggggaaattccaaagtcacagtttacctagaagaagaagagcagtaagaacatcagcctccctaagttctggtattacaggcgtgagccaccacgcccggccccctcctttcactaaccatgcactagtataattttcagttcttgtgtcttttccttctaccagattgtctgctcgttgagagcaggaccacatcctgtttctctctgtatcccaggaaccagcactgcctagcacgtagtaatattttgtaaatgtctgctgaatgcatgaatccatgcctgctctaaaaagcagatggaaccttattttctttccttctgttgctgtgtatttgaagctgagaaaacatctgtgtgatgccaggaattgtgttgttgctgtcacctgccttctctccgtttaaccacctcatcctgatgggtgggagacaagcagttggcacccacaccacccaggacagctgtgtgaggaggggcatttctgttgcagtttgaatgatggaaagaagggcaggtggctcggtaagtgggatgttatgagtacacagaggaacatggggaaggcttggctctaggaggaggtggtttcaagagaggagactttgaggaagtttctctgattcacttccaattgtgacatatttccatgtacatgcatatgacagcctatttctaatagtaaaaagaatttaaaatactcgttttatccttccagaattggaaaagaggtcaaaagaaggtgggcatcagaagtttaaaaatattccagatggcaaatgaattgtaaaatctgaatcctttccaaaaagtgtggtaagatattcagtagtttaattgtttataaattttcattaaaaattttccatcctttggttggagaggtaggatgttacagtcaaccctgattttattttgagaggctgacaggttctgagacatgaatgtgtgttacttgtgtttgtggcatttctcttgcatgagctggtttccacgtcactgaattggcctgtgtgttttgcttatataactcttctgaaagtaccttctgttttaggaaagccaattttcagccatacttttttaaggaaaattttgcagggtaaattagcctgtctgggtctgagctctttattcttggatacgttggagatcggaaagatattaagatatggacgttcttactgctcttcttttaggtaaactgtaactttggaatttccccatttctgtagaagtgagtttaattgctccatttatttaattgctttattggttgcttattattatactgtaagaaacagcactaattcataacgcacaggtttcgcttatataccacttatgttctcattcttatcctaaaatatatggacttttttctttaccatttctttttacttatttttgaataccaaattagcatatataattactttaagtaacatatttgaggcaactaagtataactcggttttctcatgctttaagtaaagaatatagctttgttatctgaaatgatcgtatatcttatttggtcttattggtagttttcttttcctgatgttttgaatgtgaagaagaaatagcccaggttacgattcaaaaatcagattgcttaaataagtatgtcttcctctggatacagaaagtatgtagtgaacctacatatatttattaagtgcttatgtgtgtttgacgtttttctacactgtggaagtggaggtagtaaggaaatacagaaaagattaagatactgttcacagtttctcaaaatatgttcatcttaaatggtgctaatgacttgctatatgctaattgtctttaataaaaataagtctatgttttcaagtctttaatgttttgtgtttggaaggtgaaacattctgaaattcctgatgtttgaattgtagaagggaacaggcaaggcatagatatttttggttattgtagttaaaatacatacaagtggaaaaataacttcaaattaaaggactcctttagtgcagcaaggaaagactgtcaggatgtgaagacttaggaatcatgagttatgtttccactttttgtgctcatttgtaatcattcacttccctccttggcccttgcattttcttaatgctgattttatgctcatttctccatgttctgaccaccattcccaaaatggtgttgtgacaggagcacgcaggctctagaatcataatttgaatgtcagcttccctgctaagtggctgtgtgtcctattccttcttctgtaaaatagagttaattattgctgttttgcaaggttgctgtgagaacggagatacgggaaaacccttggctcatggaagcatagccaacataaaccttttaagcaaaccagcgcagagttccgtcatagtgcaccatcatcagaaaccagggctcctggtgttccagaagttgccagagtttatgttacttcagccacttggtggggaaagcttttgaaatagatcacgcatgcatttgtttttaatcagagtgcgttggccatgatggggttaatttatactgagcacatggcacccatatctggggtttccctcttggtcagggccccgattggccagagcagagtcgaaggaaatgctgaaggtgaactggagattcagattcccagtgggaaaagaggaaaagaggagggctaacctgcaaaaatgagagtgagggttgctgtcaatatctgaagggccctttctgcaagaggaggtgaacatggagacacatttcagttaagcatatggtagaacttcctaaaagtcagtgccatgcagaggtggaatggatggtgtgttctccgtcactggagtctgcaaactctggagggctgctctttgaagagtaaagtattggacaggtcattgagtctgatcccatttaaagtctctttaaactctaggttttatgaattttatcttttctcattgatccagtgccatgagtatgtgacactttgttctttagcaaatgttctttagtttccactgtgtgttaggccccgggctgagagtttaat

SEQ ID NO: 329 - DNA, 32742 bp, Homo sapiens
  source 1..32742: mol_type = other DNA
acaccgccctcccgccagactcccggcggctcctcctccctctcccaaacccactcccaaagctaagtgcaggcttccccgttccagccagaagcgctgcgtgagcctccacacgtagccgcaggcagctccttaaatagcgtccgcgctgagcaaacagtccagacgtggggcccaggagggcgagctgaggcgaccgcaccgggcgcgcagcggcggcgggtcagccggcggccaatagccagggcgcggcccgccccgtcgcctcccctcggggagcctataaggcctccgcagcgccccgggcgcctgctgctccgtgcctccaccgacgacctcactcagctgcgttacgcgccgctccggctgccggccgcgcgccttgcccgccggctcccgcccgcaatcggcggctcagggcggacccgggtctctgcgttctcgcgagaagcgcggcgctgcggggccgtgggcgcctgagcccgcgcggccctcgagggccgaatatggggggatgcacggtgaagcctcagctgctgctcctggcgctcgtcctccacccctggaatccctgtctgggtgcggactcggagaagccctcgagcatccccacaggtgagcaccccgcggtccgccgctgtcccgcgaggctcggccggcgggggggcagttcattcatccaccagcccttccgcggggctggccaggtgagtagtgggggcctgtccctcctctccaggaccgccggggtcttccccagaattgcggtcgggcggcgctggtccctggggaagtgtaggggcacccgccctcgttgactccttggagttctcggtgaactcagcgtgcccgaatttccctgcagaacaagttggagtttccttttggacttgcaggtcatgggcaccaacacctttcctgcagctctcctttcccctcctttccgagagttggcatggatttatccttgatggacgaggcagtactccttctgtgacctaaacacggggcttagtgtactttctaattgatggtgacacattccttccagcaccccaggaagcagccggtaacacctccctcttgccaaaaacaacgctcgctcgaaaaccttagttgttttcagtaaggctgcctggctacccagtacctccaggcggcagctttcttcctttgggatctgaaggggaagctgtggacacacagctgctccccttacctacccttttcttgagcccggtgctgtctctcgttttcagaagctgtgtaaaacaaaacgttttatatttagccagattaaagagagtttcaccacgtctgtctaaacatgctttgctgccttttgtggcacatgaaaaatccttggagttttccacatttgtgctctttgtgctcaactctctgaaattagatcttgcatttaaatgaccttctaatgtcctttttgttttgttttgttttttgttaagtcatcttggcaccattttttcccccaagtttataatagagtgcttttctacttgaacttttcttaagcctaaggacagaaatttctatttcagagttacattcagaaagtgacatttggtttgcagtccagctaatccatgtagcgatagttttgtcttcatctttaagtgtttcagaaagcgtcagcaggctgaactgcctatctttctacaaaacagtgcttgctttgttagcttgagaaacttcagcattcagatggatttctatcagttacaggatgcttttctttctgttaggtatatgtgaccatttaaaaatggatttctgaacccgtgtgattcctctaaatttgaactaaacttttgcataatttaaaaatatttcttctaacataatatctggaaagtagaaagtaaatactttcagcaaatttggaagtagagaaatttaaaaaggaaaaacagaacaaaaagccttccccagaaaaatgtctttctttgttgaaacacccaaggagactttaactgggaaataaaataacctctaaggactttgtaatatttagagaggcctctttggcctttgtatattttattccacttcattgccaacacccctaactttttaatagaggacatccctttgtatctgcctttatatttatagtcaaaatcaaattcccttctcactctggattttaaatttcatggaactggacagtaaacttttaatggattgtgatatcagagaaagagaattttaggtatgaaagtttcctcaggaaacgaccacatgaaacccactgtttaaatctgaggactggtcacttggtaagcaggcatggagaattcggttagggtcgaaatgtgggaaaatactaatttgtgataggtgaagccagcagtagtcagtttgattacaaatttcggtgtaggtaggtgttctcataggttatgtgataaactaataaatgtagaggtaaactgcttgataaagtgggcagaatcatggactgtggtctattttattctttacaagtttcaactgaaaattactaaatagaagcttattcgttgacataaatatcaagatcttctataggaccctaaattgtctagcttaatagttctttaagaagagtgcttatcatctctaaccctgtatatttgtcaacatgtcccagctaaccaagaagaaatggtttaaatcacaatttcttggccctattgacattttgagccagacacttctttgctttgagggactatcctgtgcattgatgtttagcagtatccttaacctctgtgcactagatgccagtagtataacctttctaatctgagcaccaaaaaaacaaaaaaggcctaatgtccccagagggacaaaattgcccagggttaagaatccctggattagactaatctatttgtatttgaggcaatatggcattatagtgttactggaatgataacagcaaattatttttgaaaacaaatatttatagtgattttcagtttacccactgtagttgggaatgtgatacacattcatcaatttttggagtgtagtttttcctagctctggtgctttgttgaccagagttgagaacatagatttttgttaaatttttgagagttctgtgtgctgtattgattccttttggttgccactttattcttagcatggaaagactaaataagattttggctaaaataatcattttctctgaaaataacgtataggaattgttacctgaaaattatatccttatgggagctttcagaggcagaaccttcttaatcagtgccagtaaatcaggttcataccctgatttatctttcctgccctttctgccttctagatgggataaggagaaggtggatgtattcctgccaagtctttgccgtcatgtctccagacctggataaaatttgtgtgtgttttctgaggcaccttactattctatgatccaaactgggcagaaaccaagttttgggcaaaaacaaaggaaatggtttcaaatgtttctgtcaagaccagtatttttgtaccacattcattcatttataaactctctaatttactgtggtacattcaaggaaaaaaggaaaggtttgtccctatctactgatgcaaaccagcaatttatggggtggagaggaaaagagcaagggcctggagaaacctctggaagagagagggtcttgtcctctgtactttctgtattctgtgcttcagccacacagaatgacatatcatccataaacagactgtgccttttatttcacatgacaacagacatataaaactactatagagaatgtgaagacaagaaatgaaaattaaattgagctacccttttctatccaacacatgggacaaagcatcttaaaataaactctgattgtaccaaatgtcaggatgggaattgaccgttgatggaagcacagtgtctttggagaacaatttaataatatctactggaattgagaatccgcatgtcctgtaatcctagatatgtgcatgaatagcactctcaaatttctgttccttcctttttagttttttgaaatcctgtttattgtttaagtctagctcctaggaaattcttctcctggctatttttgtttggttctttttatttttaacttcttaatgtagctggtttatacaaatcatatttactttgtactataggtccttatgtttaataaattgtaaactcttcaaagtgaagggctgagttttattcatttttatgctcttcagtatctacactgttgttttgccacagacattctcaggttttgcttactgagtttctggcctgttctgagaattatgaaaagtagcgtgcagtcaatgaggttgctagtttcttcttcccccagaactttatctgaattcactgagcttcctttctctgcttgggaacccatatgctacatgatttaacagcttagaagtgaaatatctgctgccttgtttctgaaccatgtttggcaacccttctccacgggttgtatttcccgctttacctgctttactcaatacaaagtggcaccttcactattactttcaggtagttgggtgccataattttttttattggtggtgaaatggagatttgggatggttacataccttgcacaagctcacataggtggaaagcagtagaagaggggcctgtgccccttcttcaggctgtgcttgtctttcctgacctcataattgttctcttggacttttgggacctatgagaaagaaacagaaactggccatcagtgacttagagaaacaaaaggaaagctttgctaaaagggaaaaggcataatttgcaggttatgtaaaaggaggagaaaggagtaggcacaggctgaaggaaaactgggccctaggccagagtggtaaattatggcccataggccaaatctagcagaccccaaacagctacctgtgtttgtgtggtctgtgaactaacagagatgtttacatttttaaatggttgaaaaatatcaaaaggagaataatatattatgaaacatgaaaattatatgaaattaaagttttattggctctcagccacattcatttgtttacttattgtctggctgctttggtgctacaaggcagagctgagtagtagttacagagactatgaggcctgcaaagtctgagatattgactagctggtcctgtacagaaaaactttgccgaaccttgccttaggagatgacattcccacttaagttgtggctcatgccgatctgctgctctgtgggaaggagctggcttctggacagtagcagctggctctgggcatttcagagacctgtttttcattttagaatttgccggtgattcctgtggtgttttgcgttcaaacatagagtttctctgttacatctttttaaacacagcacttgaagctatcaagacatgttctttggtgtaagtagtgttctcatgatcaaaaatgaattaaaaacactgatggctagttggaaaggagatgcatatttcttcttcagagcttgagtatattctagaaatttgttctagaaacctggttatgaatttgtggctgagctcctgggaggaaataattagcacgtttatcaatgagtatttttatttttctttaatcattgctataaattaggctaaactgagaatttggtggcttttaaaatgacatattctttttaatttacatcttactcatttgcatttgttgtagaatgcttgcctccccaaactgaactgaacagaactaattttctttcttttttcttttttttttttttttttgagacagagtctcgttctgtcgcccaggctggagtgcagtggcgtgatctcggctcactgcaacctctgcctcccgggttcaagcaattgtctgcctcagcctcctgagaagctgggattacaggtgcccgccaccatgcccagctaatttttgtattttttttttagtagagatggggtttcaccatcttggctaggctggtcttgaactcctgacctcgtgatccaaccccctcggcttcccaaactgctgggattgcaggtgtgagccaccgcgcctggccaatgaaactaattttcaaagctattgagattgcagttaaaaatagttatctagaatagtagaattatagagactgttatttaattaattaattaattaatttatttatagacagggtctcactctgtaggtcaggctagaatgcagtgacgctatcatagctcactacagcctgaaactgctgggctcagatgatcctgcttatcacctcagcctcccaagtagctgggactgcaactctgttgttgttatctttattctgcttaccaccttaaagcctacatgttgcaacccatatttggtaattacactactaaagatggtgcagcagtacagaattgattactgcccgactgtgtcacaaagatacctcttcaaaaaatagtttataatttaaaaatgtagtatcttcaaataagtttttgttttcagagtaactttacaagcaattcaaagagcaaagatacatcgtttttatacacaaaaggaagattttcattacagattttcttttgtgtattaaaagagggaagtgtacttttgttaattttaatttggttttcttcaaaacaatacaatcaggtttatgcatttacatacttagttactgattgactcatgcatttttttcaggccttgattgttttagtagcacattgtggcagatttaggaaaataaaaatcattttaaaatttctattaaaatatggatatactccccctttcttgaatttatttcttaaaggagatgtgattaagtgagaaaatgcttaatttgttagtgtggaaatatgcttcatgtttacaatttcttttccgctataagaaattaggtttaaagtttagtttgtataggtttgtaattaaattttaaccaggaaaaaatctataaatagcaactggataacctttgctcttcatttcaagagcaattaacactaacttttttttttttttgctgttcttttttattattagtcttctcacaagggagtatcagtttctgtgcaagttcatgagtgatggggatactccccaggcattatcaatacagaagtgacaaggtatactacattggagtgtcctttccttttttggttgaagaactactgtatttataataaaaatctacaccagaagtttaaagaaaaaaccgtatttcaagtttgaatacaataaagaacatgattattactgtaaatatactcaatagacttttaatacaaataaaagtcttggtgaacatatggctaaaatgaggggctacttgaggcaggaaagtggtcaggaaaagtgtttcatataaacattggtgaattttcaaaaatgggccagagttgaaattaaatatcatttgttacactgatagtttattgattttaatattgcttttattatcttgtgtgcataagacatcctggtgcattaactaatcatctgctcatttaatttggggttatattctcaaatttttacaaagaactttctcatttgctttctagttactgctaacctattttagggttccttccaaacggtaggtgagagataggactttcctctgatttaaatgctgtttttcttatctttttttttttttttgtgctgtggacaggtaaaaattctttatggaacaaaggaattttcaagtacacataatttttattgttcttgacagtactcctggtcagtctcggacactcaagtgcagtaaggagatactgaatatgcatcatgctccacagcttgaccctcccacaggcacagcaacaagcgaaatagatatgtggattttggcaaccttggctttgtgatgctagggcatcgatctggcctgggagaagaaaagctccagaagctatactttattccagagccccagcacacagtgtctcataggcaaggctgctctgtcattgactattctgttttaaatggtttgaagccacaacttttgtgggctttcaggtgcgaaatacttaacagatgctgcacacagggctaagaagggggccagtaacatttaggtcttttaaaatgcattctctaacaggttctttaaacatttaaatctttccttcctgtttctagcaatgtactaaacaccaacagctatctcatctttaaaaattctgcaaatacagaatttaaattatttctttttgaaaaaaggaaccagctaacagtttgctggtagactaaaatgatctccataatgtgatcacctggggaagtcttagagcgctgttgttatgaagagggcggatgggttctttgatgggattttccggtcttgtccaagccagctctgaggcaccttgtcttcagaggcctcttctcctgctctggctatgctggttctttcctggcctccagctggcaccacagtggtgaccagaatgccctgctggtccagggcctctggaattcctgccggccacgtctagagaaggacaatcctccttttcttcttagtttagtttagacaaggttggaattttttaaacagtgactttactaagtaaccaagggcaaaacaaaacaaaacctcacactggaaaatcaccgaagcaaagaaatgaacagacttacaaagcagagattcagagttcttactcttctctgactttggtatagttctgtattgaaattctaagattcttgcagggaaaataatgtatatataaaactgagcaaatcaaagaagcacttatgggtaagcaacctggatacctgcacacccagcacattttgagggttcatgaattctgtgtccttgtccagcgtttctttctcccctcttcactctcattcctcacttcttcctaccactttcttttacacagatgactcttctccatgattggagtccatgagatccatgggtagacaagtggtaatagatggtctaggtatatttgtcatttcttagggacatattacattacatattagcataactgtagccattggacacttaattttcttcactagatagaattttttttttttgagacggagtcttgctctgtcgtccagactggagtggagtggtgcaatctcggctcactgcaacctctgcctcccgggttcaagcgatgctcctgcctcagcctcctgagtagctggcattacaggtgcgtgccaccacggccaggtaatttttgtatatttagtagaaacgggggtttcaccatattggtcaggctggtcttaaactcctgacctcagatgatccacctgcctcagcctcccaaagtgctgggattacaggcatgagccactgcacctggccaataggtagaaaatttttatgctgttgcccatgactatttttgtattgctttaattcttgattttagtagcagtttgtgtatgcttttataaacctatataatttagtaaatctacattagtttatttagctaagctttacaaattccctcataatacaacttttttagaggtaactaacagcattgtaaatttttagatgcaaatgtatgccaacaataattcccattgtgtaatactgtgaaattttggtaattaatattttaaaaaataattggagtatttattgactggctagtctgtgttctgttgctttgtgtgaaggaaaaacagaaaaaacaaaccagaatgaacaaacaaaaaccacacaaggctcagttcctgttctgtattgaaattctaagattcttacagggaaaataatgtatgtataaaacggagcaaatctgagaagcacttacgggtaagcaacctgggctgcagggaagaacacacacatctggcatcaggaaacctacatctaagttctcatccttccactcaccaaccttgagccgattcttgagcctcgtcagattttacttgtaatttgtgatccttacagtgctgtgatttgatgtctcttgacttttttttttttgaaacggagtttcgttcttcttgtccaggctggagtgcaatggcgcgatcttggctcactgcaacctccgcctctcgggttcaagcgattcttctgcctcagcctcctcagttgctgggattacaggcatgcgctactatgccctgctaattttgtatttttagaagagaccgggtttctctatttttgtcaggctggtcttgaactcccaacctcaggtgatccgcccacctcagcctcttgaagtgctgggattacaggcgtgagccaccgtgcttggccaatgtctcttgacttttaagtgtcagaatggtggtagagacagagtgctgcaggaatcagaaaagaggtctcaagaaaacttactattatttgttaggccaaagaaggcatagatataaggttgttttgtgttttaaattctactttttctactggttgttgtatcaagatctggacttggccaggacttggtgttgcttttttctcttaattagcttttgatttagatgcaggacagtaggccaagaataactagaattaaatttacatttaaaaaggttccaagtgtttttatatgagaagagaaaacaagtctggtgtttttatgaagctattttctgttttcagagaggaaccgtatcctcttcagtacatttaaatattgtatgctgttaaaaaaataaacttatattcatctgtttcagtcctgacctttaagtcaaataaattaataacaattatgctggtaacttttttttttaacttttatttagggttcaggggtacatgtgacggtttgttacacaggtgaactcatgtaatgggagtttgttgtacagactatttcatcacccaggtattaagcccagtactcagtagttatcttctttgctcctctgtctcctctcactgtcacccttaagttgagcccagtatctgttgttcctttctttgtgtttatgagttctcatcatttagcttccacatataagtgagaatattcggtatttggatttctgttcctgtgttagtttgctaaggataatagcctccagctccatccatgttctcgcaaaaaacatgatctcattttttttttaatggctacgtagaagttaaaacgaagttttatggtatgtgctacttaaaaattggggacccttttctaacttgttacataaatagtcatcagaatacctagattcaacttttggattcattaattatctttaaaatatgattgcatttagtgaactgaaaacatggcaaataaaaacgaaatcagtttgtgggagcaaagtatttatgtgcatacgtatatgtgtatatgtgtatgtacacatttgtgtttactagccatggaggttattgttgagccttaagaaaggaatagaaagtatgaatacattttaatctggacttctttgatatcttgctaggtcattgtcacagcagcatttgttctacatgtgtttgcatctttagaatggagcatatctagtgagtggtacactctgagacttaatccttggagaagatggtggtgtgcactgcttttttttctggctatttttcctactgtttccaggtggattttatgtaaattgaaggaagcagttcaagcagaacaactggaagggaaagagtgtgacttaattttaaaaacatatatagttacttatacagttgttttttacgtgtaagattagcaaatattaacagaagtatttagcctgggtgttggttttggaaattaactgttatttattgaataagcaaataaataccagtagctgagtcttttgtacagtatattaggttgaagaaaaatttggtttattaaaatgataaacttttatcttattaatatcacttgatattttatgttcctcaagcataaacatatttttttaaaaaatgaagtattacattttaaacagcaagtaaatatcctaaaaaaccgggctccttctcactgaatggctgtgttacaccagtactgtcagctccatgggttatggcagagtggataagtgagatttttttttcatgttgagataaaagataaactaagaagtctacttttgaaccatagacacaaacttaaaaaataactataattgataattatatctgattttctataaccagatttaaattctttattgatgcaagacatgaatttttcttaataattctcagaatatcccacacttaaattagtttaaaagcatatttggtttgtagaaacttctttcgaaaaagagtcctattcagtttgaagaggtgatgggagtgagagggtcagtgaaatagaggaagggaagttgcttttaagtgtggtacaaaattacaaaatatgtgacttgaatgagttcacaattaattcagaaaaatctgaactagaagccactgctgagtgctggcaagggaaattatgcttatgtaaaatgtgacactgaattcttccctgaacagaaatttggtttgggtagtttcatccttgggatttatttctgtggattatgcttattgtggttgtagcatttcatattaaccgtaacaaatggaatatcccagccattctttgcatgctatgactttcagcctatggtccagtgtgcatggaccctcttgcaacatatacactgagacagtgtatagtgctgaatttgttttttatttggtttcaggaagtcagctggttacttcagtaatcagcagagattcagaaatatagatgttgtaatattatgcaaccatggatgtgttttatatcacttggtatttctgataaattgaggtacaagtctgttgtgctttgaattattggagagttgtgttatttcctcttttattatgattaagtgtattacaaagaatttgaggatgatgtttttaaaatactagggtaaatgcagaaacagtacagaggagtgtttgctttcttgatatagccagagggcgctcactatacaaggagactagagacctctaactttgaacttcaaaactttgaagtcatttttttctcattcctctgatttattcttcgtatttaggtatagtgctttgctcattattttgtctctgtctttttttgtttgtttcatctgtagtgaaaagtgtgtgtgtgtgtgtgtgtgtgtgtgtgtgcgtgcctgcctgcctgcctgcctgtataaataattagatatctattagatatttgaaacgggtaaagattatttttaacatgatcttaatattgttattgcattcaacagtgattccttaatgttatttaatacctatccaaattcacctttgcctctttttctcaagtatgtctttttatagttggtttgtttgatccggatccataaatttatcttcctaaacaccttccaagctgtcacttaccttagtctacactgcaggactctggtagcttcagggtcaaatctagcctaaatattgtttttcaaaagcctcaaattaagttctatgtttcaggaaattttacttaaaaatcagaatctttcttgttttggaggagaaaaaaggaaaagaaggcctggaaaccctgggttttccttcccgtatggcaacaacagctggctgactctgagaagtcctctccttggatggggtgcttgtgcactccagtcaccatagcaggtgcctggcctcttcactgatgtgtttgcagccccctctctgtatacatcactgaattagataattatcattgtttctgaaattatttttcttgtctcatctttcttaagtccagtgactcttcgcatgctatgactttcagcctatggtccagtggttttgtcccccctggaatatttggtaacgtctagagacattttgttttgagcagtgggtgctacttgcatcctgtcggttgagtccagggaccctgctaaagtgtcctgcattacacagcatgaccccatcactctctcccagccccaccccaagaaagaattatctggccccaaatgtcaatagtgctgaagttgggaaactctgctacagtctgatggcacacttctaatttcactgccccgcttctagtgtcttctctatttccaaatgtatttattatcatttcccaatttgcactctgttcatactggattcctcactatccagtcaagagatcatgcttttacacatcttttggaggaggggggattatatttccaggttccttgactgtgaaaatactgtctgtcattttttaaggcctgaacatagatatattaagtcttatattctagtgatttttttgtagatttttattgttccttcaatgttgaactcctacagtattctctgcaaatatataatctgtgatttaaattagtatttagtatgttattctcagtcttttcatatgaactaactttacattcttagttggattttaacctgcaagaggatagagatcgtatctcttgaattgctgtgccttagaactcccaacctcggaagcttctctgcctataggccttacagagggatagtccattaacccatggcttgccctagtcacaactaacaagataagcaggaaccctatgttggtcagggttctattcaaacgaagaacccattttagatatcttgagcaaaaacagatttaacaaaagtaattacaagcttatacaattactggaaagcctggaagaatgggctttagcaaaactttcagcagtgacttctagaatagcagaaatagctgaccaaactaggaggctactacctctgtcccagcggggaatcaggagcccaccattggaagtattgaattcagaaataggcttccataaatgtaacccagggatggagaagctgtctctgttgattccttatgcccatgaggcagtgactataccaacaatgcagaattcagccacagcctttgctgctgtccatatgtctgtctgtctctctgcctctctctctctttctctccctctccgtccacccgccctcctccccagttcccacaaagtgtgagattgaccctagaacactggtgtagggtaaaccgtatccttctgaccatgcttaccaatggaaatggccaaaagtgatagggataggaccatctgtttttcaaatctcacaggaatacatcttagaggaggggtataatttacatccaaatgtttagctccaaagaacttggagaaatgcacctttaatatttgattttctcatgactttttcagtaattgttcttcctgaagcttggcaaagcattaaattattttaaatttttatggatgtttttgacaatagggacccaagtaagggcttagcattacatgaaatacatgctttttaacgtggagctctattataaagttctaagcatgttgaatactttgtcagcttttaagaagaccaatttctaataaagtcatgggaaaaaaagaaacttatgaaatagaggcaactaagtaatagaaatttatgtcccctcaccatccttattgttttgaggccagtggattgtaacttttatggaagagacggcatggtacaacttaatcctaattacaattttatgatatttgtttgacttattcattcatttcttatttactagtgctcttattttatacagcaccctataactttcagtaaattcttagctgactagtgtcacttttctgagataaaagtggggcttactcacagcttctggattttgataatgtcagtaataaaattctggctcattaaggaaggaaggatttaatttgactcagccttttaaaaattcatgataacaaaagtacaaaagaaaactttgtggactaccataactgtactttctaattgtaaatttatgtttcacaatttttatttgaaagtttggtttttatgtaattgttttttacttttgtagtttctttgctcgtaacagtaactatagttaagcttatggctgaaactcctgctgaacaaatctacagaggagtatcttgcattcaaattagaatgttgatcttcctcacattatttggagttgggacaccccaactacacatggtatttatttattttaaaatttcatttgttttgctcattgtgataatttcaggtggtaggtagatgtaccttagtgttcaaattaacacatagacaaaactagattgggaatggctggattagattaatacatgcctatctaggtttattatgtcaccatagcagttttagtttttggttttgtatgtgtgtgtttaaaatgatacagctaaaaacatttgcttttattttgatgaagacaaaaatatttggggaatctggatttgttttggtgatatgcctaggatgtagtcagtttagcccttcaaatgacgtttgtcatctaaattattctgaaagctctagtaagaaatgacagagctcctataagaaatgttgaagcaccagtagaaatcagtaagaactaggatatggtagatctaatgaagatggcataacttcgtttaagagttgtattttcggttacaatgacaataaatgcttgtaactgaaaacagagatagttaagaataaatttaaatttgtccatgaacacactatcaattagtaaacaatgtaaaacactgtgatagtattcatttttttgtttgtatatcttcatgtattttctttataaaatcaagatatacatacatattgataaacaataaagccacagttttgtatttgtcttatttacaaaatagtatattttaagcatttcccatggcattgaatattcttcaagccatgatttttaagtaacatttttatatctgtcacgggattataccataagttttataaccattaccttattcgatatatagcttgtttgccatttgacactaacaaaaataatattgtaagggtattattgaaaataagttttggtttccatttttacctatttttataggaaaagttcatgaaacaaaatatttaaataaaaagatatgtactctttctgtctcttgttacatattgtggagttgatttccagaaggttttatggattttcacttccacgagcagtgtacaaaagggtatggaaatcttggcaagcattacttttcaaaatactttcttcaaggttttaggggaaaatagtgtctgattctctttatcctccttttttatttcttaaatttatagtgatttatttacttgctaaaatattttttgccacttctgtttcttatgtgagttgcatattcgtatcagtggtgtgtacattctagtggagttagaaaggacggtaaacaaatgtattgggaaggtataaatcttaaaaagaaaaataaaatgagattagagtgattaggttgaagaataccattataagtactgttttcaggagatgctttttatctttggttacatttgagcatagaagggtggaggctttctgagagaggaggattacaggcagcggggaccacagtataaacgctcttagctgaggatgtgtttgatgtgtctgcagagcagccaggagaacagtgtgcctgcattagggacaaggaggggatagtgatggaagagatcagattgacagtcaagaccagatctcttaggtacttggagtgtggactagggtaaggagtttggattttattgagaacaagaggtaaacccttaaaaaaatttggagagaaacgcaagatatgtgtgtgaattagaataggttattttatctggacttttggttggtgaatgtagtacaggctgatttcagccccattttcccctttagcctctctaaagggtggctgtattatatagtacagttgctaaactatatacattgtggccctgaattgatagagttacagctatatcattccggccagtagaaagaagggattgacaatggccagggtagatacagggaaattctttaagagatgatttcagtagtctagggagaagaggatggtgcctaggtttagactactcacagaaaagatggttaggagaggctggatcctgtaatgctgatagaatttgtggtcaacttagatggggaatgtgagagaaaaacaggagttaaggatgactccaaattttattcttaaaattttgcatcttagaagttttaatttgtttaagtcttaacaccaattgagtatatactctacatgctttttttttatattctcactcatgtttacatagattgtaaacacgagttactctggtgactgctttactcttattttaatacttactattaaaacttatagtcttctttgtgtctgtaatgttatctaaatgtttattcagcagaatgctagtggtggaaaacaggaccctaaaaatatttttacaagggcggtcggagtgtttaactctaggaagtaggccaaaatagctgctgtgatgcactgagcagtgagtttgggaaaaagcattctgcaaaatgtcagccgatagcattgaaaaatagcagagctgcttgaagcagatttttcagtttacagaaattgtgttataaccaaagcatggaagatgggaacaaatggcaggggaaatctggctacatgactgtaagatcagtgctgctgcagagagtccctgagtcagctttggtttgtaccaaggcatcaagtgtatttggtttgacaagagattggaatgtgctgacaatgcccctttcttataatcttaggcagtatattacaaagctttattttgaatgtagcttttatcgtttgttatttattgtacttaaattatgtttaaaggcaagcactgggatatttgtgtgcttaaactttgtttaagggcaagaactggagatttgtgtgcctggaacagaccctactctgcctccactttccatttaggtcagtgggcaattaatcttgtaatatgaaaggtttcaggtttgtagtgtttttattgaccaacctttacatgaaagtacatctaccatgtagctggaaaaagatccctgataacttttctatgtaccacccttagtttttggaaataggtaaaggaagaaaaagtgacagactgagaatgaataggcagagagatggaaaaaacagtagagagaagcaccaggaggggtagattcatacagctggatggtgaattttgcactgatttgttttgctaacttaaaacttgttggattacataaatttctattaaaaaagaaaacactgcattcgtattaatttaggcattatttttcttgatgacaaaaatctgaataaaaaaactagttccttttaataaaggacattaaatatcagtagataatagctttacttgtagtttatttagagatactttcaagggataaatacttttctcatctttttgaaagttataatttggcaattgttttctgacaggaacatttggttacatacagtagatgtatggttagatacagtaaatgatgtttttgccaattttctaactctctgggaacagaagtggagaatgttgaatcccattcccctgttacacacatttcttcacctggtgaactcatttgtcctcagttttagggcgaattcctcacaatttttttcataaacttccaatttaaaataactttctctgttaaaacctttcatcctcttcgtgttgttgaacttattcttagttttactgcagtttccattttaaattgtttgtggaattatttgccactgtctcccctcacaactgtattgtaagacccatgaagacagggattgatttttccaaaaatgtttattgagtgacttccttccaaaaatatttattgagtgcctactgtgtatcaactaggatttggggatctattaggtttacattctcttcaattccagcatttacttcgtttaccattatgtctccaacatgtagcacagtgcctgataaacagtgaatgtcagtatctgttgaaagaataaagatgaaagccctttgaggagtatttgcagggctcaaatgtggtgtggagtcaggggttaaatctgtagttgaggaacatgaacttctcctgaggttggggatttctttccccatctcaatctgaaatttccaactgtccctgttctaacttttctttcaataaaaacgagaacttccttagtgttagatccattttgtaaactgcgtctggggaatgtatgcagtttaagtaaactgcaagataaatcacagaagagttaatgcagtagtgatcattttattagcggtccacattaatagaatacagcaatttaaattgtaatgtagttaactttgtccttttttggggttgtaattaatctaaacatccagctatttatgttacttataattaaaggtaggaaagccattagataactcatttgttcatactgtgtattcaattatctgatttattatttatctagtttatgtactgagagtacataataaaacttaataaaacctcataataaaacttattagggggcagtaaatgaagaaacatgttgtgttcttgacagagcaggtacatggacactcagacattaaaatggagaccaggaaattaaagatcagaagcagcatgtggaaaacattctgtctggggccacttattataggaataaacagctctgtagatttagatgttctggggaagtaccctatcattggaaaatatggtaagtgatcatgagtcctcaagaagaggttatatttgtttggtattctttgcttaattatcacatttgacagaatgatttgcattattaacattattaatagaaagtgtttagagaaagttgaaaggcaccatggtttaattgactggaatgctttatgactaaaaatgcagagagtagtttgtgaattttcaggaactgatcctattctttattaaagcgtattgtgtatttctgaaaaagcacacatagtatagtttaattcagactctctgagctgtatatacttctaattatatactagtttatgaaattactgagttccttctactttgagaaattctggaattaagaatgagtgaggattgttggggagaggtcgttgaagctgacaaaacactgaatgcttaccctcgtttctaggtcacagtgaaatcagacttcactggggagcagttttctgatgaggaatgtcatgaatcctttcagaaatgggaatgtctctgtgtttgtctctgtaatgtagaggcatcttgagaggctggacttttgatgaattgtcataagaactgaccccatatagcattggctcagctttctaacaagggattcttatttcctgctacataaattccccaaatgaaacattgactctttcagacataacctgacccagtgcactgggtcatactggagtatcctgaccctgtatggatttatactgctgagaaaatttaaattgcgttcaaaagagagctattttatgaacatctaccttaaatatgcatcttgcttatgactaattaatgccttgctatgtttttgtggagcagtcttgaagaaccaggtggcgaaccattcatttctaatgtgttgtagctaggaattagttgaatttgactgtatacgaggtgaggaaagagaaagggaggaaggcagggaaagaccagcttttccacagtgacattcttcaacagtattttttgccagcagctgatatttcttccctagtgctgtttcaatgtgtatattctaagccttgtaataaatttcttgctaatgacttaaagtgatggcatttgtacaggaatgtgtaactgttggcttgattttattttacaaactggtttgaaaaagagagaaaatcctctgaatattcatttctgcttaagtccagtggaaatctcagtaaaatattggatgtgcagaaaagctttacactttaggatgagctgcattattatctttttcctgcatcataataaaacccttaatccaacatttaggttgtttgatagttggcgtttataacgctaccggggtgagcatttatcaagataaattgtggagatttgtgttccttcaggatagggaatgtggcatttagaattcttattgtttagaaagtcacagaagatactttaaacatttcttaaaattttatttatgtaacagactcatcttttcaggttagatttatgagataatttggagtccttcactactttaaacattttcttaaaattttattgatgcaggagactcatcttttaagattagtcttatgaaataacttggaatccttcttcactgctctttttcacaaaccctgtttaatctgtccatcaatgttgtttagtctgccttagaaacatattcaaatggatgactttttacctcctttactaccgttccttgtctgtatcaccatggtctctaacctagaacactgttcagaacactcttcaacagatttcctaattttgtccttggcctctcctgtgatagcaaccagggtaatcctgttaaacttgagtcagattatgagatgcagtattgcatagcagttaagagcacagcctctggagctagtctttctcggttcaaatatgagctctgccacttaccatatatttaaagttgggcaacacagttaaatgtaatattggaagagcagtaatacttggattaaatgaattaatagtatctatatggtagacattgttattattgtattgttattactgttattttagtagctattatatcatctctttactcagaatcctctactagcttgctattacatttgaagtaaaaaccagaatctttacaatgacctcctaggccctgcacagtctattcattctgacttctgaactcatctcattttcccttgcatagtctcttctggccattctggatgcctgctgtcctcccttttcttccactgccaatgtatgaggcctgaacccagcccagtcatattctctgtatttgttgtttccttttactggaaagatgtccctcaaatatctgcatagctcacttcctttgcttcaggtcaccctctcagtgaaacttggttatgtcatccaagatagcaacccattcaagactccctgcgacactctatgacacttcgttctttatctttagccctgaaagttaaatgcaaatttttgtttgtttttttttttggttccctgtattggaatataaactccatgatggcagaggcttatttttggtctcttgtcctgtcttgaatgctgagtctctagaacagtggcacatagtaggcacacagtaacattgaaggaattagtgaacttatggcacctggttaattctctgctcacaacctcatgtggtatcatctttcccatgtatacccagtattctcttagctgtgccccctgtggtctgtgatctgctccatcttggcttccagctgtccactcttaattctaaatggtaatttgcaattaaccatttcctgtcttttgaataatgaaaacacgaatccctctccatttctgactagcaaaatattctcatgtctttgagacccacttaactgtttcttccccctgcggtattacctcaacttgtcttgatttcttcctcctgtgatttatcgttgcccttcattgtttaacctcctcatagggctgttatctagaatcagaaataccaatttttttattatttggcatacctaggatggtattttttttagtgtgatccctgttgagcgtcatccgcatctcttcatgatgatacctggtactcggaatttattccccaggagctccccatacaaactgaatcagaaactcttggggtgtgacccaacaatctcttgtttatacaagtatttgggtagttgttctagtccatgctaatgcttgaaaagcactgagcaaggacattggcatgatggtccagtttccagactgggaatatctgagattaagggtccagttggggccagtgctgtggctcatgtctgtaatcccagcacttggggagcccaaggcaggcagatcacttgagaccaggagttatagaccagcctgaccaacatagtaaaaccctatgtctaccagaaatacaaatttattagcggggtttggtggtgagcacctgtagtcccagctactcaggaggctgaggtgggagtatcacacttaaacagtgggagctaattgaatcagaggtcattacgtcttaggagagtttttgtgaatgtggcagatagagcttcttactgcatcaaaatggtgctataaagccaattatttagaagcaacattatggagctgtattcctgttattttcagaatttttatgctttgatatatggaaaataccttttagtcaattccatcttttttaaaaaatcgcaggtcatcttggaatcatagttgaaataaatagtatttctcattaaagcattaacatgtcagttcatcataagtttggtaattcagaatggaaccaaagaacttcattgtttggaatacaggttggatatcccttatgcaaaatgcttgggaccagaagtgtttcagatttccagtttttacagattttggaatacaatcatctgttgcataacgacaaagataccttctgagaattgagtcattaggcaatttcgtcattgtagaaacatcatagagtgtacctatgtaaacctagatggtgtagcttaccacacctagacaatatagtttacactactgtttctacactacaaacctgtaaggaatgttactgtaccgaatatttaggtagttgtcacacaatggtatttgtgtatctaaatatatctaaacataaaaaaggcaacccattgtgctatgactgctactatatcactagatgacaggaatttttcagctccattgtaatattatgggaccagtgttgtatatgtggctcatcattgatgggaacatcatgtggcacattactgtatttatatacacataatgagatatcttggggatgggacccaagtctcaacatgaaattcgtgtatgtttcatatataccttttacatataatgcaatattatataatgttttaaataattttatgcaagaagtaaagttttcgctgtcctcctcacattaggtcaggtgtagaattttacacttgtggtctttcagcactcaaaaagttttagtttgaattttggatttctgggctaggaatgctcaacctgtaatatgaattggtaaagtctcatcaggttcagtatttcatttattcagcactatgcatatgacaagatatcagtgtaaaaaatgaaactataaaagtactggaagaaaatatgaataattattttataattgcaacatgtagaaggcatttctgaagtgtgagaaacaaaacccagaagatgtaagaattaatggccgattttaaaaagtcatagaaaaataaaaattctatctggaaaaaaaatcatacaatcaaaacaaagttcaaagataaatggtaagtggggagaaaatgttcaacccacaaggtttacttggaatttattgtagagatacaatcttacatgtaagaaattacttgtgaccatctttatcaattgcagttttttgatatttaatttttttttttggacagcagtgcaatggaaacagcttaaatttttaccagcatgctggttaaataatggttcattcatacaacagaatattatatgtctgtactctatttggaaatatctcgaagaaatacaaaaattttaaaaagatgccgagtggaatagagagtatgcacgtgtatgagaagtatccacttgtgcatgcattaaaatatctcttaaagcatacatcagaaccagttttattgatattttctgaagggaagtcagttaaatatctggtaaagattatcactttctacgtcacctagtccaaaatttaaattacaaataaggaaagatcagtcacatatataaatatattttttagatctccaacttggcacggtgaatgctagaatgtttcttgtattttctgggatatactccataaaaagatacctccttacataaagatgagaatttatgacagttttcaacacagagtgaataataaacttttttggagtcttgtggtaattccatagaagatgatatttgtagttgtcttcatcaaatcatcatttaattttatgtactgaaaatacataatatacagattcaattttctagtaatatcttatatagcaacttcaactcgtagaacaatgtggagaacttcagcaacttgttaggggaggattctgagctgccaaaactgatgctataaaactttcaagacagtatgaggatgggctgctcctcaatttaaatgtattcattttatgcaaggtagatgcaatggaagatataaaatcaactataaaaatcatgttattatgtgttcatggcaatgtggagtaaagtaagcaaatatttcactataattgaagatggtaaatgaaagttatgacttctgtccatttttgttcctgtttcagtcacaccacgctttatcaggtctgcttttaattttgtgtaactcatccatttattttcattgctttaatttcggcagacttgtacataaaggctgtttattttccgttatgaagaataaaatgttatcttgattcaggcacctcacccttacaactttctcttagagcatggcttgcctaagcataagcctaactcaagctttctgctccagggcaactctccttattcatatgcgaattggcaggaatgtattacctcagcctgtgctggtttgtcctggttcctgactttactattgatccccttttcatataagcattgaaaatatttttagtgtctgtgtaaaatatgaaataaacagtaacagatcatatgtgtttcagcaagctacataaccttggtatcagatttctggcaggcagttcatattctctaataaagcatttggctagcagatgggttaccccatcccactcaaagaaggtttctcattcatttgtggaggttgctgaaacctttgaacccttggaattcagcagattaaagtccgctctatttgtgaaggggcagatccattttcctttgacattaaaattatatctagtatatacatttttataacatttgaagggatcaaatgtgttttccaagtcataaattctggaaaatggtcctatactctttgttttaatttttataaagataggaaacatactgcttttccaagataatcttttcattttggatattgtttattgtactttgtattgatatgtaatccgcactcctcattaattcccttctctatttccaccccagccagttctttccactaaaatcatatagagaaaatctagtattgttttctcttcaaatgtaatgagttggtggggagatagtgaatctttcttctttttttcatgtagaaaaattctcaatccctcaactattcagtaatgatgtgattgctagacccctgaacctactggttaaactccttatttgtcaaaattctccttaatttagcatcccaagctcttataattttccacagatgggctatacagattacagtgtaatcatcacttctcttgttaagatagcttttgtttttgtttgtttggtttggtcagccatctcacattttggctcatttttgagtttgtattcaagtaaggcccataacacacttttttcccccaactttttaaagtcaagttttactctgattgaacctcctccccgccctgtgtgatcattctttgctgtttgaattttacttttcccttctgaactctggaaagaatttgctgaaactcagtgtatagtccttggctgcaatccagccctttcatttcatctctctgtttctgggaagggattggcatacatgtggaggagcagctcccaccttttttaactgcttatcatgtttaggttgagttcttaccttttaggtcatggacaattgttgagacgcagaagtagagaggtataggggtgatgagggcctgtgggatttactgaagggagttattgcaagcagttctaagtaaagtgtttttttgtacagattggaaaaattatatggttcatatgtatgtattaatgactttctgaagtatatggatacttttgagattgtgagaatgtaaatttatttaaatgtcactgtatttatttcaaggttttctcataattttcttgatcagttgttgctataacatggttatagagtagcccacaatattttatattaaaaattacacctcatactaggaaaatggagccttttatttttatttttttgagacggaatcttgctctgtcgcccaggccggaatgcagtggcgtgatctccgctcactgcaagctccgcctcctgggttcacgccattctcctgcctcagcttcccaagtagctgggactacaggtgccagccaccacacccggctaatttttttgtatttttagtagagaccgggtttcaccatagccaggatggtctcgatctcctgacctcatgatccgcccaccttggcctcccaaagtgctgggattacaggcatgagctaccggatccagccaggcttttattttaaaattcaaatctttgtctaatatttattcaagttttattgaccataaatatacaaattttgattttttttgcagtataatctgtatgttttaaaaaatgtcttgaagctttcatagcattttgaaagttactagctactagaaattcttgatcataatattcctttgagttctgtcttgaaatttgtcaaacattcactattgggttacctaacagaccaaagcacacatgtgggtatatcactggaaaaaatgagtatccaaagggatgatcaggaaacctaaaaaaaaaagttcttaatgttggcatgtataaaatttttatttgaaaagaatgataaagatatatcatggtttggtttgaagtatctataaaggatggggatggtctcggtgcaccttggtctttcacatatctattatctctggaagtcttgatctatccttctacatttggtatctagttagtattggaccttatggttctagaagagtttatttttaacttcatgactcctatccaggaccatttgtcttacagcctttctgtaaataactggcgatacttgccctctccatcccactgcacatactgctatggtgaccaactcattccagtttgcctaggacttttccagttttaaaactgaaagccctgtatttctggaatctcctcagccctgggcatactgggatggtgagtcattctgcatactaccctccacttttcagcacttctcttaatttgtggtttgtctgttcattgtccagagtgggctgtggaagcccaggcatccatgtgaaagctagtgtgtgtgaagatgccctctatgtagcattagaggttggaagtgacttttttctttaagcataccattgcccctctttttctacaaaaatggtaggaaatcattggatgtctcttgacacatcctttttaggttttttttttcttgttgaaattgtgacgtgaattactcttgaggaatttttgtcttgaatttttttcaacagttctgcaaaataaaattaattctcttcaacaattccacaaaataaaattagacttcgtgccttcagttcgtcatagtttttggtgactcagtacttaacaaagcaacaaaattgtgtgcaatgaaacctaggaaaaccaagttttttagtaactgtgaatcccgagttgtcttagattggttaccacttaactgcaggatcctggataagtcttgttttctctttagattatggtttcctccttcatgaaagaagtgggctttgctagactgaccctgaggtcataattcacattaaaggaaatgactttcagtcagtggaagagcagggtatgattactttatgtaccaaatacttattttctggaatccatttggagtcatttttatatctctctagcttcgcctctgagtacagaacacagcataatgcactatccccatagtacctctttcagataagactttctgactgtagctaggataatatgtcggacatccccaagaccacctgcgggttcagtgattcaccaggaggacctacaggattcagcatatggttgtactcatgtctatgacttattattgtgaaaggatacaaagcaaaatcagcaatgagaaaaaacacatgggtgaggtccagggaaaccaggaataagcttctaacagttcttttccagtgaagtcacacaagatctgcttaattctccaagcaactaactggttgtgacaacatgtgtgaaatgtttacctaccatggaagctcattagagattcagtgcccataacttttctggagaatggtcacataggcagcctctgtaccaaaatttcaagcacccagaaggaaggcaggtgttcagcataaaccgcattgtttgtataatttagccacagtgagccatcttatctaggaatgatgggaacccttcccattggaagaccatctggaaaccatatggaatccaacttttcagatgcctgccaaggaccaaccttacaagcagatctttctaaggatagaagtcttaagttgctatctcttttctgaacataataaaactcaatgattgcttcagcccttaacctgttgtcaccaggggaggccacatgacattgaggaataactctgaagttctacttctggccctactagtaatttgttaggtgactttggctaagtcgattactttactggagtttaaccacctgtgaatttgagatgattatgctaactacatagggattttgttaaattatttcattcacacctacatgcaagacatatgatattacttgcccctgagtccactcattctgaaatgttttttaagaacctactgtgtgcttaatattgtgataagctctggaggtctaattgtgagcaaaagaatgttctctgcctttctgtaacttacagtctcattggagagagagactttaatctcacataatttgagattattcataatttgagattatgcaaattaatatgtaattacaatttgtggtgagtgccctgaaagaaaggtagaaagtgcagtgaaaacatgggtactggcctactctagtaggtcagagagggtctctctaaggaaatagcatatgtgtaagaatctcaggtttacctaggcagtggccacatcaagatgtcagggaggaatattagataatggtcttgaaaaggctcttctctttgaatgggagggtgcaggcattattagaaaataaaaatacaggccaatgtggttggagaagagagaacaaagtggagagagaaagtggatgagattggagaggagagaagtaacctaggaccacattgtggtaatggagtttctctactatcctaagagggtatttaccaatgaagtgacatggtcagatatctaactgttttgaaatgatcactctagctgctttgtaaacagaggtttagagtgtacaaagttggcctaagagacgattgcagaaacctgagctagtgctgattataacttgagttagagttattatagcttgctgggagatggagaggaatgtaaagatttgagaaggcgtatctagagttacttgctaaactgtttgaataaacagcttcacgactatttttccataatttttaaaaacaatctggatagcatctctggtagagaaagggatgggagttataactcgctgagttttgcacatcacctacagtctatcttgcacatgcatcctttgaatatatgtgtgagatgctgcctaacacatatgtaggagtttgtgtcgactgctttatatatactaactcattttactctcatggaaatactgtcaggtagatgctattacagacatattacagttgagacgcagagtttaagtaactgaccaagtcaaaaccaagaagaaataatagagctgggatttaagctttactttgccttcagatccatatggccaactatatggataagtagcaaacttatgacccttaggccaattctggcccttggctgtttttgcacagccagccagacaactacaaatgttttttacatttttaaaaggttgtaaaaaaataaggaaaaaatcaaattgtattagacagtgtatgtggcccataaggcctgaaatatttactatttgaccttttgcagaagaagtttctcaacatctctattatgcttttactacgaaaacatttttctttagtagaaagttgagaaacagtaatctttacagataaaagacatgtctggtcataaaatcagttagttgtagaatgagaacagtgtactcacagttacttctgtggcacaataatttttttttattgttgccagtttaaaattaagaactgtgtttaaagttacttgagaagatatggataaaaggcagctgggctagtgctgttatttaactgtgatgccctcattaagaaaattgatttcagtgccactgagactccgtctcaaaaaaaaaaaaaaaaaaaaaaaaaaaaaggatttcagatggacttcagaagctgctttagcatttggtgacaggatatattagcaaaaacactttctgttttaaaaccatggtttgtttttgaatagaaaaattgtgtcaccactgaatattggt

SEQ ID NO: 330 - DNA, 32742 bp, Homo sapiens
  source 1..32742: mol_type = other DNA
ctataaattcggagctgcctcctcgccaatgattccagcgcctgacagccaggaccccaggcagcagcgagtgacaggacgtctggaccggcgcgccgctagcagctctgccgggccgcggcggtgatcgatggggagcggctggagcggacccagcgagtgagggcgcacagccgggacgccgaggcggcgggcgggagacccgcaccagcgcagccggccctcggcgggacgtgacgcagcgcccggggcgcgggtgagtccgcgcggaccgccaggcatgcttgggggacttcaagggcggggtgctaagtttcatgtcacggtgtcctaactgctggctctatactgggaagctctcggggaccaaggaaagagcgaccgtagttctggtcagcgcctgcccctggagctggccacactttcccaaatcaggtgaggggcttctggaatgggagggaacaaggtaggtttgtttgccacgtgcctcgaaattctcaatccattttaaccaaactcttccgagtgcaaggaagaaatctacagaaataagatgcaattcaataaactttcttcctgaggcttttagttaactcttgtattttagccatcatctgagcgggaagccggtatgactctgcaaggcgttcgtttaaaagttgtgctacttttgaggtgaagttaagagtgtctccatccacgccctctgcttcccagtcaatgtccctgcactgctcacgtccctttagctctctccctgcaaaccatagcggtgggtcctagacacgggacatcgctccaaccttggccaaactctcccaccctcagggttcccagatgtcctttgaataatcaaactgaggaaggagaagcaagatgtctccacaccccaatccctacagccttagccaatgcatgtgtgtaactgagacagaattttagcaaaaggtctcctgcttccaggactaaacagagcctctggcaggccactgcccgacacccaactccatcctccaattttcttaaatgtccaggtaaacatctccatagtgccagcctgctatagtctcccgaagacctcagcaattcttccccaaagcgtctccttctgcaccgtttttttctttgggcaaccatttgtgacctggctattgagcccacctgggcctcttctctttgtttgctgatagcctcgttaagtattaaaaacctactcccccccttcaggagccctcttttaatgaaagtttgggtactgggatcagatttgggacttggctacatttatttcctgtgtcattctgagaagagaaagtaatagaggcaagaaatttggcaccctattgatctattttattactttgttgagcaacttgtgcttcccgctgaagatgctgcatcccaacatgattctcttattattagttaccacctgagggttttggatctccaggtgtttatttcacatagcatatgctttaacccccttataagtcttctctaaggaagaaactgccatacttcccttgtcttctccggtgtttccctagctataaaggccccacctgcataacctgtcctcaggctgtgatgtattcccgggtgccctggtaccttctccttcctctccaccacccttcctgacagtgcaggggcaggaaagcatggggagaagggaaatggagactcccacttaacttgctgtgtgatagtaagagcattatttcacaactctgaacctcaagtctctgcccataaggttccctccagtgatataattccttaatttcttttgttttggttattgctttaaaataaaagtctaagcttaaggctaggttatagaaactgcccatcataattgctaggtctcaacatttgcttaagttttgtgattcttagtttcaagtctgttacccactctctctccccgccaccttttttccccctgacttcattgttctttgttcccatcctgaggccttgatttctggttctgctcttctttgaccttaaactgaatcaactcttccatcatccaactcagaataaaattggttttcttccaccggttccactgatgccaatggaagacttgtcttccttgcgatttgcaaaatgtctttcagtcacaggtgctgcggcaatgctgctgtcccacagcattctaagcttcagtctttctctctcttatcgtgggtcagtattcagaaaagggcagatttgtgggttgttcaggtttctcacttttctttttcttctttctagtttgggatcagagttgtgtgagtatttgtgtatataattttgttttggttttttgttcctgctgctacttacgactgctgttattatttcaattatgactaattaatactaatgactaattttcccctatgctagagggaaaataaggaagaaaagtttactctgctacttacccaaagcccaggtaaaatgcttagctgagaaggaatttaaaactcatagtttaaatgcatgatgcatgtctgctgtcattttatctgtgctgccacagtgtcctttcaagcagataactgagagttgctgtattttgctttcgaatttgttacagggacaaaaatagtgacccctcacatttaggtgttttggctgcttaatgcgagctcctgccctctagccgcatgcttattagtttacctagccctttttctggtcagtcatgactggagaatgccaaagagtctcccaagtaggctaccaaattaagaattgtgtttagaagtttgaagtcagtccaagtgttgtaaagattaaaacgttgttttgaagatatgctgtgtcaataaacaaatatggagccagagcaacacaatgtgaccaagtgtccaagcccagcttaggaacacttttctcccatgttatctagcaaactgacaaatcagctttccaacacgtgatgattggaaaatgctattagtttccttcaaaattctcctaatgtttctttttcaaaattgcctaagatcattggattatgtggtttgtgtttcttttcactgtagctgcttgttaaagcagtatactcaatctctgataagcaacagtaaatttgatcgatttgtatcctaaatttagctatcactttacattttgttttattcataatatgaactttagcttctaaaaatcaactttttaatagcttaatatataaagccatcttaaatcaaggaatatctatagggacttaaggtaatattcaactaaattggcaagtgactaccattatcctattaaagctctaaaatgcaatatttcaatcacagaaaaaaaatcttataatttaaagaactataaattgccagatgtttccctagttattacgttagtgacaaattagacaactggaaatagaaaacagagtatatgtttggaacagtcataaaaggactagtgactattgctgctagctgtggttgtattaacattaaaatatttgctatgggatttttcttcttatcaaagcagatgctcagatgaggaaaaactttcttgcatatgaaaatcaaaattgtcttccaaaatatttaagtaacaaaaaattcattatgtagtataaatgctgtatgattacattattcttatagttaatttagaagggtttgaatttgtttttgttttgtttgtgtttgtttcttcgataggtgcattctctaactgtcttaagtagaaacaaatgtctagaatctctcagtgattatcagtctccttcctattaccaagaatgtttttattgtgttgttaatctcacatgtaatttttttaacatttaaaagtttggaaaatgggtaaaaaatgagtgtgccttgtttcctattattacaatgtgccttcctatttcaagtcccaattctagatttccttaaaacttaaaatcatagaattaataatctttcagtttaagtcaacttttgtgtgatttcttgtccacttatacacacatagatgccttcatcttcaccaaataatgtagaaattttatttagttcaatggatttaagtactctgtatgcttaagtacaaaataagaatattgagaaatacacatatgattgtgtaccttttttttttttttttttgagacagagtcttgctctgttgcccaggctggcgtgcagtggcatgatctcggctcactgcaacctctgcctcccaggttcaaatgattttcctgcctcagcctccttagtagctgggattacaggtgcatgccgccacgcccagctaatttttgtatttttagtagagaagaggttcgccatgttggccaggctggtctcaaacttctgacctcaagtgatctccctgcctcggcctcccaaagtgctgggattacagacatgagccacctcacctggcctgattttgtacttttaaagagaatttgttgttgctaatttgctaagtttatttagatattttctgattctatattagtcaaagctcctcttatctactttggaaaatgaagaattatgtctataaaatatatcaacaacagctgcaggtacttacagaggaaatactgtggatctgagtgatattaggccctgaggatacaagccaaagtataaaaatggtctttgccgtagagagatagtagtcaagctaagcacatattttggcatgggtctctaatagcctaatgctagtagggtgggaagccatttaaaaatggcccctccttctgtcctgcctttcagaccagatggtgtgtctaaagtggtcacactgtttggttctggccacttctgtaataaccactgctcctttcccctcctcgtgagattataactcctttgacagtatggatggcacctaacgcatccttgttttcttttactaaatgttccacggagtcacttgcttgcctgtttgttgcttatttgtttgtttttggctaaaactacagaaaatgttaaatacattttcagacctttatattttaaaaaagaaatgttaagaaataaataatttttctaatctcatttagatacactgtcctattacacacaatgacaaatttgatgcttttgtcttgctaattgaagagctaagcatgaatacagtttttcagtctacagcagcaatgacaagggtaaagtggagaaaagagtaaggaaagaaaaaattaaaaagaataaaaggttgaaatatcaaatcggtggttcttaagatgacagaggcaggtgagacaagaatactggaatcacccagggggcatatgaaatctgtacatttcatccacaccttcttttctccccctgtcctcattccccctgttgagacacattgtattacaaattaggaggaaaccatctaaaattatctcacgtatcccagttcccatattagcatcatgagtatcacctgagagtttgttggaactgcagaatctcagaccctgtccagacccattgattgcataagaatctgcattttagcaaaatcctcaggtgattcaaatgcacattaagggaaaagaaacacagtgtaccgtacctgtggcttgtttagaataattatgaagaggtgttttcttggctcttaactaacgtttttaataaagctaatatttattgagtacataaatgtgccaaacacaacgttcagtctttctttaaattttttttatttaatcctcacaacaaccctgtgagatagtttctgttttatccttattttatagattgggataccaagtaataatgagataagtagtttacccaaaagctgtaactgatacagtcgagatgtaaacataagaattctaatttcattgcctgttctcttagctgttacctacagtgtctgctctatactgggctacctactttttaaggccaactaattatttgaaaatttatttaaagttttaatttgagatcaaaatctgtttccctcataaattttttttaaaaaaagcaaacaagatctattccattttgatctaatgttttcctgtcaccttacctttaagtgcaataatgggaaattctagaaattccttctttaactgtttgaaaaaataccaaaactatgacagcctgtccaaatccactaaaatatatttttatatgcatgctttttgtatatcaattatacttcaataaagctttttaaaaaaatagtagatgacatacttttaaaaattaactttggagcccaggtatggtggctcagacctgtaatcccagcactttgggaggatcacttgaggccaggagtttgagaccagctgaggcaacaaactgagacccccatctctacaaaaaataaaaaattgccagagcatggtggcgcacaccatgtagtagttgggacctgtagtcccaactactcaggagactgagttgggaggattgcttgagtctgggaggtgaaggctgcagtgagccatgatcacaccactgcactccagcctgagcaacagagaaagaccctgtctcgaataataataataataataacaacttttgatatctctattttttcccataaaaatccaaaattttctgtttactttttggtgctctcatgctataaagtaaattctcccttggattggacaagttattttctgttttctacatacacatagactgttcagcattccaactcaaattacatattactttttcagcttttaatataaatgcttatttactacaagcatggtttacaaaaatgtagtaaaatatagttactaaccagtcaatgctcaagccagtgactccccaaatgattcagtccctgagctgtttcacccagtgcaggtagattctctgacagccatcagttggatctgtccgaatatctcctgttttgacaggggcttattgatgttggtcaaaagacaggtgtgtatgggttccctgggatcatgtttgaggggaaacctgtgccaacaggactgagcagccactttttcaatggtattgagaaaatttgtaggagataaaatttcaccagctccttgaatctagaactgtagatattcaggtagcactgacattacaacatctaatttgtaagttatgggttagggcaaaatcaatccagggctgccatcatgacaagtagtggaagtttgaaagaaggagaaatacccaaaagatatcttacacatagcaggcagagtttcttagtactaataaaaaataaagtaccagtgatcaccctctatagcccctaagagtcccctggtttcactaagccccaatatttgtggctgtggctgaatgcaatctgcacaaggttttctttttaacagttggaaaaaatctcatagcatagcatttttttctttttaacagttggaaaaattctcgtagcatagcatttttttctagtaaatttcatatacttaacaactttatcagcacatatattttccttcacacttacaatttcatcaacacatatactttactttttgactcaaattcttcttgccatcaattcaaatgctcctgcccttagaatgagaattttccattaacccagctttaataatctaactctcccattcaaatgatgtcacttcatataaaacacattttatcatgatgtctcccagccctcagttacacagttaattgctgccactttatcatgaatgaaaaagatgtgattcttgggtaatgatttcttgagtatgtcctggtctattatctactgagttaccagagtggatttttgagagaacacacagttattcctattccttttaatttccattaacttaagccatatgatagaacattacagttgttatatattttgtataaatataaaatgtaatatataatttatatattttaaaatatttagtggcaagtaaagatagtagtaagtgaaaaaatcactgtataacatatgaatcgtaagtgtgatcccatgtatgtgtatacctggtagatgcttgtcaaggtgccattaaggtcttgggttattggcatcttaatgaaattcatttaattatgttaggattgatttgttagtaaaatcacttacatgttttttaaatgcatgcatatctgtggagccaataagaaaaattaggaacaatatacaacaaatcttaagagcttttgaggatgattttttttctttctttcttttgtatgtacctacaaaattttctataatggatctctattgattttatattttttactttctatttgtcttggaatttctattactttatttataattcactctagattttaggtactagacaactactattaactctctggagaatggtactataaatctgaccctttctgtcatttttttttcctgtggtacactagtgtctcacaaagagtccacagaattcacacggtcatgatattttatagaagaaatcattttatgggaactttcttttgttaatagatccttccaatgctaacattattctgtataacagtgctaaagttggtatgcctaaatgctaaacttggtatgctaaagttggtttaaaaattaacctatatacaatcttcttgaataactcttcaactttaaataaatttcttatttaaaaaatcctcctatatataattaaaaatactgatgaatttgactacataaaaataaatgcttatacagtaaaaagtaccataaacaaagttatcatctaaacaagaaacctgggaaagctatttgccagccattacatgtaaaatttaagtttccttaacataacatgagctctttaatgtgagaaacaataaacaacctaattgaaacatgagcaaaagccatggctgagaaaactcgtagaagaattactatggaaacaataagaaaatgaaaagaagttcaacctcattcataattaacgaaatgcaagtcaaaacaaagatataccttttacttatcagataaagaaaaaatgatttgataaaacccagattcttggtattataaattggtataaccttaacggaggacattttatgaatatctatcaaaaacttagcatatacaaacaatttggttcaacagtctgttagaatttattatatagatacattcatataagtacaaaagtgcatatatgtaaatattattattgggacatttttgtagcagccaaaaggaaaactgaaaaaaaagattaaggctcattaatagcagactggttaaataaactatgtgtgagtacaatgaatgaaatattgtacagccatcaaaatgaatgaggtagatttatatatgctgatgtaggaaatctgctagccatcataagtaaaataaatgaaacaaagaagaaaatactatgatgtacaaaaagaaaaaactatagatatacatatttatatgcatgtgtatgcattttttatgaatatacatatttatatgcatgtgtatacaagtcctagaaggagacataggtaactattagtagtacctctgggaagtaaatgcagagaaaagtaatagagggtaaggatatgtttacttttattttacatccttctgtaacttgacatttatacgacgcgttagcattacttctgggaaaaagaaaaacagaaaaggtaatcttttaaaaaggtattttttaaattatggtacaataaaatgtgcataagctttatactaagtaatagaatcatttaagtttagctgtagattcacaagtaaaaatccaatctattttcatattcttacatttatagacatttcttacatgtctatagaaagaaatggctaggaatgagactgcactattttaccctaaaacgttctttttctctttgcctaatgtatatctacaagggcattggggaagatgttgaccacaggcaggaagatgatgagatcctgtgcccaccacttaatgcagtctagctctatataaggaaaaatatgttcttgatgtgaaccagatggtttcactcccttcaaaaacactcttaagatgcagtgtggaagcttactctgtaaattaaaaaataaaaacctgactatattcagtggaatgcgttaatcatttttttctttttaggtttgatatttgacaaattgatctaaaatggctgggtttttatctgaataactcactgatgccatcccagaaagtcggcaccaggtaaatgccttacatctacagcagtgggtctgtcagcagttttctttaatgtgtcagcagtggggagagcgcaaaaacccacacacaccattatcttgtgaaagaagtagaggaagcagaaaataatgaaatcccagtgttaccacatcccctccaatatacagattaagagcgtttgtatttatatggttttaaacataaataacatcagaattactaagctatttccattcatgtactgataatgaatcatgtgagaaagtcctttggcaaggactccacatggccacaggtgattcctttgagcagtgttcttcctgtatagggcttaagaggaccagaagggaaatgattgtactctcttgtcagctacttcctgggcgatttgggttctttgataccccagtgctcactttcggaagtgttaagaccataaaccttaacagttgaccttctcaccttcagaaaacccaaatgtctcggagtttcattctcacaaacttccaccttcctccaatgatgagatataggaaaaaagacaatgtgaaattggagatggaggtgccctcttagcctctttacaggcatgagtcacatggcagggcattaaactctctcacaacctgttgtggagctcagcagggttagccaggactgttttgtctatctaactcttcttacatgggcctatgtgatatttttcataacaagagtccgggatttacctaactaataagatttccccacgcccctccttacaaaaactcagttcaaagaacaagccctcagcttctcctagtcccctccagggaaaatgaagagtagcttgtcctattctgaatatgttgtgctcccattttatcaaagtagaggatagatacgtaggtgctgggtgggtagataaatattagagggatgcttcttctttgctgtaacagattggcaagtaggaatcattttctggaaggtactccacagtggtggtgttagaaaactatttagaatgcctttaatcttggagataaaaatagtaacactttacagagttctgtcaatggatatctttagggatgttttgttttgggaggttttttttctgattttgtttttttcaggtatagcgaagcttgggaatctggactgtgcagattttctgcaaaaatccagctctggaaagagtgtattaagatgcatatcctaggatgacacaaagacagtatgctttattttacatcttaaaagtattgaacagaaggagttttgtccatgatatcccatcagcccactagcaggaaaagcaggacacttacccagggggttcctgctggaaatgattcttggaatcagccttccttctactctatttgggaagtctttggtttctaacattcacacatttgtagcaaagcttccaaaataactatgatgttttgcttaggaataacaaaacatggaagaaaacattctgtgaaattttaaactttttcaaacctttaagtttcagatgaataagcaaaacatacttaagtctaagaagctattttttgtttgtcaaagaactgatgttataccagttctaatattaattagcaactttgccctggttttcctgtaaaataatctccaaggccctatctcaatctgtgggcagtatactgaaatacaaaaagtgttcacaaaaggaccttctgaactttgcaatctccctttaaaacttttaccaacttaaaactacagaactctgatctcttattgatttaaactagtgatatgtaaacagcacttcagagcttgtttcacaggaccaaaaaatttatgctgaaatctactcatgacaaatgggaaaaccctgattagcacatttaaatgaataaataaagaaccgtattcaatggcttaaaatttatagacctgcatcatccattatggtagccatttactatatgtggctatttacatttaaatataaacgtattaaaattaaactaaaaattcagcccctctgttgcattacccccatctcaagtgctcagtagacacatgtggttagtggacaacacagatttagaacatttctatcataggaagtactactggacagtactgctgtaaacacacttattaataatgcagcagactttcttggccacttggtaagaaagttttctgctcttttaaacttatttgggaagtttttaatacttttgaaattatgatttcctcagtgttagattatctgatatacagctctcacagaccattttttgtttttcctgtttgtttgcatattaaaatatataggattcaatgtttcacgtgcttttctaaagttgcagttcttgatttcttaaaattgtgaaaagaagtacccacagttatattaagaactaaaatatatggctgttggcttggttaccaacattgctgacagctccaagtaagcaaaagtaaaaaagatgtaggatcatttttaaaggccaatattttcttccttactcattaccttctgtaaaattctgtaagattttctttagttttccagtaatgataaacatttcaccattgcatagacataattaattgattttttaagcagttggagagccaaacaaaataaggggtagaatacttcttattttattttttaataaaaatgtacatattagaagcctttatttttatttaaattgtatgtcactgataaggtttggatatttgcccctccaaatctcatgttgaaatgtgatcccctgtgttggaggtggggcctggtgggaggtgtttggatcctgcaggcggatctctcatgaatggcttggtgccctccccatgttaatgaaagagttcttgctctgaaactgtgacacctcccccctctctctcttgctcctgctctcgccatgtgacatgctggttccctatcaccttctgccatgattgtaagcatcctgtggcctcaccagaagcagaagctaacaccatgcttccttgtaagcctgcagaaccaggagtcagttaaagctcttttctttataaattacccagtttcaggtattcctttatagcaacacaagaatagaccaacacagtcacggataacagtagtttttcatttttcatcaatataatgatcctgctgtattcttaaagttcttaatcactatttgtcactaatacgataacattaataaaatttgagtctcagttactttccagtcacttatacctagcagttcaataacatttagttcctggactaatgatcatgtgttatataaggcaaaaaattaaaaacaaatttgtctttgagtcatcaaagcatcaagggtttgaaatagctatataactagctgtgaaaaagggatataaatatccagctgatatttcctttacacatttaatagtatcatttttcaatgaaagcataaataaaataagtttggaaccagtttggaatttttaaatattaatcgcagaatcttactaacagaaaacaaaagcaagataaatgctagtcatttgtgcctgagtttttttttcaataaacagaaatgaagcttgctttaggaaacatgtgtactccaaataacctactattcacacaattctcagtaacattctttctttgcttaaataatacagccagatgtgcttagcacataactctatagaaaataataatttaaattagatttaaatagagatagatagacagacagacagatagacagatatttttgagacaaagtctcactttgtcctctaggctagagtgtagtggcatgatcatagctcactgcagccttaaactcctgggctcaagccatcctcctatctcatcctcccaagtatctaggactacaggcacatgcactatgcccagctaattatttttttaattttttgtagagatgtcgtcttgctacattgcctaggttgctcatgaacccccagcctcaagtgatcctcctgcctcagcctcccaaaatgctaagattacaggcatgaaccactgcacccaaccaatattaatatttttaacaattgaaagagctcaaagaaataggttttaaatttagaggccctgttttgctgacaggaaaggcttttagctggaatcaagagtgctgttgtcttttcccttcaattagtcattccttttaagacttttaagatttaaatgtatgagtcattttttaaatcccagaaagatctagtatatctcataaatgtaataatacagtgcagacctggtggaaaataattatttatctgaaactgggcctcagtgcctttcctgaatctaaacaaatgttcatctcacccagagaactgggacaacaggaacaaggtattgcaagtccaaaatccaatccaaagcagcgttcttcctccccacctctaggcaaggccaaaatacttctgcacacagtatagacaccagaaaaaaacagagccactgtagatgaaaccagtcagggggtaagagctgtcttttgatctagagcttgcacctttgctcctcagtaatactcccaggtcaaaaaggaaaaataagatgggcagttggctgcctcctggtccctccagcctggtcagtgaacagagtgggaagataaaacagctaagtatcttccttaacaatgcaaagcaagaaatccagtctgctttgggaaagtgaaagcaatgcaaattcagattattaatcataagagcatctcatgtgatatacaaaattattgtatagcagtaatgggtcagccgtattttattcaacactgaaccattaatgaatgctagctagtcttcctttcacttacagaatgtttatctatacatgactaaacaaagaaggagcgctggaaatgatcctgtgaaaaatactggctcacaatgtatcagctgagtttggggcaactgaggtagtaggaggcgccccctggacttctgctggaatttagatttaaatagatggatgaattagacaaaacatactctctgaaagagtgagaaatacaatattcaccaattaagtgaaggaaaaatctacactatgaataaaacaataaatgtggatacatttgaaaatttgaatttcaaaccccttaagataatgtgacaaatacaacaggcctaatttaacatcttaaagagatctgtgtgacctattttgcagttttattttcttaggacaatgcttcagtatctttaactttcatatttaatcattttttttcttttttggtttctatggtatcaccatccatcaatccatattggttggagggggggaatatatatatatatatatgtatgtctcccaagagaaagtaattctgcaatcttcctcagcaattcagtctaacaattaagaacccttaagctaaatagaaaaattcatttcacaggcaagttttactcaatatgtataattagttttagttaactttattaatgaaatgtcgcaaatcaattaggtttgcaataatcagatgccgaggacccaagaggaaccattcctctcacaagaggggaaggtgatacacaatttagttgggaagcaaatgtaattagatttgatcaattgagtattcctgtcctgatgtggagtcagtcacatacccaagcctgagaatatatttgaaaagaggtagaaaaaaacccagtatgacttagaaaatgtccttgtggtcctattggccacaactggcagccaaaaagggctttgaagccacaggtagacaggttttgttcagacagggctatgttttagatttctctttcaaatctgaatggttttacgtagggcaatatataaactttcctatttgtcacagattctagcactctttaatgccttatactgggtgtttcacacagttatttaactgcccaaatcccaatggcacttcagtttgcaactatcatgacctagaagttagttattgaacagttatgaggtaacttaaagtttcttccctttgcctctagaataagaatatcaaagaaatgtcatgatgataggaatactactgaaagaggatattaaacactaggtattcctacttagggctacagtttgcagcagattctattgtgtttcagtcaataagtgtttttggacacctacatgccagacactattctcagcattgagcacaaagtcgtgagcaaggtagacaaaaatgcttggcctcataaaacttacattccagtgcataaagatgagaacaatcacgtaaaatttataatatgttggatggcatggaaaatggaaataaagtggaagggaggcttcaggttaaaaagagtgtttagggaaggtcttcttaggaagaaggaggaagctatgtggacatctgggagaagatcgctccaggcagagggtagagcaaatgcaaattccttgaggcagcaatgtgctggcatggtcaaggcacagcgagtatgccagggtcttcagaaaccacagagaagagtggataacaaaagtgaaatcaagtattgaagagtatgaactgacaggaactagagacatatttagaatggatgccagaacaggagaaatgggtgggattttaaaagctaaatgatttaaagacttaaaatgctctgaagtgtagtgaaatgttccccaaactgcagattttcccaggaaaccaggtgcataatttagtcatcgatgactggttctgtggcaatgactctagtaattagacccctgcattttatgtcagttccttctggatactcagctacattatttggtgcttttggtatacttcaaatatgcattgcctatcactgacctgtaatcctgtgtctctgggcctgaaaatataacttttcatgtagtagagaattagggctgtgcaacattgccactagattatttttaatgaaagctttgcccttttagataaatacagcaatgtattcaaacaagtcctagggataccactgagtgcaaaatgtcatgtactagttattccatttaaattattttatcttcaagtctaataagaaaattctaaataaaattatatatttgggattgtgtgtgtatcatccatccacatgtaagtaggaataaaattatttaatggaaaatttcaaataggctaactctaaaaatgtacagataatctggatgagagaaaactatcctcactttgtgttatttttcaatggtagcattttctcataatccccatgcttttttcatgtcctgctattctttaagatttcctaatgaggattagggaataggcatatttaacaatctgtgttcgcaggttgaaaacaagaaaatgaagactaatagtttctctcctgttaatttgattttctacagctcctctcctaccagcttaggcagaggacttagttactatttccaatagatgggagccaaggaaaagacaagcatctgtgatgtcatgtctcccccaaacgggtagctgcctcaccagcctccattagagacatcccccagagtaagaaataagaaataatcatgagtagaatgagaaaaaaatgcagcttcctttatctgagaaaaacaatagtagctcaatgctgtggcctaaagggctttgaaaataatgcaatttctgataaaaataaatgccattattcttgcttattgtcactgttttagtcaaataagattttagcaagcatatttcaaattgttctaaatctaagtaaattggtaattaaatgctatcattagaaagtattttaatatcagaaaaattggaccataagaaagttagtttacccttgtattcatatatacatgtgctttgtgctaaaaattgttatcatttagtgagaacctgtgactatattaattaatttaatttaatcttcatatttctctgaccgttagagagtttgtgacttggataactttcaaacaactagtaccctgatggaaatccagaattttgttaacccagatcacagctgcatacttaaatgctatgcaacagtggcacttacccccaaaccgtatcctatggaaatgcctttttagcaaattaaactgaattgtgttcagagatccacaggtctaagcaacattagggaaggggtaaagtagtcctcagcaaggcccttttcagagcactccaccagtgcccttgtcctcctgggcagagctcctcagctatactccctttcctagtctaccctatcccacaacggaaccatacttctctcatggaagccctggtctcacagaactaaaaaggaggctcctagaaatggggttgtgttgagttgacagagatgtgtggctctttaaactgaaatataatccaaagagaacaagatctagtagaatttcaggtcctaagcctggttaaatttcaggtcctaaggctggttaatagtacaaatacagttatttatttataactagtgcaaatacagttatttatttataactatacaggaatttatttcccagtaccttctatattactaacatcccataaaaccagccatgtaaggaactagaacattttgagaatatgcaatacataaccttaaacaagaagttttcattcctaattaaaaaaaataagctagttcatcacaacttccttcaaatccttctgccactgatttctctcctgaaaagagatattatacggcattttagagaaaacaaacatctctaagtcacaaggagtggaataatcaaagttgcattttaagcaagattatggttttttctttgagttctctgaatttgaatagtttcttaaccttagttttttaactgctctgaaaatggtttctgtccctggtggactcttgtttcaatgcagttattttgtctggtagagtcacagagttaagctgtcattcagatcagaaaaaataaaagagagagatgaattaatctcaatggcacagtctccttattcaaaaaataaaaataaaaataaatctcaagtccaacaatgaatcatctttgagactctcccaagtgatctagttttaagggcaaaaactttggggaaactgttgggggagcaactggtgcccagtactgtttcacacacgtggtttttcttatctattgctcacacacttagacataactggaattattgcctttgtattgttgttgccattttataaaggaagacaaaaaagatcagacaaaataatagtgaacatctattaattggacacttactggtgtcaggcactgtgtcatgcactgtgtcaggcactgtattttcttatttaatccaacaaaaaaaaataggctaaattatcttattggctcaattttctttacagaaactgagcctaaatttcccaaatggctaaccaatgccagggccagcaactcaaatttgggagtaattccgacacctaggttccaaccatttttctcccagaaataacccaccaaattcaccagagtctaagatcttactgttactgtttaattaactgctacaattgcagcattttaaaaaaatataaatgagcactgtgctagtatttaattatagctttatactgatactgggtacaagtataagctaacaccattttgaattatagtagaagagtcaggagctctgagaggaatgttcaggatagaataaagcagatattttaatgtctcatttcagtgaggaaaattgttaattcatatgccaccagccatcggcagaaatgtaacaggaaatgaagaaaaacttaattactttaaatacagtggtctgtagtacaaattattgtgccgtgaattagtttccttctgctgtagaattgatcattttgattatgtagccaagcagtgtaagacattactaaaattattcttgaatcctacctttgagatctatataaaacactaggcaatttgcctgcaaatacatagaaaacaatttttaaaaggattgggatgagttattttcccctctgttaaatattagcctttgaaatgaacccagctgatctgccaaataacacttggaaattgttgtgttttaataaagtgacagactgagagggaagccacactagacgtccttatgcttttagaggccttacagggcaggaacattatgcaataatgccttttaaaagaagtgagcttcctagtattacaccttgcctggcaacaaatgtagccacttactgaaatgcaggcgtaattagaatctatgaaaatctagcatcagaatcccaaacctctatgcaatactcagtaaattacagcttttatgtctgtaatattttcaaccattctacttaaatatgtgaatacatgagtgtggagttctttaggaggcctgctgcatatgctagggaaaggtttcatcatttctaatcaggatggctctgtaaatgggatgcctcatgttcaggtttctggaaggctcagagcctgggcttctactggcagagggtagacccaaatggactactctagtgaaaatctccaggtgaacatggaacgcagtgaaaacctggggtatccaacttgcagtataggccaccagcaagtgtcacctctattataactttaaccaggcaagctcagtctcatgcattagtttataaaattgcaacagagccttctaagactgaaaggacattagtttttaaacctatatattatgacctaattaaatgaaattttattttaaagccctcataaaagtagtaaaattggtgttttaaataaaccaaatgggaattcaaccactttaatttttcttttgttccaataggaaaataaatgctttaaaatttgaagttgaaacatgggttttaaatatattgagataaaaactattttgcataggcattttgaagaaaataaattttgttctcgtgatttgtgattggccattgatttccgtgtttaagattatgaaggtgtgctcagctgtctactagaaataacaggggagactcagtcttgtttcaaatggaagggctcctattcggttttctccttcatttcttaaagtgttgtgatttttttattccctggtgttatgtcttgagattttaaatcttaaaacatgcaattaggtattgaagttgaaagctggaagtctcagccagctagtaatggttttttaaaataggtaatacagacctctagtggttgaacagtttgaaagcctctgcaagaaaaggaaattgcgcagaaagtgcctgcattttaaggggaaaagttagttaaaattattcagatgataaaattcacatatttcataggaaaaaaaaagccagaatgggcttcaagggaaggtggcacacttcccatccttttagatgttcctcaattcctctaaataagcaaaaactctctggccaaagtcacagtaagaagtctggatctgtattatttttctctaaaagatcttgtgaacagagctgctagatctctgtattatatgaaacatatatttttgtacacagttttgcctcactggggctttgcttcctttgtactccagaggctccccatgaaaacaatctgcagccacctcaacttgcctgtgctgttctcaggttctgtccatggggagccacacttcagtgagctcagcgattggatggctttttagtctacatgagagggaaactccatgtgcctctagactagtgcttctcaaactctaatgaacacccaagtcatctggggaatctgcttgaaatgcagattctatctcggtctggggtggggcctgaggctgtcttgttcgtaaactcccagttgatgctaacgctgcccatccagggccacccagagcagcaagccggttctatgacagctctctttattttttagttacatattttgtttttactcatttcttctttgtttgctcttttactttaataacttctgttaaatttttaatatttggatctgtaaaacatttaaagttctctttcacttcactatgtacaagtatctctgggaatctgttattgaagttttgagaagttgatctcacattttaaaaatagattcagtgtcatctctttatcttgaaaagttcatggtagttgtgagcatctctctaaccacttgaagctattgggttagaggtagctacaattaaatatctgattagccatattgggagagtgggtgaaaacaggttttgtgcatgtggtagatgtgtaggaagctaaggacccaaaaaacaaccacatcataaaatcaagcagaaacacacacacaccacacacacacacagaggctcaaagcataagtgtcaacagatcagaagaaaacatgggagaatgtattttttcataccaaattattaaaattccatcatctaaataacttcctatcatagcatgttgtcgacctcatttttcaaatccataattttagaacttatgtcgtggggtagtctaaaagcctcttgcaaacttttaacatctagtttcaaatcaaaaataatatattaacaagctgtagcatagagggagtacataaattatcatcattgccctgcatgaatagtaattcacaggtttggctcacacacaacttagatgaaataattaactatgtacagtacttaacagtataaaagtaattaatctagctgcctcgtaccggtttggcctaaataaacatgcaataaaaaagccataggattttattatttttttactcacgttactactttagtgtgttggaattttaatatgtcagaagaaagatatctttgcattaaaaaatcattttcttttcaaatgttaatgtactgattataactaagtgaattccatatatttataattgtgggcagatgttctcaattaatagttttattcattctacttcacagtttagtgaaaaggattattttaaattaaggtgtaaataagaacaaatgagatttttattactacaaatcacacagaatttgttggtggtgctataatcctgtgtaggtatagctttggcaaaacatttcagataagcttgttttttgccccatgggttctgggacgaggtgagttgtctgtttgtcctataaggttcagaaaggtaaaagggcaaggtcattaattggctagagggcaacaaagaaggtagttatccctgtgtggtcaagaaaaagtggctcaggttatcttgctcgggagagaaaatgttcattcagctccagtccttttggtaaaagcccactctcagtgtatgagtgttcctttgcctaatcatgtagactataacatgttttcccctatatgactccatcgattaatcattgcagtattatccccacttcataaatgggcaaagaggaggatgaagccgagtagttcttccaaaatcaagtagcatgtaagatgtaggagcaaaactcaaatccagagacttctgcttccagccaagatggaataacagggactagatttacctccccacctaaaacaattttaaaaactggacatacatatgaaacaatggttttcaagagagtggacatcagataacaaagggcagtgatccctggaggataggaaacaaatgacctgggattgtcccagcccactgcctggagggagtttgcaggcatgatacagggatggtacacccaggcagaactcgaggtcctctctgagttaaggacacagagctgggagtccagagaggccaaggaggctagagttcagagtaccagagagttgagagctgcacagagaacccagagatctgcaaatggtaccccttgtgcttcagtgcatgtgggcaaataatcacccaaacgtattagagagaacaagccccagaggtcatcaagagctagaaaatagttgctatttccaccagccacagtggaaagtctcataattcatggagcatcaggtagcatactcagtaggttcttgcctcaggaatgggaaaaatttagccctagactaattgctgctctggtaccacctaagaaaccgtaaaagtcagactcaaaagaattaaattatttgcaagtaactcaactgcttttcagaaaacaactggagaaattttgtaggaatacaaaagcatccaatatccaacaaagtaaaattcacaatgtttagcatccattataaaatcaccaggcatgcgaagaagctggaaagtacaacccataaaaagaaaaaaatgaatagaaacagacccagtcagtaatgacacagatgataggattattacactattacattaaatggttattatgactatttcatatgttcaaaatgcttgatggaagtttgaacatattaaatgaagacatgggagatataaaaaagactgaaattgaacttctagagatgaaaactacaatgtctgagatgaaaacttaaactgagacttcagatgctaagactacatttgtttcacatccccacaacattcttccctggacgctgagtttcctcccagcagctgaatacttcatgcttcatcctttcttaatgctgaactctcagaaaaagtccttcattctaagaagaggcgggagggtgccactctgtagcccctttctcatctcactctggtccctgctggcctggaacagattccactcccttcatgcactgatactccactctagactgagcctcttcatgaggtagccatcaagccatccgcagtcatcaacatggcaccttctgagtcagttacaagagtttgcatcatcagaccaccattttccgtctctgttttctgacttaccccaaaactctagttaaaactcatgaaatattatctcttcacatgaaatacaattaatatggaagtcagcatttttgcatctcccaacgcttcacatccaaggagctgtgtatgaaatcatgaactatgttcttccagccaaccaagcaattaaccaaagtatacatgtccatgttgtccttgtacagagtttgaaatatgctcatgagaattaaactatttttcagtaaatctgaaaaatcaacttgcttgtccaggaagttttattagggatagaatcccaaacaatgaatgtgctagccaagtgttactattaatcagaaatactccatattcatccaggattaatcctgtgtaactccctcagtcagtgtagcaatgtgttctcttcctgcactttttttatgtgtgtgtattcccaaatctgcagtgaatgtatttaggaaatacattagtatcaaaaggacaaatgtagccttaaaacataaatgtacagataatttcctatttgtagcaaagttcacttcagaaacacttgataagaactattcaaaaataaatattttcagtatttatttaaaatattttaaaatgtaaactcctcaccagtcatctagccagggccactgagtgtggctctatgaaatagcttcagtccctttcactactgatgaccttttgaacacaagataatatttgtcgagtaaatgtcaaaatagtataagaatacccaaatcatggattctatgctgtattcactcacatagagacttcactttggagcacttcagagcagcaacagctctaagagatgtaacagtatgctttccaggatagaagaacgaaaagggaaaaataagttgctagcaagaacaatgaggggtaggggtgaagttcaggctgccattctgaaagcttcctcagactgagtcaggcacatctcacgaagtgcagactatgcaagctggctgtgtgagatcaagggtagacagttgactcatcctgtcacatctctgtgttttaccgtaacctccaactattcagccatgaatcgctgcatgtggaatggaagggggaatgtctaacaaacagagacatacttcaagtcttcagtctagttaaaacattggaatgagggtctgcaacatctttctggggcttggagtctcgtctcagttctaaaatgagatggttggcctggatcctaagtttcaaattggcagcctttttaactaaatctaatctagaagagttctgttaggttccacagtgttgggttttaaaatatatatatatattagttgaaaacattttaaaataggatctttcacatgaaatttgaaattttaagtttatattttaaagttagctgttttcccccacctcattacaattggcacagttgactatagctgagaagtgaccccgtggcccccctccaagaaagggggagggccctccattcaccaccatgtccacttcacctatttctcccagcctatatatgtatttgaatatgtgaaccctggaatgcataatgtctagggaccataacaacaatagaatgctatgaatctctgacttacaaggactctcttatgaatctctgacttacaaggactctcttatgaatctctgacttacaaggaaaacaaaagactgtagagaatagtagttcaaccacattttaggttaaaatagactttacttggataacctgacaaccaaaacatctttgataatatagtaattgtgtatgtttaccagacaaagggtatacatgtatattcttgtatttctcttaagaagaaaatcaataaatttgacccatgaatttctttctatagcagacatttttgtgacttcctgactcacaggagatacagctaccctccaaacctaaatcaaaagtccgtaagttgcagaatgactttttatgtaaagagaacatactagtttctgataagatataaagaaaccatgtaatttatctagggaatgactctaagctgatcattgacttatttacacaactatagctactggaatagactgattccaaaaatatattttctctgaattagaatctttttcatatcaaaatatccaaaattattagcatattatgttattctcacaaagtcctaatgaacttcacaaatctgcctgctctattctgagtacaaaaaatatttagcctaatttgtttttccattattttatatagtaataaagtaataccaaaaatgttattgccagaaacaatacagtgttgtataattattagaaagtgaactcatgaaattctattaaaaaacaacaattaccacatgttaagtcagataattcacagaagagacttatatgaatactaggggagctgtaggcaacaaaatttttctctgaatcctgcattttgaaggaagtttctgtcatttaattagttgaggtttgattcaccaaccaaaggtctatagtgtgatatattttcttcctccaacataaagttaacttaaagtcatttgtactttatgtgtttattctttcacttcttccccaaaagtaattctttaaattgctttatgggattaataacaaattatatcattatatatttttgtattattagggcttctaacttcattataatcaatttattggccatatataataatgcaacaaattacatctgtaaagtaaaattttatgacgcaatttacttagtatatgtataagtctcattctgctgcccaggctggagtgcagtggcgcgatcttggctcactgcaaccttcgcctcctcctgggttcaagcgattctcctgcctcagactcccaagtagctgggattacaggcatccgccaccatgcccagctaatttttgtatttttattagagacggggtttcaccatgttggccaggctggtctcaaactcttgacctcaaatgatccacccgcctcagcctcccaaagtgctgggattacatgcatgagccaccacacccggccggagacaggttctccctgacctgtgagactgcaaaggtggtgtttcctatgagtccagccagataatagactctgctaacattaattaaattaatattcctttttaagattctaggtgctgaatatatatctcttggtctataaattagcttcgcacttcagctatttagcaaacttgttttttattgtatctagtgtattcatactgaatgggtataatatactgtcttttgaaaaagttattttgtacacataatcttaaaacactcttccaagggcaaggtagaggcttcataatattatttccatttgtcagatcaatgaaggtttaatgatttgtccaagatctcaatttctagagaagcgaagaagaatcccccaattctagttctaagtttcttttttcccttgctaaatcctgcagtctactgatttttttttttttagacggagtctcgctctgttgcccaggctggagtgcaatggcatgatctcagctcactgcaacttccacctcctgggttcaagtgattctcctacatcagcctcccgagtagatgggattacaggtgcatgccaccatgcctggctaatttttgtatttttagtagagacggggtttcaccatgctggccaggctggtctcgagctcctgaccttgtgatccgcccaccttggcctcccaaagtgctgggattacaggcgtgagccaacatgcctggcctgcagtcaactgatttatgttcatcaccttcttaagttaaattgctcttttactcattgcctttggttttgtgtgttaagattcagcatcagcattcatgatatcttttcactcttaattctgagtgtttccgtccgtttttttaatttttgtactttatgggctttttcttcatttacccccaattatgcgggaaaggctgtgtgcctcttttgaaagctctgatgttctcaatgaagagaccttttaaatgaccttgtttgtcccccaccgagttgcatatcacaacttcaaatgtctcactaaaatgttacccatttggcatcagtatacagaaaaggctgcactctgagataagaaagaacagtggtgttttcatagtaagagaatagagttcttaatgggaaaggggagagtataatttccactgatttagctggtctttcaaactttatgatgcttttctccttgaactagcctataagaaatttgtagggaaaataccacaggaatcaaattttgggcatagatgtctattaatattgctccttacaaagctttttcccagaattgtttctccttgcctacaaaaactactccatgcctttattagtcagaaaagcagttttgtagagaaggcaagtaacagagaatcaagctaagtaagtgaaactctgtaattgtcaaacttccagaaagtaacatttgtaactaagtatggtatctttgtcctctctctttctctcttctctccacttggtttctaatgaaagccttgattacatgttatatttaatgtactgttccacaaagaagaaaaggcctaatgtgaatgcaagctgaatttacacttaaatattgcagtcagttcagaccggaaggatacagatcgatgccctctgatcctgtcagattccccgaagtgtctatggcagtgataccacaagagggcagggtttgacttccggactaggtggcttcctcccttcagtgcagaccttggggccacgacaacagccatcaatctcttgaaaccctaatgatgaatctgagctcaaattccctcttcagccttatctgtgcagaatcctgaagttatgaaaaatgcttacagaaggtaatttctagaatgatctaacacagcagatatttagtaaactccctgtttgagagctcctactaagcacccaacacagctttagactttggtcacccaataggattttatcttttgtgagggatctgtagttttccccggaagatataatgcatgaaataaaagcctccaataaaattcagtatacagttaatttatttcataaaaggtgagagatataaattatcaaaggttaaaacaaaaagtaggaaccagagcagggtttttcagtagcaactctattgacattttggattagataattttttggtgtgggagactgtcccacgcattgtaaaatggttagcagtatcacttgtctgcctgctagatgctagtaataccccccacacctccctctcccacattgggaaaatcaaaaatgtctcgagacattgccaaatatccctggagtacaaaatcagtctaattgagaggcactagactggagtataaagagatgaccatgccaaaaagtaaaaataataataatagagccttgaaacattacttacagaatgtcaaaaacgtaaggacctgctctctattcctgtttcttaacctgagcaatgggaataatgatgccttccctcataggtctcttgtagaaatgaaagcaattaatgcaacacttggcacatagtaagcatccaatgaataataagtgatcagtgttactattgctaatattaagccactattataagtcctttctgttaatcagcagaaacaaaaagaagtataaaataatggtacattaaatgaacttaaacacttgtatgtcattttgtgctaaagttatgaagctgaaaagattgaattgacattttccccattgatagaaatcatctcaaaaatgctccatcttccttgtgaaagccaaaggccagcagtttccacatacccagcatctgataagtagttaatgatccagaaataaactgttaggtgcttcagggaatttctgtgtatagagaagttccatgtaaatatttctccgagaggtggatggagaatgataattcacttttaccctctgaatttgatttataagcttcacctatctggcaggagataagaaccaaagttaactgaggagaaaaaaaataaatgatttcaagtgaccatgatcttcagctggaaccagttgaaactgcaaagcaactgggctgaagaagttcagccaaaattatttgtttataaaaactagagagtgttagatatttctatcacattggcttatttgaaatttctgctggctcaaatgaaattgtattcttctatttcctactgcggggttccttccctaaccacaattgcttttggattggagacttgtaactttgagaacaagagcctcagcttagctagctggaagaaccagaggagagttttaatatctcctgaagaaagaaaagcactaacacggttattatagttcaggacaagtggagtcaaagttgacagtttctgacttgaacagttttgttgctggtaataaaagcagaagtcacgtgctgaacgtgaaggtgagcagaggagaacttgcgatggcaaagttaaaaacaagaggagatgatggtcttggtgtggcacaggatgttaaaaaaattctcctgtccttaaggagttactgctatttgagtaatgtgccacttccctacatagccttctatgcagaaatgctatatttccacttcacaacccagaacgtgcattttattttacatttagaggaggaacaaacaaccagaaggcaaaaactggtgcattattttttgcaattctcttggaaagagttcgtttttaacttctgctcagacagcacacaactactgggaatatattttaatttcaaatctgatgtgtgacatctggtaactcatttattgctaatgaagttttcacaggaagcagcagtcaccagtagctcatcttatttttcagttggcaaagtgttgtttaccttttattggcctggcatcggtgtctcttatcacaggatatttaattagaaaacgcaagtagcctaacatagaaaagaaatggagtggtagataatagtagatagaatggtctaaatatttttattacagtgatgtaatatcactgtaatttatgtttaaaaattatgtaatactcaaaaggaattctcagagctggcgaaacagtctggtccaagcagcctctcagcagtgcctttcagcctcccctctctgagtctttccaccccttgctggtactttagtttcttccacttctagcaccacgtgtagtttcccaatttctcttacccaaatttgctcgcagggaaaaaaataaattaaattagccatttacaccacagtgtgaacttaataacaccaacaaaagttccaaagctctagggtctcatagcacctccagatccatgatctcattcggtgtttccaacaatgttttgcaccaaactggacacatgcttgctacttcatcatcctcatcgtgaacattattattattatcatcattttccagatgaagaaaatgaatcacaagtcaactgacagtccaaaggctccacagctcagaggaggtaaatcatgtgcttaattcagaacttttggctcccatcactatgctcttcccactgtcttaactctggttgtcacctgagccattgtgtttcttctcaggtagatcttagttcttcctgagaaggtatgaaggtgggtattccaccctacctgaattataggaatttcagatatctgtgagcagctgcaaaggggattttactagatgacatcctgctgggcacactttacgccagtcctgaatgtgtaatagaaatctgcagtttaatgagtaagtttctcatattcagtttttgatgcttcataaatgttaaatgaaaacattttagctgagggtacttttgttgtttgttggattggttttgcctgttcatc

SEQ ID NO: 331 - DNA, 4648 bp, Homo sapiens
  source 1..4648: mol_type = other DNA
aaacgcgcacgcgcaaatctagggcgacgcttgacagagcttgggagggtgcgcctgctttcgccctccttctccagcgggaggggcgcgcacttccgcggggcggagtccgtctagtgctgacgttggcagccgaacccaaagtagatcgaggcggcgggctgcacattcccgttgttgcgttgcgtttccttcctctttcactccgcgctcacggcggcggccaaagcggcggcgacggcggcgcgagaacgacccggcggccagttctcttcctcctgcgcacctgccccgctcggtcagtcagtcggcggccggcgcccggcttgtgctcagacctcgcgcttgcggcgcccaggcccagcggccgtagctagcgtctggcctgagaacctcggcgctccggcggcgcgggcaccacgagccgagcctcgcagcggctccagaggaggcaggcgagtgagcgagtccgaggggtggccggggcaggtggtggcgccgcgaagatggtcgccaagcaaaggatccgtatggccaacgagaagcacagcaagaacatcacccagcgcggcaacgtcgccaagacctcggtaaggaaagagcgggcgcccctctgcgttccgcagccggagctgagtccgggtccctggggccgcgtcgcgttttctcccggatccggccgaccgtgggctggtgccgtggaggggtaggggcccgagtctgcgaaccgccagactgtgggggctcgggaacggaaggggagacctgtgaggtgagggggccggcgaccggcgtgcaggcgtgggagcctggggtccgagtggtttctctgcatctgaaatggtggattttcgcttttgcagagaaatgcccccgaagagaaggcgtctgtaggaccctggttattggctctcttcatttttgttgtctgtggttctggtaagtggcttgggggctcccatcaggtagagtcttgggttgaaaggatttgggatgacgtggtgaccggtcagtagtgagtcctacctgcgtagttctcaacccacctgccgaggactccacataattctgtttcgtctgaaccaaattacttgttccacatatgcacagagggtggtgctccagaaacttctcccagcttaatttgtactcacaggagatcaaaaaggaggtcaggtcttggtaatgatccagttggaataaatgttaagaccggacaaaacctaacgaaatgagaatttagaatgttttgtaactccattatcagtctttgcaaagaaaattataaatatgtactatagatgttagaacttgatttaacatataccagaatctaatgtcttaatgtcaaaattgagtatattttataaaataaagcttgtgcaaagaattgattcactatagaggaaattacctgattggcattttaatgtgtgagtcaaatgtttttaggttaataaaagaaacgtttgatacatggtttaaaaaaaaagtgtcggggtagcctgctgtcccctaagagtaacagacacttgcctttgcaaatagattacaaaaaaaaggtctttcctctcttcatttatcattttaatatgcaagctgttaatattgaagtagatgtttgttttccacattctaaaattactgagatttctgtttaacgtttcactttgcctttcttcttcacttaccaattggaagctttcctgataaatggatgagagccaagcagtttatataacctgaagatgattgaatttcagctttgtgagaatgaggaaacatgcatgtgttacaggccaggccttaaaaggatgcttataaaccaaaataattctatgctggaaaaacctgttggctttggtgctttaagttctttgtaaaatgattacttatctgcaagttctcttggatacttagacataaagttcagcgaagctaagataaaaaaataactcagggatatttcattgttttatttattcagacaggcctgtcttcacttcttattatactgaagttatgtaccatttgcaaatgtaagagtacctttggattcttcagctaccttaataaatatttgttagacaccagacctattttattcaaagcttattttaatatttgctctttctttttacagcaattttccagattattcaaagtatcaggatgggcatgtgaagtgactgaccttaagatgtttccattctcctgtgaattttaacttgaactcattcctgatgtttgataccctggttgaaaacaattcagtaaagcatcctgcctcagaatgactttcctatcatgcttcatgtgtcattccaaggtttcttcatgagtcattccaagttttctagtccataccacagtgccttgcaaaaaacaccacatgaataaagcaataaaatttgattgttaagatacagtagtggaccctacttattcagtcaattaagagtaagtttttttatgtggttattaaaacagtatgaacaattagtctaactctgcatagacagggtctagattttgttaacccaaatgtataactgcagttagcttaaattacaatttgaagtcttgtggtttttatatagctaggcactttattactcttttgaactgaaagcacactcccttataggttcatgtaactgtcctgtaataaggtgcttataaatggaacaactacacagcctagttttgccacaacctttagcatctaaaaagttttaaaagcttctaaatgtctaatataaagggagatgcttatagccacaacatctattttaccaatattgtttccattacactaccttggattttgcatgagtgagtatagtaacccaagatgccataaaaaaaaaacttgatcgttttctgacttaatcagttactgtggtttcactaaaagctaccgtggtggagtgaagtcagtcagggaaggtttgtttatgttacatttatttcaccagaactattttaatatatcaaaggggtttactatgccaaacaaaattctagggaaaaatactgctaaaaatggatgcctcatcagaacatgctgttgagtccaatgtgccataagacattttagcatgttaaatagcacttttaatagcaaaaaaaggcacatcaactgcgaagttatccttagtttgcaaatgctttttctagattaatgatttttcaatcattagggtactagacacatcagcctaaagtggcatctggaattgaatggatttactgataatgatcagtctttagtcttccctttgttatatgactttataggttatgattgatcaaatttacgttttactaatggtaagggtgagggtcatagggcaggttttgggttttctagtactgttgaaaactgcaagtattggctatttgtatacttagccataacttggtgaaaaaaaacctgagcagtgtctatgtattaatgcgttggaaagaaagctgcttgtgtttgctttgttaattgcctcaggatatttcttttaaaataagctgttttaagaggaacagaagggaaatctgctacctagtctatacacagcgtgaacctcacagggggcttctgataccctcaaacatggagaacagtaagggagcagagtggttaaggactttcaggaacttaactattctggaataaggaatgaatcaactgaccttgggccagcaggtttttaactaaattgttacttgcctttctcacccagttaatcagtctctgtacttgtttccctttttgaaacaagtgtcttggttaactaattctgttttatggttgtgctaaattcatagcaggtgccttattctttgcttttagtcaaaccattccatatcagaattttccttggtttactatagatatttggctttaagttgttgtttgtgttttttaatgtacaatgttctgataaatttgactgttaaattgctatagctagcaatcattttacatatgtaaaattgcattccctttgtatttcatgtgtaattcaccaattaagtgcagtttatattcaggttggattatgcatgtttaggtaaacgaaagctgtgtcttacttgatttattctttaaaaataaagttccctgaatatttgatgcttttcttctaaacggaaatgattttacagttatctgagtgtaccttttatagttagtagaaaatgattttaaagaatgtttagtattgtacttaaatggtatgcagaggcacagatgtaaggtttataactggaaataggtggtaagaaaaatatatagaaagcacaatgatttgaatatttttccacttaggatttcctaatctccttgtcatccaattcaagctcaagatgaagcacaattctttgatctccctttgccagttgaattttatagatcatctaatgttgagcacagtatgagaataaatattggggttgtcaacattactcagttactctttgtggtttaactctaacatttcaacaagttgtcaattaattgtatctgttgggttgtatataatgttgctcaaaataattaagtggacttccaaaaataagatttccattgtaacaggatgcattgtgatgggctttgacttacattaaagaaatgtggatagtcaactgc

SEQ ID NO: 332 - DNA, 32742 bp, Homo sapiens
  source 1..32742: mol_type = other DNA
agagataatctgtgaaagccacagagcctgatttctgctgtgataatcttcagcagaccgaggctggggcgagaatgaggcagacctgtttacatggtgtgtgcagtgccttgtggaattcttaactctattttattgtattatttttaatcgaaaagtagatcagatgatagcatgaagtgaatcggctgctttggactaatgggatcttcttttctgcattaagatcaagaacttttctggaatcctctgttctccgagtagccttgtcttctctgtgtgttttatcaatttgaagaacactggcaaaaatcagcaaacttcatctcccaaaaagctctcgctcttttttgccaatacttgaagatttctgctccaaaatctactttgagctgcttgagcatggtggttgataaccgaagggcaaaagcatcacttatttagtgtgtgttatagaaattttttagacaaccttactagctaacccaggtgaccctttacggatttctttcaaagccaatttgaataaacaactcttccctctcaaatgggcaagagtaactcttcagcaccatggagaggtccgggcagcgtgttacaacgtgggactgtgaccagggcaagcactctgacagtgtaagttttacaaatgtctaccatctattttaggtgtatcatatttttacaaatgaagagagaaaacttcaaagtcgaactaagtaactttaaatttaagctgatggccttcattacatttttaaattcagaattaagcatttaaggtatattggaatgttcatttgaaaaaaatactttctcattgcatagttagtatgtggatatttggtgctttgaattttgagaatctaagtttgagtgttcttttttgtagtgcaccaaaactaattgcattgcagtggactttggaaatagcattttaatatacacatgtaaatagttccaaatgtacaatctgttgccctttgtatgcacaagactctctttggaaagtagttcctgatttgtacagtttgggaagatcagtgttaaactttttcaatttagattatactttcagttaccaaaagaacaaatgtctaggtattctaatgtcaatacatgggagatatttgatgacttaaaaaatctcaaatttattggtatgaaatgtatagagtggcagcttattataagtagaaataacagacaattttataaaattatatatgggctattgaaatagtacttttagcattattgaaaataattagtttcaaaatgttcaatttaaatcttcaaaccagaaataaaaaaaatggtttcttcaaaaacatcttttaactccatcttttagactatcaaatttgtagttctatgatattattatatgacacaaccaacgaagaaataatactttgaattactacccagaatgaccccaacagatattttgattagctattcaaatttttttctaagagaacatattgtcattaaaaagtaactttaacaaatcatgattcttttctcaggccaattaaacttagtttggaacatttatttatgcagaatcatttattttaaagcctaataaaatatatttttatataattgtattataaaatttatttcctttagtagttttcttcatatttaaaaaccagtagtaaatgcaatttactcagcttgacctccaattcaaatataatggattctttctgttatggataatttccaagtgaattactgttgcttcttaactcttcagtaatttggcatttgattttgggataaatggtacttacattttgacagtgtatgaagtgcataattttagaggatgtaacaattttatataaaggagaccttagtatacatttttgtcatctttgctcaatagatccactgataatttccataattgatgtcagtatttaaaaggcctcagtttttgaaaagaatgaaaggtagatttatgatttcagtttttttaagtttcatttcccaaaattttattattctgctttggtttaataggtaagtaggacttttcacacaccattgcatgtacctctgtgattttaaacttaaattgttcccttatggcaaactgtatccatttgcagcccctgatgaactttgaacaaatcattctggtttattaaattgtacattctaatccagaagaatccaagactcatgtcataaaacgcatctgcttgctgtgaaatggtgtcagattttattctgattcagaaatttatttgatctttgtctctgtctctctgaaggatgtgactcatttgtgatattgtcagaagtgtaacttttatatttgctgctttttttccaaacattttagtgatatatttataactattatccagcacacacatttttctgtagttgagatattgttgtctatgtatttatttaagcagaaattgttgctgtatgacaaactacaagcacatgtttgcttctgttttgatagcctttcaatcattattgaaacagtcacctgaacagtagaaaaatgttcagagctaaactgttagatattcacatttctttttctttctttcttttcttttttaaataacattctggtggtagcagatgtatgtgaacaatcttaaatttagttgagtgacattttgcttttcttgccaatgtaaaaatatgctcccagatctctttactgtggtccacccacccttgcaagggatttataacctttggctacaaagaatgtaggggcatatttatttatgaaagccaccctagttaggatgctttgcagggtggctgaatatagaggcagctaattggcgggtgtggtttttactgctgattttaacccttttggcactaagaaagattagttcatcttggaaatagttcttacatccaaggtattcagtctcatctctgttgcatcagtctccatcacatattcctgtagaagcaactcccctagctacagtcccaacaggagaagttccagtagggaagagcctgaaactgaaatgtgttgcaagaaggtcctaaatggtagcttcttagagggacatagggatccttggggttatttcagtgagcaggatgctgattgattccaaatgggttctaggcttgtttagtatgtctctaacactacaaggggcacagtggacattagaggctcaagagaggtaccctagcatcccagagaatcactatagattgatgattcatcataaaactttctatcaagtgatttttgtcctcagttactacattttactgttattcctttctctgtcccaattttatttgcaaggtacattcctactttgtattacatgatggacctaactaggtatgacctgactgatttgagatttacattaaatattactagaaatgatggagtaatcttaccttttccagagaatagaaaagagcttagggacttttcatgcaagatatacacattgctgaaagtccaggaatattatccaaatagaaatgtctggatatgatgcttttctcactttgactaatttttcaaattccagtccctctaaatggattttactctcccccataagtaaacttaagttgcagcatgtaaagaacaagtacacatccaggcagccagtcctagggacgaagtcagcccacttccatcttgcctaatttgtcctgtaattctgactctcatcttggatttttcacaccatctcatctacacttttggagttgactcactacatcacacagtgcctgattccattaataagacccatcttgatgcaatacacattttgaatccaacattctggattgacctcagtagcatgcttctctggaatgctgttttagtgctcgatctctgactcctgtgcaccacaatggcaggaaaaaaaaaccccacttctccaccggtttcattttgtgtgctttgaaactgatggaactgtactgtgtagaatacaatgttggtatagaaagcatgtacattgattacccatgatatagtaaatatctatttttaaaagcagtcaaagacagactcagcctaatgatgtgacagtagatataaaagaatataaagcttcagtgccttagtgcaattcatacaaatttgcttatgtttcatttttgttaagattcctggaaatataaatacaagcattgtatctggactttagtatggcttggaagaattttttctgatgtcttggtggagaagataaagacctgtgaatggaataataatttggagctagaaaccaatttactgacccctgggcaagggaatttctatcagaatatgtgactagtaagggacctcaacactgagcaatcagtggaagatttatggagaaattaaaaaataatatttacaggctggtgcagtggctcacgactgtaaccccagcactttgggaggctgaggtgggtggatcacctgaggtcaggagttcgagaccagcctgggcaaagtgatgaaaccctgtctactaaaaatacaaaaattagtggggcatggtggcaggtgcctgtaatcccagctacagactgaagcaggcgaatcacttgaacccactgggtggaggttgcaatgagtcgagatcataccattgcactccagcctggacaacgagcaaaactccgtctcaaaagaaaaaaaaaaaaggatggagctatttttcaacggtataggaataaagcattgagcttctcatcaccagaaagatgagtcacactggatgacccacataaaagatgctatagaaggggactccctaatggtgtgtgtgcatgtgtagcagaagggctatgtgatctctaaggtcttttccaacttagacatggataagggtcatcagtgcagtgtcatctcatttaaaaaagaaagcaataatttcttcattcaacaaatatgtactgggtacatactcttgtgattacaagaactgagatgattaatcctccctgagctccttgagaaaccacccacttgaaaaggagtaaggggaaaactgggaaataaaaccccaggtaggttttattttaaacctcaggagttgggaaaaacccaggagggagagtaagatgcatcacttggatctatttgagaagggaaaactaggttaaaggagaaaaaagcagaactggagttataatttatcttttcattatctctagcatagagatactacaatgcataaaaaagaaatgaaaaatttagaattcattgatcactaatcaattctatgattctatttaggactgtcaaatctctaatgagcttttttgctctttcgcctgtatcctttcaatctgtatagctatagctgcatcatatacctttaaagattctgttccaattgtcatctattcttttataaattgggagaaatcctgaagctgtagaccatcaattcaaggggtcaatatcaagtcagcatagatactggccctgctctgaatttgaatctttgcttgattaatttatcatacatggtgaatctaggctatgctgtaacgaagggatccccaaaagtataatagctcacaaacagcagtttttttcctgtttaggcatcagtactgaaaggggaagcaatacagtggggtgacccttcttcatatagtcattcagagaacccaggatggtgggagctatgccatcttcaacacatggctctcaagaccaccttacagttgtctcccttctagcaaaatagaaaggaaaaagggcacatgtgggaggttctagtgggcccattctgaaagaggcacacatcactcaactcacattcttttgactgaacccagtcacatgctgatatggtttggctgtgtccccacccaaatctcaccttgaattgtagctcccataatccccatgtgtcatgagaggacccaatggagggtaattgaatcatgggagcaggtttttcctgtgctgttctcatgatagtgagcaagtctcatgagatctgatggttttataaagggcagttcccctgcacacacgctcttgcctgctgccatgtaaggtgtgcctttgctcctccttcaccttctgccatgattgtgaggcctccccagccatgtgaaactgtgagttcatgaaacctctttttctttataaattacccagtctcggatatttcttcatagcagtatgaaaatggactaatacacatgccatacctaactgcaagggaggctgagaaatatcctacaggttacatagaaataagaaaataaaatagattttagagcacttagtactttctgccatacctggacttctgttctactgtgggaagacttcttcctccaaacccacagttcctgttgctgtaaacctggtatagcctgctagatctgcttgatgttaattttactgcagccttgaccattgctaatttcagtcttcaggttgcaaactatagaacttgaccctaggtaatttaagctgaaaaataatttattagaaacacaacagataactcactaaattgacaggaaggctagagaatcaggctcagaaaaagggaactaaaggaagttggttggccagaaacccatggaaaggcacacacaagaggcaacattattggaatgctgttggcctcagtacattggatgcaatggttacacagttcaaaaatacccctcacttttctgagacacttcttccagatccaaagtcctgaactgggccatgccattgactggtttagatcatgcattcaggcctgattgctagaattcagggaagggaatttcttctataatggggggtagagtcctggtgcttactgtaatatgcatagcagtgtattctgtaattatgagagggtctcagataaactaaaaaagaaaagccaaactccagtgtccctgatgttgtaaaatgcccctgatgtcacattagatcttctgatgaccatggtgattcttgttgactccagttggccacatgcctagactatgctttattgctatgcctagactatgccttgttgcccctcctggaatgtgtgtttccaccactttcactggtttattatactagcctgcctagtaatctctatgaatctttctctggccctttttgatgctagctgagcttttcaggtcctttcctagaacacttggccttgtttggagaatttaatctagacctgggacctatgtgataagttgcagggccatcgctcagacatttgactcatctcctggagggttttctcatctgtaaaatgaataagtcggctcaattcccgttagtctcaaagggacacgaaagcttaacaagatcgtgcttcgagatatttggaacacagggtggcattatcacattattattttcacaagctgttaacctgaagggggaaaataaagagtggaaatttaatgccagagaggttttggcactttgtcaattcaacattagctttgagggcttttggaattttgcctgaaattttcaacaccaagtggctaaaagctgtgtttttctgggcttgtgatattcctgtccccagggatggcattaagcacttgcgaaggatgaactgtgccaggcctatcttccagtgtcccacaaacagacaaaaaagcaatgcacactctaaattgctgtgcaaacccacattttctacttggaacagcacctctgacttgtgccagtagaaaagggatgatgggaagggagtaatccacgattgcatgtgttaaatacattccctatgtgacatgtggggcaatcgtggctgtggaggcttctgtttgggtgcttggatggaccctactgaagatcacaggacctttataggtctttcacaatctcccacatcagtcttttttgaaagagagctattgcttatgcaaaagtcgcccttgccaactaaaccaaagactgggctaattagaagctaggaaaaagaaatacatcctcttggaacttcattttgggattttggaaggaagagaaaggcaggaagacctgctagaatctggggaaacatttattcattccctgtaattaatgtttaagctatgtgatcataattacaccgaaatattctaagtggtttactttatttggacaagaattattttcaaatacataggattccacatatgcgcctaaaacacatatgcacatatatttaaaaaataatatgctttatatattaaaagatgataaattttcagtgtcaagagctaaaaagtatagttttgaatgaatgtgcttacacttcttaatgtatgtacattttgtattttcatgaagacctacaaatctgtgctgtgtcagtggaagaagggagctatttacattttagagcaaagtacagtgatcactaatttatcaaaaactgacaggaaatgaggcttctgtataaatgaaatctatcaataatggacggttacttttttttcagtcaacacattttgaatggcattgtttctaaactacattgtaatattctctgtctcattttatagcaatgcctattcatttatcgttgtaatgtgtatattcattttagaaaatatgaaatgttaaaaaatatatctcaccattaatccaacaaagacccctattgttaacatttcagtgaatttccttggagattccgaaatgtgtatacactaggtattagtatgaatatatataaatatagctcttaaacatattttcaacatttttcactgtgcttttaaaaacttaatattttaatttctgtgtcattaaaatttcttaaagttttatggtacagtgtgaatgagtaatatgaaatcacatagacatataatttattgaactatgccactatagttatcaatgtcaacattgagtgttcatatattttcatatttttgtttccttacaagagattactgtaagtataataaaaatttatataacatttttaaggatattgatatatattgttacatccctagaactgttgtgctagttctgttaatttaatagattgaaagtggcctgtgtttaaaacctgaatttcttttttagttgttgaggcttaacattttcacattttgtggccatgttgacttattctgtgaattgtctattgtttcactgagattttatgtgttaaatattacgtatatattattaagcttttgcattcgtatatgtgagatatattttcctagattgcatatttcaatctttagaattttaaatttttttttggaaataaaacctacttagtatcccattcacctatatatttttgtgttttttgaaaactggtttcaactttatcatttgtcttaagttcattgaaattttggtgtatggcataatgagaaataatagtcttattttattccaagtagttaaccctttacctgagcaccatttactgagtcctttgttctctactagtttgtagtagttcgtagcagagaacaaaggactcagtaaatggtgctcaggaatctttaccatatgttaaaaataaatccattagaatctgtttctgaactaccttcatgaatagacatggtttcacatgtctattctagtacctatattttactgtcttaaatattacatttatatgatgaattttaatatctagcagggaattctccacttcatatattttcatgttcttggatggtcagactcattccagataaactctacaattgtatagttaagaaattatttagagactttaatagcaattgcatcaaatctgtaaactaatataagaactgatacctttgcaaatttgttcttaccatctaggaacgctgtgtagataaataaatattgataaggacctaaatatgcataagaacacgaatagatatagatatcaggaaagatttgaaatttcatatgttttatattttttattttttttgagacggagtctcactctgtcgctcaggctggaatgcagtggtatgatctcagctcactgcaacctccgcctcctgggttcaagtgattctcctgcctcagcttcccgagtagctgggattacaggcccatgccaccatgcccggctaatttttgtattctcagtagagacgaggtttcaccatgttggccaggctggtctcgaactcctgacctcaggtgatccgccgcccgccttggcctcccaaactgctgggattacaggcgtgaaccatcatgcccggcatattttttactttacttactatgattgttcctatgtacatggattatggattatttcctttttttttttttgagacggagtttcgctcttgttgctcaggctggagtgcaatggcgcgcgatcttggcgtgagccaccgcgcctggctatttccttccttttgttccacctctaattggttattactataatataggaagcgatggctttttgttgtattgatttgtatcttttcaatttattaaaatctcttaatagtacttcagaatttttttagtggattctttcgaggttgttaaccatgtaattttctcaactgcaaataatactaaattgcctcttcctttccaaaagtcttattgtattgattagaaaattcaacctaagcaaaataggttgtcttattatccatagttgatgcgatgagttatggtctgttcttgcattgtggtattgctgtttggttttaacgggtagttctttatatgttgctttttatttctattttatggtatgttgtttaagtttttacatctctgcttaaaaacgaaattcacctgtagtttgtatttctttcaagtttgaatcagggctgtgcaagcttcgtaaaatgaaaagcttcctagattttcctttggtctctaatttcatatagcatggtaattacatgttccttgaaagtttgaaaaaaattcttgataaaaccgtacagccacaatgtcttttcttataaatactttaaaataacattttcatttcttccatggttattagatattcaggttttctacaatatcataagtaaattctgctacttactttccaagatatataagtgaatatcttgagattaactatcatattattttgtttaaaatttctctctgcatactcctttattacttttaatatttataattttgttaattgaaattttataagaatcagctattgtgttaatcaattctgtattttctaattaatacactttgatattttaatgtaatatttagtttgcctgttaactttaggtgttttgttttgtttttttgagatggagtctcactctgttactcagaatggagtgcagtggtgtaatctcagctcagggcaacctctgcttcccgggttaaaacgattctcctgcctcagccttctgagtagctgggattacaggtgtacgccaccacactcggctaatttttgtatttttttttctttagtagagattgggtttcatcatgttggccaggctagtctcgaacttgtgacctcagatgatctgcttgcctcggcctcccaaagtgttgggattacaggcttgagccaccacgcctggccaactttaggtgtatttttgttgttccatttattttttcttcagtttaatgcatagttaatttatttgttttgatgaattaatattttaacaacaaagttaaggttttgaatttgttctaattcagttgtgttctcgatctaataagcagtatcctcattttctttatattgtaaagattttgtaattacatattttttcctataactcaactattatagaaacatttaaaatttttgtttaatgacaattctaaaaatgttaaatattaagacaataatttcttattttgttaaattgaagccatcaaagatggcctttacaatttttactttggggtatttgtgtagggatcgttttttagtttcatatagaaatataatcctacattctactgatacttgaaaagagtttctgatctttctttttaaggtacaaagagttcttatgttaactaattaatcaaatattcacattcttgattcctactttattttttgtttccgtgatagataacagggattccctgatagataacaaatagatagatatctatttgctaatagataacagataactgatagataagttacaaaacttattctcaacatttctgagttattttattttaactgatcatttcataagcagtatgtagctgaattttgttttaaacataaacacaagttgttttcactaatcaagagctcattttaataacataagaacaagctattattaagtttgatcttcttttgccttgtttttgttttgtgtttctcatatttcattgctttttttgtttctcatatcaattatattttattttatttattgtctcaaataaattggaatagaaacattcaatttttattctgttggtagttaattacagatgtgtaataataatacatgtatctagttttaataataaaaactaaaatttcatgttaatttatccttctgcaatattttaagtgaatattcactcattcaataaacatttgttgaggacctactccttgctgggcattgacctagcattgggagtacaatagaaaccaggatagaggcatttcctattctctttagtttctcccctatctcattattctccttttcacttctcagtttgttgtttctatatctcttttatttatatttaaaacttatctttcaagaactattttttgacatatgcattgttttgtgatcttttaacaacagttaattagatttagtgtatattttattcattgtgtttattcatgtattttttacttttattttaaattcaggggtaaatgtgcaggtttgttgtaatataggtaaattccatgtcatgggggtttggtgtataaactattttgccacccaggtaataagcgtagtacctgataatttagttttttgatgctcatcctccttcctccctccagcttcaagtaggccctggtgtctgttgttcctttctttgtgtccatgtgttctcatcatttagctcccacttataagtgagaacatgtggtatatggttgtctgttcctgtgttacttcacttaggataatggcctctagctgcatccaggttgctgcaaaagacatgatttcattctttttgtggctgtttagtattccatggtgtatatataccacattttctttatccagtctactattgacaggcatttaggttgactctgtgtttttgctgttgtgaatagcactgcgattagcatacatgagcatgtgtctttatggcagaatgatttatattcctttgagtatatacctaataataggattgttgggtagaatgataattctgcttcgagttctttgagaaatggccaaactgctttccatagtggctgaactaatgtacatttctaccagcagtgtgtaagtgttcccttttctctgcaatcttaccagcacctgttattttttgactttttaataatgatcattcagactggtatgagatggtatcttattgtggttttgatttacattgctctaatgattagtgatgcagcattttttcatatgcttgttggccacatgtatgtcttcttttgaaaagtgtctgttcatgtcctttgcccactttttaatggggttgttttctgcatgatggtttgtttaagttctttatagattctggatattagacctttgttggatgcacactttgcagatattttctcccattctgtaggttgtctgtttactctggtgatagtttcttttactgtgccgaagctctttagtttagttaggtctcatttgtcaatttttgtttttgttggaattgctcttggcatctttgtcatgaaatttttgccaggtcctatgttcagaatgatatctcctaggttatcttcccttgttttaatagttttaagttttatacttaagtctttaatccattttgaattgattcttatatatagtataaggatttttaactattgtttatactatactttttctattcttatatttatttttattttatttcactttttgagacagacaaaaaatctttatatacttgaatatcagataatgtgtttttggggcacttgtgcatgaattttagctgggctgggtataaaactgttgactcttcatgattcattgaaatattccataattattgctttattatcttttagtaatttgtgttgaagaaaattttaatgaatatatagtttttatttttatattattattggagaataaaccgcattctattttaaattactgtctagcacaagataattataatagctaaaatttataccgcattgctatatgctaagcgttcgtctaagtattttacatatgctaactcctttaagtccttttataattatagcaatcctataaaatgggaactgtaattattctcattttacaggtgaagaatctgggtcacagagatgctaagtaactttttctgactacatggagagtggcaagtgaagctaaaaggcagccagctcagcatgctggatcttaacttccatgctctgatgcctgtactattaataaacaaatatttttcaacttaaataggaaagtaaatgaaaatattaaattgttttctgtagggttcaaaacagcttcatgtatgatatcaatttcttggtatttttcttgacttctttcagaacataatatacttgcttgataaaagtagggaaaagatgagaaagagaagaagaaaagtattgatgtgctagaggtggcatatggtgtccgatttgatcttctcaataccactttgaggtatactacatgaagtaaaattgtagaatcatgtcatacgagttcaagtccagtgttattccctctgcactgtgagtctgaaggacagtctatgtgcaggctgtaaagaagaaatcaaagacaaccacactctcagctatactcctacacatgaataaagttacttttagcaatataatttttaaaaaataaataacatatttctaatttaaaacgatgcctagctagtatcccctcatgcaactgcttctaattctccattagcatacctacgaagtcacagtaaaaaatgaaaatgaatattaccattgaaatcacagatgactgataaccttttgctaggatcttagaggcatgtgcactgacaatagaatcaatgaaggtgcctgtaaccccagcactttgggaggccggggcgggcggatcatctgaggttgggagctcgagatcagcctgatcaacatggggaaacccagtctctactaaaaatacaatattagctgggcatggtggcacatgcctataatcccagctactcaggaaggctgaggcaggagaattgcttgaactttggaggcagaggttgcagtgagccgagattgcgccagcctgggcaacaagagcgaaactcggtcttgaagaaagaaagaatcaatgaaggtggacaacattgagaacacatgcttcagctcatgaatgaagcaacctcaaaatctgaactggcaaggtgaatgggaatggtctgattgtggtgagggtagtcagatttttgttgctccctccccatgctccatacaccgcaccacctttctttagtcacattaataactttcttcccctcagtcttccctatgtaagtcaatactgagctgatcaagagaaatgctggaattcattcttctttcctccctttctttaccactattccatctttcccatttacatctaatcaaccaccaagtcttgttgactttatcttcaagaatgtatcttaaatatgtaactttttctcatcagcattgccaacaccctggcctaagccaccgtcatctctcaccttcatcactaccatagcctcctacactgagttccctgcctgctctaatctaatctccacaaagcacccagtgtgaacttattaaaacttaaactgcattaatattacctacttatttcagtagcatcaaatttccctttatgtaaaatccaaattccttgccatatcctaactccaaagtcctatgtgatctggtcattttctcttcatattgcctcagccacaccagcctataagttcatcaaacacataaagctcttatttatttatttatttatttatttattgccttagaggtttgcgtatcacagtccttgtgtttggagtgttttccttcttcttcatctggcagcctctccctcatgatttgagtattaagtggcagctccttatagaagttcttcacaactaccattattctctcaaactgcatgctagtgtttttcctttatcttgtttatcataatttatcactccttaattaataattttacttgtttatattgtttgtctttccattaaaaccacaggagggcaaggaccatacctagtttctgtcaatgcgcagggcctgccaaagggttgatactacataaacatttcttgaacaaatgaatcagagaatccaccagatgctgcagccctcaagaaacaacaggagaggaaataaatggcggcatatttcaatgtggtggcacatttcaacgttcttacaagtgaagggtaagatagacggaaaatcttgggaacattcacaaatagcactgtggtcttttttatactccactagagcagaatgccagagggcaggggtaagaaaagattctgctgcacccaacgaagctacactaagcagttgcctcctaacaccaaatatggggcatgaggctatgcttgtcaaacaaactttttatctacagacctaagacgatgacattggtaatggggaactaagtaatttagaataggctttccatcgaagacaactaaaaaaaaggtggataacacataatacaacattatgcggctataagagggagtgaagaatatcttaatttactcatacaaagtgatctttgggatgtattattgaaagaacaaaataaagagtcagaaaggaatatatagtattctacttttcatgtaagaacagcaggaagggggtggtaaataagtgtctgtacttgtatgtttttgtttgccaaaaaagaaacaacaaaaggaaaacctaatggaactaatgaaaatgtttacctatatgtggacagaggaagcatagcaaagtgggcagggatgaaaataaaacctctttgaatatacctggttttaaagttttgaacttggaacaaggtaaatatattcatagaagaaaaccaaataaaaaacaaaataagggaatctctaaaaacagaaaattaatgaaaacaaatgaatctaattgtttgtgccataaccacacaaagaaaaaaattatttcaggtgactttgggacataatattctgactaccagtaaaagattttaaagaaaaacattctttaaaagaatattatgtaagggaatacagaactacaaggaaatcttaaactttactcaatagtgatattggcattactatactgtacttattttacagtgttttaatttataatttacataatgcaagtaattatcttactgttgtaaggaatcaagatttttagatatgagaaaagaaattcagtataaagctaaaacattatgtaaaatatgtaaaattctgcattattaaatataaaatagcaatataagcataaaattttatttataaaatgtatattcttagttcttttccatgaaaaagcataaaagaaaataactcaacagaaattagtgcacctagtttgtggtctccaaatactattccagtctgtaaaaaccagaattacttagaggagcggctgattccagctctcaggcaaaaaatatacaaaatacacaaggaaggttccaaagaccaatagagttatgtgaaagtacacagaggtttttctggccaaagatgagaatatttgggcataaaaaagataatgaaagcaattattggcaacagaataaatatgtaaaagcctatgtgtttataataaaattataaaaggagagaaattattggacaccactgtaacaagaagagcaacactctttaaaaatatgtgattaatatgaaaaaattaagcatatattaagtttctccagcatgaactatattttgggaaaccaaataaacctaggtaataagatcaatttctgctttacaaagttccaggcaataaatataggaaaagtgaaatgattagaaaatcacaattttgcaaccccaatgaaataatagattatgatctaagacaatcatgaatggatgaagccacaagatgaaaggttgatgggaaattataccaaggatgcatcagattgtcatcacttgaacccaattattcatcaatctcagcatcagtaagagtgtatcttcttgctgtaattcaacccaaagtacacagcatcaccacagtacatatccctgtaaaaataataaaatccaaatctaatcgagtctttgtggctaacttccactataggaaatatggcaggtgaaggatctagttaaatgacaaagaagccaactgaaaaactgaatgtgtgatattctgtgagacaattgactcgggttcttcaataaatcaatgggatgaaaaataaaattattttaaaaaaagaagaaagaggaagctactctacattaaatgacatttaaaggatgtaacaaccaaatacagtatgtgggctttgtttggcttctgactcaaacaaaccaagacaattagaaaaagtttagtattagatagtatcaaaataccattaatccttttcttagttgtattgatgacaacataggccataattattgaagaaaacttccatgttattttagagatagatattgaaattctaggggtaaaataacctgatatctggcacttattttaaaaatagttgagaaggaagaagagaaagaaaaagagacaggaggaagacaggtagagagaggagggaaggcagagaaagagatgtaaagtataagaaaatcttaataatagttaaaatctgggtaatggatacatgagagctcattgcaacattctattttgtatatttaaaatttttcagagaaataagaatgttgaatttatagcttggtgaagtaaacagagtcttggttagttggctagttaggtgagacaaatactttattcctcattataatgatatgtgttctttgtatttgccagttatttaatataaagacattaggactataatgctttaaaggggggcatgaaataactatcaagaaagggagcaattactttgctgagatctaggagaggaggggaacccagaaagtagaactcagcattcaaggtagtacatccctcataagaatgtcatgaggactgagaggttagtgattgtcaagtgcttgcagcaatgactggaatgtgcgtgctagttaaataactaaaatgatttttaatatgtaatcggtttccctactacattatccatatttcagttttgctttattttcaatttctttttaattaatatatcatcatacaatgtacaaagatttctggatattggcatcgtacttttttggttttgttttagggaatcatgggatgtatatagagtttctattctaaaagcactagtctttcttgggctgggcagatttttctcatcctgtttatagctacccccttgtattttttctggagttgattgtcaatacggggcatctttgcaatgaccatgttatctgatggtcatctcaacaccatataatgatgtccataatcaacatcactttgtgtagattaaaaataatagctgttaagcaacatttcatcagggtcacatgataaccaataattaaaacaattttttcaatttggttggctgttttaatatttgcgtacattacctatggtaaatggatgcaatagagatgctagaacaaaattctagcattatctttgaagttctttgtttgaatattcactatgtcctctaatagtaagaatggcccaagatctgcccagccatgttcccatgtggatatgggtaccaaatctgaagggaaaacatctattttcaaaaagggctggtcagcgcaaggaaaagtgtccttgaggcatttgtgaacttatacaggccaccaagtttgctccattcattcatctcaaggagcatcagcgtatagaggcacgaaggtggtatatgggtgagaaggtggtacggaggtcacaattttgtttcttgctcttgtcttcacctgctccaatctgtggcctgaagctacactgcaattctgataggtcactattaacaatgccaagtagcaatctgtcaggaagaattataaatgagccaaagagcaggtggttaatgcaaaaggaatctcagacaaataggagacataagtctttcctccatacttcctttcctctgtttattgtcctgatatcagattagctgctggagtttaaaagcctattattctcaagatgtctttcagacaatttaactcaatagttatagggcaaaaaataattctctctcggaggtggaagggaaggggaaacagagcacacacaacttctttcagataatttttttctttagaagaaaattaaagtaacataggggacttccaagaaccaaggggtccacaaattactgttagattcgtgctagaaatccaggccagatactacagggcaagatgattatggttcccagtactgtccaaagacagtaatctgtgagtaccatgtcttaggtgctatgtaactatccatcttgaatggagtgcctgtgctggacagcatggacaagttaaccactctaggactctgcttctacacaaacatgataaggaggttggattagttgctcatttggatctttggaaactgctattctagtatgatggcttcatgtgctagggcaagtggcctgcttctgaaactcaaaaatatttgttttagcaggataagaaaaatgtggattattttcatcttactatttaatagtagcagaatgtctgtgtggttccatctctgcctcaatagtaaatgacaaatactaatataatcaagttgatttggggttctcaataagctctcacaagctggaactgccaacgagatgctttaaaaatattcccttttgtatagtgaaacaactttggaaattgtaacttaagaatatgagtatttatttatagcccaccttttggctgagatttgacatgacgtttttctttcaacaaaactctgaagtggcacaccatgatttgtaattttatttggctattgtctgcatatgcagacaattgaaatgcagaaagttgaaaaattattcaaattctaccaagtgtatttacagttacttttctgtgactcagattccctccttcaaaacattttaaagtctccatatagaatcaagattggacttttcagagaagggaaaaagtaaatgaaagagaccaagtttttgtcttttctcagaggatgatgaagtagattttagagtcttaaactacattgaagggctgggttggcaataaatctctacttgcaacttgaactactgagtctccatagatgtttcagacctgtgtctgactggctcataagaattaggaatactcttcataagcatcttagagtggatcagaatcagatcattacccgaaagggaaaggtagtttactcctgagtccttacctcattacaattttttcttatcaactgacccaaatttagactttgcagatagaaatgacatgtatccgacagcatattagcctaaatgattcaatataaaggtcaaacctcacataaaagaagagtccaataaagaagtttacaacattccccagaattgctcttctcatttaatttaataatcccagcactttgggaggctgaggtggacagatcatgaggtcaggagttcgagaccagcctggccaatatggtgaaattctatctctactaaaaaaaaaaaaaaaaaaaaaaacaactagccaggcatggtggtgtgcgcctgtagtcccagctactcaggaggctgaggcaggagaatcacctgaacccgggaggtggaggttgcagtgagccgagatcacgccattgcactccagcctgggtgacagagcgagactccatctcacaaaagtcaatcaatcaatcaatcaatcaataataagatttgcccatcttaaaatattattctcagcactctctactctcttgcttccctcacattcttcctcaggctccttcattttttctttctgcctccagcagcatcctctctcatccctgcttacatatccacctatagagtccttcctcccatcaagcatggcctgcttccaggtcccatctctcaggctctgagaaatagtgctttaacttctgccagcccttctggcatttactgtatagatttctgttcatgttgcccctgccctgtgttaaaactatatatgcttatgtgttttcttctagactgtaaacttgaagacagacgtggttgatgttgacctttgtatttattgcattatattctacataatggatattccataaattttttgaattgaattcacttgcatttagtctttcttaatgtataattaataatgtacacatatatgtcaatgatacgggaaaatgaagtaaaatgaaggttaaatgtaaagaagaaacaagagtagaaacttcagaaattatcagtgttcattttttgcactaggatgcacagttaggtttcattgcctcaaaccttaatttccaataataaataatgtcattcccgagagaggaggaaagaggaaaacaaccgaaatttgaggagtcagggattatgcttgctgctctttttttttttttggaagtaaaatatgtttacttgttaaaatatttgagccgaaattatttcacatgtgaacataaaaaatagatttaagactattctccatttagcagaatttgctctgaatttcccaagtaccccagaacctatagagggagtactttcttattttaatatgtttaattgacaaataaaaattgcatatatttaaggtgtacaacatggtgatttgatatacatatatattgtgtaccaattaccagagtcaagttaattaacacattaccacccatagttaccattttgtgtatttatatgtatgtgtggtaaggacacttaaaatctgctctctcaggctgggtgtggtggctcacacctgtaattccagcattttgggaggctgaggtgggtggatcacctgaggtcaggagttcaagaccagcctggccaacatggcgaaaccccgtctctactaaagatacaaaaacttagctgggcatggtggggggatacctgtaatcccagctactcaggaggctgaggccaaattgcttgaacctgggaggtggaggtttcagtgagccgagatcgcaccattgcactccagcctgggcaacaagagtgaaactctgtctcaaaaagaaaaaaaaaaaatctgttctctcatcaaatttcaagcaaacaatacagcattattaaccatagttactatgctgtacattagatacctataatttattatcttataaactaaatatttatactctttgactaacatcttcctatttccttcactccctaggccctggcaactatcgttctactgtctacttctatgggtttgatttttttagatgttatgtataaatgagatcatgccttgtctttctgtgtctggcttatttcacttagcataatttttctgcaggttgatccattgttgttgtaagtggtatgacttccttttttaaggctgagtaatattccattgtgtgtgtgtgtgtgtgtgtgtgtgtgtgtgtgtgtgtgtacataatcaccttttctttatccatttatccattgatggactcttaggtacttccatagtgtggctgttgcgaataatgctgcagtgaacatgagagtgcagatacctctttgacacactgatttcatttgctgtagatataaacccagaagtgggattgatgggtcatatgatagttctatttttaatttttcgaggaacctccatactgttttctataatggctataccaatttacatttccactaacagttgcacttggtactttaagacaggcattgctattctcatttttcagggaggttgagtcactgcacagcctgccacagacaatagagctgggaccagaatctggactcaggagtgtgggttgccaaaggcctagctcttctaatgtgctgtactgccttcctaagcaatgatgatggtaaaatgtttttttaaaaaaaagatatgcagacacaccactgtcaaagaaagcccagttttcttttacaagtttgcttctatatttcagatgccactaatgcactgtcaatcagaaaagggcaggatttgtaagttccaatcaacttagggtcaccctgaggtctttcaacttccctgtacctagaatgatcttccccctagtagctgcgcccttatcctgtcactccatcaggtctttgctcaaatgacatctgtcagaaagacttgctctgaccatcctgtgtaaatcagcagccccatccccacccaccaagctttctggctcaacatactgtatttttcctcagagtatgcatccccatctgacacaccatgagatatttgtctatttgtgtggtgccagtcttctgctcactagaatgtaagcaagctctatgagggtagggagtttgctctgtttgttcactgatgtatcctcattgtccagagagtgcctggcacatggccacccccagtatgtatttattgaatggatgaacaaacacagaaaagaccattctacagctcacatagatgattcataattaatgctattggcagttcctcaatgactagaaaatttggaatatttttcttcccccaatttacattcctggtgtccagaagattcctgcctttgctcaccttaccacttcccaaactactccctacaacttctctcttgtttttgccataggtgacttttatcacaaatcaaccatatagacctagaattgttattaattgtgaaatttcttgcagcaaatcatacgtgtcacctacaggctccccaggatctttgtagtactacacacaattcagcacacaacttatagattaaaaagaaaaacttgtattgctgatttcttcacattaccaaacttgcctactctgatagcttatgtttggagcatttattaagggccctgtaagttagatgctgatagaataatataatacacggacactcttgtattgcctgcagagctctcagtcctagttttgcagatcagatctgcacctgaagccactcaaacacttcacacccaaagccaagtgctacagaagcctccgtgaagaacaatgtagaagtgtttgtaaaggagcaataacactgcaaggcaagcatcagaaatagtaaaggggactgaaagaatagaaaataaaacaaaaaaaatcaaattttttaaaataaacatcgttggcccatgccacatcttttctggattaagctagatggacattttgtgaaagttcattttggagagttttttgtttttggccccagttcacctactccagccctcttgcatctctgtaaagcctctcctctctgtaccttttgcttcaccattcagtgcatgagtgtcttcaacaaaaaactttttgttgaaaattctaggatttaccttctcataatacaaattctcaaagctttataatgagtcagaaactttccaagccttctaacagaaagagcattaaatcattatttaattttaaaacatatggtttactgaattctttattgattttacaaacaagattatttggctgactgagtatatgggtgtgtatactttgctctctcaaaactgtcaaattagtctgcacaggaagatgcaccccttatgtttcagtcactcaagtgctctttatctctaacagtctgagcttcaacagggactgttttatcctcttactcatgtgaatgtgaataggaagtctatacaggtgctggtttgagtaatggaatttacgacagacccagcctctgttctatcaaattaaggatacagatggccctttgaatacaacaacaacaaaaaagtgaggcaagagtagaatctgaagggacacccataaaaccaaggtgacataggcatttactacaccaaaaagaaaggttgtttagatttgttgccagaacgtaaaaaaagaaaaatgtgtgttcctcattttcctggctctgcagcttatattttcaacatctttgtgagggcttctgttgccattgcattactttctggctgtctggatgggttgctctggtgtggagcgagcatcctcacaatgatcccacactgtctgcaggccactcctgatcttccacaatgtatttctgatgcccacaaatggccatgggcttgtttcttccctgacgtagccttgtctaccgtgtgagggagtgaggtcccacacactggatctcaaagaaggttcaaacatacacttaagcattcctgtgataattgccaacccatgggggacagtaggagactataaattgtcctgtctggctatgtcattccctcatactgcagagtaaagcaagaccttggggaggtagaggttagaagcaggggcctcagaaggtgactgtggagtgtcctctttccctgaggtacctctatttgcctcctttgtctgtagccctctcaatttaatctcaatattctggctcccagggaaagctgcttttttttttttttttttttttttttgagatagggtctcactctgtcacccaggctggagtgcgaatggcataatcgtagctcactgcagctcaaactaaatcctggactcaaggaatcctcctatcttagtctaccaagttgatgggactacaggcaagtaccaccacacccagctagtttttaaaaagattttttttttgtagagatgaaatctcactatgttgcccagactcatctgtaattcctgttctcaagcagaaatctgcatttttaaccaacacttcaataggttctaaggcagagacttcaaggagaatgcctgctacgttcaaaaagcaccagcctacatagtaaagccgagtcccttagcgtggtattggtgaatttttccagctccctcttctgctcctctcctgcacccacttcacttaacccacaactccctgcaattaacatttggccaaaactgaactcttaacattttctgaacacacggagttacatcaaaattcagagcttttgcaccgactacaatggcctgttttcatcttcaggccttgcaaagtcctgcttattttgaaagaggcagtgtggagccactttatctgataatgccctatggttcccttcctgctcttttatgcaccctctgtcttctttctcaagccataattcctcctctctccctctgtggggttaattcgcttacacttctcattgtccttatcatactcaatggaaaaaccaaatcacctcctccttaaagtttttgcagattttgtgagatatgctgtttcttaaatatccatgatgttttcttaacctgccttatgtcacctgtcacattctatcttaaaattaatggtatatgttaataatatttactgttaataatgtgctaattatgtaatgtactattatgtagtaccactaataaaattaatagcacatattgatagtacatagtacatatatgtacatatatatagcacttgatatgtgtcagaccctattctaagcacttttcataattaacacacttaagcctcatatcaacttttggaagtgtcactattaccccccattttgcaggtgaggaaattaaaaacagaagggctaagtggcttacaaagtcacaccactactaagtggctaagccatagttcaaacctggttagtcttgttccagagaccatgctcctaactgttactctacatagctcctttgtgtttttggagttgtttatgtacttaacacgacttttttttcttccctcttggcatcctgtggctcctggaacatggtgagcactcttcaaacacttgaggagtgaaactacatgggaagagtttttttaggaggtcatagaattctcacgtttgggaactgacatgatttgactctgtgtccccacccaaatctcatcttgaattgtaatccccacatgtcagaagaggggcctaatgggaggtgattagattatggggatggatttcccctttgctgttctcgtgatagtgagtgggttctcatgagatctgatggtttaaaagtgtggcacttcccctttcaatctctctctcctgttgccatgtaagatgtgccttgcttcccctttgccttccgtcatgtttgtaagttttctggggcctccccagtcatgtgaaactgtaagtcaattaaacctcttttctttataaatgacccagtcccaggtatgtttttatagcaataggagaacggactaatacaggaacccttagggaaaaaacttcattatatctgaaactgaaatttctggtgatggtaaagggcaaagcataaatccgtactggaagttagcattttctcatgattcttcttctcttgcatacctttccaagtagttttcattttcatttgttttacattttcttaagatatgttcacacttatattttaaactatggaaagaaaaagatcacttgcaaatgccaactgggaagagtgtttattttaaacaatgctgttccggtgcaccagctgctgttgctatgcttgtatattggttgctaggggtagtgaggagaattaagcctgtgatgtcaaggtgacaagttgcttcaaccctatgttctattggctaggatttttctgagatgaggaaatctcagtcctgagcaattagcaaagtacttggtttcaacttgcagaaataactcatattgcaataagtttattgtaatctagtagttttctaagggtagaagaaactcggaaagtaaatatagtacctgggattttaggattcagaatttggacaagattttttaaaagtttacatttcccccaagggataattaaaccattacagaaagttaatatcagtgctgtaaaatgagaaaaggaaaacctgcctttaatgccagggtatgttatctgtccaaaaggggatttatttaaatatgtcagttgccatatcaacactggaaaagagacttcactattttcgaaattatcccactatgaaagtaggtttgtagattcgagtttatacagaaaatatttgtgtgtgcataatgttgcctggaatttacattcaaactgattaaaaattccttaagcacctgctacaagtaaaacattgtcttaggaatgcagagtgatccaaccatcccagtttgcttggagctgccccagttttggtactgaaaaatctcatgtcctgggaaacccctcagtcctgggcaaactgagaccggtggttatcatacaaagagaaaaccaaataagactaaaattatgtccaaacactttcattgtggctaggaacacaagttgaacaccctaataaggaacacaaataataaaagcttgcattattgagtgcttatatgaggtaagtattatactattatctccattttaaagataagcaaactgagacatagtaagggtaaataagttagttagtgaaggcaccagaatttaaacccagaaagtttggttttagagcatacactacaatcagcactgtatggaaagatatctaagagcagagacaggcagagatgggagcactggggaagacatcatggaggggctagatggctacatcttggctttaaaaagtgagcaaaagtaagagttagaaaggagatgaaagtatcatttataaatgggaaaatcacacaagcagtggtctgtagtgatcacacaagcagtggactggagtgaagaatgggctgaaccttctttttccagaggcagaaaggagtaagttttagggaaaaggttggagcccttttccctaataggggggtactggtacaaatgaatgtaaagagagagagaaagagagagagaagaacaaagaaaagaaaagaaagagaaagaaaagaatagagagggagagggaagaagggagggaaggagggaagggaggaaggaaggaagggagggagaagctttcctaggagagatttaacctcttgggtcacagacaaggtcacctactgagcggtggattgagagctaggggaaagctgtgaaggtttacaagctcctttcttgagctgttttaggaaatccacaggtgtccaacaagaggattcctgagcagtaggagggagttgaaattgcacagtaataatttttaattcaaaaataacatagccatattataagaaattctggaaaatggagaaatcttccataaagtatgctataattttggatttttaccatatgtttgtttctttttttctttttcttttattattatactttaagttttagggtacatgtgcacattgtgcaggttagttacgtatgtatacatgtgccacgctgttgcgctgcacccactaactcgtcatctagcattaggtatatctcccaatgctatccctcccccctcccccaaccccacagcaggccccagagtgcgatgttccccttcctgtgtccatgtgatctcattgttcagttcccacctatgagtgagaatatacggtgtttggttttttgttcttgcgatagtttactgagaatgatgattctttcacacctaaaatcatagtgtacttatagatccaaatcatgcatttgttttttacttaatttattactataagtattttccatgttattgcatagtctttataaccatcattttaaagaccagttaatacattatctggggttttaagattcagaatttggacaagagttttaaaactttacagctctccaaggatgattaaaccattacagaaggttatatccgtgttgggtatctatcctgggtatagtccataatttccttaatcattatacttcgttaatatttctaacgttttccttccataaatgaagctagaatgacatcttcaggcttatatttttcccacaatccagctagctctcatatgggtcttatattttgtcttttcttagcttccatgtggctatgaataagattcatttttcacataaacatacacatgctaacatatccaagtgtgtgttgtctcctttaaagaagcaaaaagtgtttcctcggagaagcatttacttatcttgctggcatttttaatgactttgaatgtttggatctgttttcttctttgtaatgccttcagatatatctttgccacctgggaatattggcctgtgtcttgtctatatcctcaattctcattatttagccacatcacttcctgccttagaggacttagcattaaataacattgggtttgaccaaaatctttattaccacccagactttcacctcagaaatccctgcctctgttcccagcttctgacaatagcccatacacacccttgtgtctctctcaaaccccgatccctccctgctgctgatggagctcatagagatctcttcttcccattttttttcaaatctttaaaccagctcttaacttcccagcttttccctcttatgcctgtgacttccttcatcccctcttccagcagccccctgtcctgcctcacctttctactgccctgtcctaccaatgctcaccctgggccagttcacctgcatgcagtctccacccccacacctggcccagagccctgctgggtccagtagcaggggatacctcacaaatgtggcctcccatccaagctgtgtcctcaggcttctcagcagcctttccctctcagggacttccccagtctcccatgtccctgactacctgtattcttcagctcttggctcttgaacagtaactcctttgttatctcagagaaaacagaggctgacaggtgtgaacttcttgatcttcccactccatacctgtaaatttgtctttctttaaatcctgcctttctttcttcttctttttctcagagaaagtattgctcctttttctgtctaaagcgaatccttttactttccactgatactgtcccattcagattcctctgagaccatgtcccatcaataataagttctctttcatttccactggttccttctttcaacatggagatacacttaagactctcccatcttaagggagaaaggaagacagagttataataagtgcctactgtatgttggttacttgagaatatattatcttatataatcctcataacaggtttattagttaggtgttattatctttattctttgatttagataagaaaaccaagattcagggaggttaaatggaccaaagttttaagttagtaagtggcagagccagaattgaaactgacttggtctaatggcaaaaccatgaatgctgccctattagcccactccaatttcacttgtctttcccttcacaatcatatttcttaatagagtaacaaatcacttaagttctacttcaacctgatttgctaatgagttgtctctg

SEQ ID NO: 333 - DNA, 32742 bp, Homo sapiens
  source 1..32742: mol_type = other DNA
gcgcatgcgcgaactcctggcgggacctacgcggtagaagtttctactaagtgaaaaggaagagcgagggattcttttctctgtggtctacagcagcagcactattattaaaaatatttggaaagacaacctggcaagttttgaaaaagatttttttaaaaacggtagggttccgctcacagtgggaggcggggctcagtggtccagaaacgcctcttcagaagagggcgggctcgccgagaggcggggtctcgggcccactcggatgacgtgccgcgtagaagtatcgcgggaagaggaagggagcgtaactcttagaagtcactatggtgacggggaggtaccaggtatttgagagcaatcgccaccgctttcctggaacttgaggtaaatcccttcacctctggacctggtgagaaaagggtttggaagttgtagccatcactggatcccatctttcctgttttgaagctgtgtgcttcgtggagcatcattttctgtctccctggcggcagcggggctccgggtgtagcttttgggatgcgaaggaggaagccctaaattttaagggagtagagagacaactggaagacctggattcgtgatagcttagtcgacatgtgaatagcgcaataatgattttcgagatcattggtgttactagtgaaaggtttaggacttttaaaataatttgactaaaaggctctttagtggaaaaaacgactcgccagtgttatggttatttttatgaggaaattatcgatcagcaaatattccctaagtagtgtttgtatacattgccctgggtaaggcataattagaattagtaagcaagtttggcgattcctgttccccgagaacttagttttagtgggtttttaacctgaggtctgtggatctggtggtaggtgattgggcttcagagttcataactcgcctgacattgtatacataattctatgtgcatttttctgggaagttagttttcctacaactttataatcagaatctcatacttgctcctaattccctatattgttaaagagccactggctcatttgactatctccagtattcatgcaacaactcttaagtacttgacattgagaactactagcctcctttttttttctttaacttttgcttacttagggtctggcatgttaaatcaccattaaatctcccttttgaatgaatttacatgatcactctaaatacattatggttcttccctggaagagcatgaagtcaggttcagtgattctcaaaaaggtgtggagagccacccccctcccaaccaattgtaagaatttggtgaggttgggagactggtgtgtattgcataagcgtagactcaatatcgtgatatatctttatgtttgaagttaaaaacgaattgttgttttcataaaacaagctacagaaaataaaccttaatgaaaaaaagttttttggctggtaagcataccaagaagatataaggattatctttgagggcttctggaatttttgcatttccaaaggttgtaaaacactacaaaacctgagttggggaggtatcaactatgcggatcacctgaggttgggagttcgagaccagcctgaccaacatggacaaaccccgtctctactaaaaataaaaaattagcagggcatggtggcgcatgcctgtaatcccagctactagggaggctgagacaggagaatctcttgaacccgggaggcggaggttgcggtgagccgagatagtgccgttgcactacagcctgggcaacaagagcgaaactgcgtctcaaaaaaaaaaaaaaaaaaaaaagtatagaccaaattgagtggtgtatttggggcaacagagcacaatgtagtggaaagatgtaatatagaaaacagaatcccaagttccatcattttttaggtatatgcttgacagtttcctcagtttgtcaatcttgagagtatttatttatgaaactagcatataatacctgtctcatcatactgtttatgattgttcatctagcacatgctccataaggatttgattttgctgtgtttatgacattgaacttatcaaagtatgctaaggatgaataatgggatatcaagttagaggaagggtagctcctgaaggatcttgaaaaccaagtcaaggatgttagatatgatatggaggaaacagcttttagaacaattctgagccaaggaatgacttggtaaatataggaagaataattaacagtagttatgtggggtatgttaaaggggaaagaaactgagatcagtctaggctttagttaagattgttactatataacagtaagtgagaagtgcctaagtaggatggaaaaaaatctggagtcattttggggtaaaaatctatagcttttgtagattgtgatggttcagagtataaacccttgaagtcagtcatatactattctttgtgtatccttgaattagtgataaggtataggaagaacgataagtcacagaaaatatagttttgataaatcaactgactgatggccttaaatttaattgaacctaaccattgcccactcagaaaactattttgaaaaggggcataaaccaggttgtataatgagaaaacataacaaacagctacagagtagacttaaatctggagatttatatataccacaaaaataagacattcagaataagtataaattttgagaagatattagagtcacaagaaataaagacttttggttgattgttgccaatattttggacatgtctcatgaaattaacagagtttaattacaaagagaagctggcctacctggaaaagactgggttacagtcattttggaaagtattgctataactgggtcttatcttcctagtctaaaatgatctgtcagtaatctctatctgcaatttcaggcagtcttagaaggaaaacctcactttttacattagaaaaaaattataccccacaggaagaaataagttcaaagagaaaaattggaattagaattaaaatcttcattttcagttctttaagtgcaaggttttttcatcattttaacaatatgtgttttgtttgccttctaatgtcataacatttcagaaaggctgaaattagatttctgagtaaatattttaaaagattaaatttgtaattgtaaatatttagataaattagatattaactaatatgaatttatgtaagtattgtataaatatttagagaatattgttcaagattaataaattagatatagacacagtgcagatagaagtgaatattcctcttgataatataagcaccttggtatattaatgttaccgaaacacacataacttatcaccgaaaacccaggaagctagaaggcagaacagctcttttttggaaatatcattttgaaagataagtatgtttttattccgtaggttggaattctggaaagatatattcaacaagcagtagaggtagagagtatggcttaagagagaaaataaaatgggtagtgctgtaagaataactggatcactaaaaataggttaggtttttaagattgtaagtggagagaagctagcaccagaccaaggatattaaggaaatgttcatttttagaatgtaagaagaagaaataattacagtaatatctaggataggagcctgttgattacaagtgacagaaaacccaatccaaattgtcttgagaaaaaacaaatattgtctcctggaactaaaaagtcaggtgactataactggattaagggttcagacaaagacacaaggatttggtttctttccttgctttgaactccattgtgttggcagtattttcaggttccgtatgatggcctctagcaccttttggctctccccttgctgtggtaagatagctacagcaactccagcctcatatcttctaaaattaaaatccaagggggaatgagagtttctcttccccagcattgatttgaataaaagtcctgggccacctgtgaaacagtctgtgcaaagggaatggaatgctctaattggcttaagtctgggcctcatgccacatgggctaacagtgaggaagtggttgttgcaaagagaaattctttttaggtgggaaaagagtgactatatatatgcagggtgaaaaaacaactttcactggaaatactaacatttattaagtgcttactgtgtattgggtactctactggacactttacatactttatctcatttaatcatcataactaatttgtcaggtaggtattattagcctcattttacataagaaagtaaacaaagtatagtatcttcatgaagataagccaggtgagagttttaataagaaggggattcaagtgtggagaatggtgatcttataaaaatattatttattagggttttatagaaatgcagaaatgcataaaaattaggtcataatcctttcactcagataattctatattaaatatataagtggatagattaaataatactgtgagcattgttgaaaacttcaaacagaacagaaacatataaaattagaatttaaagctttccttctcatcccagtgcccccacccttttaggggtctccattattaagtgtcttgcatatcttcccagaaaatgttttggtatccaccagcttaaatatatctcactttttcttttcacaaaaggaattgaatcatataatacagctgtataccttggttttctcatttaacatagacatctttctatatcaacatgtacaaattcatctcatttttaaaatagtttttttttttcttttttgagatggagtatcactctgtcgcccaggctggagcgtagtggcacaatcttggctcactgcaacctccacctcctgggttcaagtgatctctcctgcctcagcctcccgagtagctgggattataggcgcccgccaccacgcccagctaattttcattataagtatagccaatacgaataatattgaagtatggctattaatcatagctagaatttcaaggaaatgtaaataccacagcgtacacatacactttcgcaaatgcatacaggaattgagatggggtgggagttggaggtctttactaattaaaccatggttgtccaacccacgatccatgggccacatgcggcccaggacagccttgaatgcagcccaacacaaatttgtaaatgtccttaagacattatgagatttttttgtgattttttttttctttagctcatcagccatcattaatgttagtgtattttatgtgtggcccaagacaattcttcctccaatgtggcctagggaagccgaaagattggacacccctgataaagtaaacggccatactgtttgctgtggctaagcctttgagtccgtgcctggaaatggtgagcctgcttctctctcttttctactgtacaagagatctcagctcaagtgtgcaagttctgtgatggcaccaatctgaataaaaggcttgcctttctcctttcttctttctctattggagaagagacacaggagtctggtcagagctatcaatttaggggaccgttgataaaaactgtacttcttttaataggaccttggttagtaataagccagcctgctttctctattaactagtatgcaagtgacccaaagaaaactcggtataaatatgcttgtgatctagctcttgaatttcttatctattcttcacattcttgttcactactagagatttttctgccacttcttatctataggtacattcttgttgacaagtcatggtctccctgtttatcatctaaaatttttcttattgttagtgcttttacctcttagttttatttcctaaatctaattcttttattttcttttttaaaaaccatcttttttttaaagtgtacagttcagtgacattaagtatatccacagttgtgccactgtcacatccattcattcttccatccatccacagaactcatcttgcagaactgaaactgtacccattgaacaataactccctattcttccttcccctagcccctggcagccatcattctactttttgtttctatgaatttgactactctaggtaccttatataagtggaattcatacagtatttgtccttttgtactagcttttttcaattagcataatgcttacttaggtctaactcttaattatattttcttgattttaacccttccatattataaacacatatatccacacagggatgtaaaatctatgaacatttaaatttctaatttttgatagtatttcagagttctgtaatgaacagatttgaatatacagacagtctcagactatgatggtttgacatgatttatattgactttatgatggtgtgaaaggaaagcacttttcagtagaaactgtctttaaatctctgggtgagataggaagccactgaagagtgttcagcagtggtttatttaatctaatttatattttttagagacagggtctcactctgttggccaggctggggttcagtggcatgaacatagctcactgtaactttaagctcctgtgctcaagcagtcctcctgcttcagccttcccaagtagctaggactactggcattcaccaccatgcctggctaattatttatttttttgtaaagaagggggtctcactatgttgcccaggctggtcttgaactcctggcctcaagcagtcttcctgccttggtctcctaaagtgctgtgatcacaggtgtgaggcattgtacctggctgtggtttattttaaatcagccacatgggctgttgtggtgagcatacattgtagagtggctcagaggctaattaggaagctgctgtagtaattctggttaagagaagatggcatcttggattgcggtcatagtggaggcggtgaaatattttacattttgaagataaagccaacaaatgtttttatttacaagttggatttggtatgtgagagaagagtaaatgatgacttaagtttttggtgtttgtaactggaagaatggaattgccatttaccaagatgggtaagaatgtggtaggagcaaagttgaagggaaaatcacggttttgatttggatcttgttaaatttgaaatgtctgttagacattcaaatagagttgtcaaatagatataaaagtgtggggttcagtggagaggtatgaaccagaaatatgaaattagtagttgtcactatatggtgaatatatttacattcatattaagctataaaactggatgagttcaccatggcagtgagtgcagatacagaagaggcacaaggactgagcctaccatttaaggctggggatattaggagaaagtaacatttggttattccctctaattctctgtagttcctttccctccttaaactgctagtgaagtaaatgccaacacccttatcaagattgaaaagaaatcccacatagttccatatgctgctagaggactgcccctttttcccttatgaaagtctgtatcaatgctgcctaagagagcagttccaagaaggctatggtttaaattgattagccaccttttctcaagagacatttgggactactgtgtcataccttacatccctgtttacctcagtctccacattcaagataattccctgcattagtttgttattaggattagctgttgatgacagtaatttaaatacgatgcaactattctctatcacttaaaactttgatggtacaggattgatgtgactttccacaaggtcagaaatcttggctcttttttatcttgctgtgttatacatggccttgatggcatggcatggggagtgtcactcttccgagtttttatttgccaattatgctgtgattttatataactttttttttgagacagagtctctctttgttgcccaggctggagtgcagtggtgtgatctcggtttactgcaacctccacctcctgagttccagcgattctcctgcctcagcctcctgagtagctgggattacaggtgtgtgccaccaccccggctaattttttgtatttttagtagagacggggtttcattgtgttagctaggatggtctcgatctcctgaccttgtgatccacctgcctcggccccccaaagtgctgggattacaggcgtgagccactgtgccgggcaattttatgtaacgtttataagaagtaatgaaatgggttccttagataactcactgtgaaattaggcaatgtgaacttaggtacgtactattactgttgggcagtatatctgatgcagggcaggcaagctccaaaactgggggttagcccaggagtgttcttgggatggcccaagaaagaattcaagggcaagctggtggtgttatacagcaacttttattgaagcagcagtgtatagcagcagcagaggtactgttccttgcggagcagggctaccccataggtagtgtgcccagaggagcagctcataggcacttctgcagtcatatttgtgcccacttttagctatatgcaaattaagaagtgggctatgcagaaatttctagaaaaacaggtaacttcctggtgttaccatggcaatagtaaactgatatggcatactgataggcatttcttacagagaggtgctttcacctcttctgtgttttagccagtccccaatctggtcccgtgtctgagctctgcctccggagttgagtcctgcctcttacctcatttctacccctcacagaatataaaatccagattgggccagtaggttgatgatattataatagccactgttggtttcagtattattaatgccttgtgtggccacacctagtttcaagggcagctaggaaacatagtctttgttctaggtggccagatgtatagcaaaacttcaaattcataccacagaagcagggatgaatggatattgcaggatagccagctgtttctaccatctccaaccatctatcttaaaccattagttcttcaccatctaagtttttttggaactcactgtgtgtcattagccaaatcagtcctccacttttattctgaatgatccctttactctcaaagtctaacttaaatctggttgtttcctaaggaaactgcttttcttttctttttctttttttttttttgagacggaatttcactcttgttgcccaggctggagtgcaatggtgcgatctcggcttactgcaacctctgcctcccgggttcaagcgattctcctgcctcagcttcctgagtagcagggattataggcatgcaccaccatgcccagctaattttttatttttagtagagacagggtttctgcatgtttgtcagactggtctcaaactcccgacctcagctgatccgcccgcctcggcctcccaaagtgctgggattacaggcatgagccaccatgcctgtccctggaaactgcttttcttatagatctctcaagtagaagctattttgcctcccaaactcccatatgtcagagttttatctctcgttactgtatctggacagttgattctgtttctccttcctgtctaaaatctcctggtccctttgaaacaagtccaggatgtggagaaataggaacacttttacactgttggtgggactgtaaactagttcaacccttgtggaagtcagtgtggcgattcctcagggatctagaactagaaataccatttgacccagccatcccattagtgggtatatacccaaaggactataaatcatgctgctataaagacacatgcacacgtatgtttattgtagcactattcactatagcaaagacttggaaccaacccaaatgtccaacaatgatagactggattaagaaaatgtggcacatatacaccgtggaatactatgcagccataaaaaatgatgagttcatgtcctttgtagggacatggatgaaattggaaatcatcattctcagtaaactatcggaagaacaaaaaaccaaacaccgcatattctcactcataggtgggaattgaacaatgagaacacatggacacaggaaggggaacatcacactctggggactgttgtggggtggggggaggggggagggatatctttaggagatatacctaatgctaaatgacgagttaatgggtgcagcacaccagcatggcacatgtatacatatgtaactaacctgcacattgtgcacatgtaccctaaaacttaaagtataataataataaaaaattgaaaatcattttttaaggatgatttcaatcaccatttttctatataaatctaagtagatgactgaaaatcattatgagatctatttagaaaaagggtaattatccccatcacttctccatttaacagttcaatttggcctgttcttaagcctggaaaggttgaatggaacctcataatggcttatctcagctttaattcttggtcccacccattaaggcccatgtattaatttcatattattgctgtaacaaattaccataaattaaagggctttaaatacccaactctattatattacaactctgtagatgagaaatctgacttgggttatgttgatatcaaggtgttgacagaactgtgtttctttctagaatctctaggggagaatttgttttctggccctttccagcctctagaagctgtcctcattactaggcttgtaacccctttacatcttaaaagctagcaatggccagttgagtctttctcatgtcacattgctgtgatgctgacttttcttctgcttccctcttctacatttaagggccttgtatatttatttgggttcactggatgatccagaataattgtcctattttaagatcactggaatatgaaatttactttccatatgaaacattagttctttttagctacctaacgttttctctctatatatatttatatagaatgtatttatatattattaattacataaatatattttatgtaatatacttatatgttacatatataataatataatatgtatatttataggttctgggggttaggacatgacatctttctgagaccattattttgcctaccacggtcatgatgtattttccttagtatatattgctagattctgcttgttaaaagttccttaaggctttccacatttttgctcctgagggatatttttctgtacttttcttgacttgtgatgcccctgtccagttttgatatcagagtaatggtggtgtattgatgcaatgttctggacaatgtttcttaggcttatcttttctggaagagtttgtttgtaattgatgtgattttttcattaaatgcttggaagaatttgccactgaaaaaaaaaaaaaaagaaacaagtcctaccagattaaaccattctctgctgtgcttttatgcggtcatctgcatatgtctttgctcttccctcattcaatgaatattttagcatgcggctaattgtccttatctctactactattcttgtcattatcttgacatcattaaaatgtccacaaataaatccctggcctgtcagttccttgacctcagccacccactttcacagtcataacctatcttatcattaccaatatctatactggctctaaaatctgttttaagtatcccattgtctatctccacttctttttgctagttaacttcttctggaatcttaatgccaacaattctaaagacttcagtaggatttccaggccattgaatctaccactttttcatagtctctttggtaatttcatcttattccatggctttgaatatgatctttttgctgacaaccctcaaattgatatctaattgatatctgcaactccaacttcccacttgactccagacttactgtattatatctcatttctctttgacttctccattgggttgtctaatagaaaccttgcacttaacatatccaaaacagaatgtttgatatcaccccattccaacctgtttctcaatcttcctcatttcaataaatggcaactccattccacctattgaaactttacagtcattttttactactgtttttcttttttgttttttgagactgagtctcactctgacgcccaggctggagtgcagtagcgtgatctcggctcactgcaacctccacttcccgggttcaagctattctcctgcctcagcctcctgagtagctgggattacaggcatgcgccaccacacccggctaatttttgtatttttaatagagatggggtttcaccacgttggtcaggctggtctcgaactcctcacctcgtgatccgcctgcctcggcctcccaaagtgctgggattacaggcgtgagccaccgcacccggccacaactgtttttcttaaactgaattcaccagcaaatcttctggaatctttcctcaaaatatatttagcatatgactacttcatgctacttgtactgttgccttccttgtcctttatctaagtcactttcatttctcttttggggtattgaaatcctaactggtcttactgcgtccagtcttattcattttccctcctgataggctcttttttgtataccatccattgcatccatttaaaatgtaagtcagttcatattgcttatttgctcataacttctccactggcttcttggttcattcagaagaaaaactaaagcttttattatgactttccaagaccctgcatgttgtgtcccaccctctccttccctaatttcctgccagtccctcactcattttattttaggcatactggccttcatattctgacttagctttaaaagaattactggctggtgtatttagaatagtttgtaggggtaaatgtaggaataggaagatcaattttgaggccactgcaataattgaggcaggggatggtggtggctttggattatgatggaggtgctgagaagtgaccagatttgctgtgtattttagtggttggactctcagatttcgttgggcccattttttcctctcaagcctcataaatgttgacccacactggaccaaaaacaacttataaatgatttttagtagcaaagacatggttgctgctacttgctccctatgtaaagttgcaaagttacctataccctcaaaattgtctttctattatctaaacccaacccctgccccaataccactggttagtcagatcctcatgatcaatccctttaggcagataaaaacacctcaatgcagcgttcaggcagctctgcacttccccaaattggctatgttttaacattacttttcttttattccctcattcaatcccacatgaaagtacacatgtcattcatacagatggtctcagataaatggaattgtgtgaggaaaatctttctgagtaagggagaatcttcccagtgttagaatgccattgtcttactttctctgattccttggcatgatgtttctgaattgttagtgattcctttcttgtaaaaaccatactgcttctactatttatagaggattatgatttattctcatcaggaattatcctaattattatggattttggcagtttgaggttttctgatgtagaataacatcatgtcttttaagtttctgattgtaatagtatattcagtttttatgtgtattgttgttatctattgtattctcatttccagaagcaaatatttatctgcctttcttcttttaaaatccttataagctgagtaaatttcaattattgtgaaaaagcagcatttcgtaaaatgttattagtcttttttcccctgtctaattggtgggggcctgatggaagagggagtttggaggaaggtggagaactcctaaagaccaaaaaagtgaacttaagaagtgtgcctgggagacgttgtattctagctctggctgtgctccacatagtttcatacttttgaagttcaacagaaatcaccttaagagaactggaagagaaagaagtgaaaagagtgctttgaaatacagctttatttagtagcttgctgatctaaaggttcttggattcatgagaatgagaaattatctaagagaggcctactgaattcttatctatagtcagtacctcctttgatgtagttagcagtaattttcaacttagtaaagaggattttttccctttaattacactttcatttgatttacatttgcctagttaggttagtgatgttactcagaattctgtaaatgtaaatcggactcagacaatttagcattttcttgatttctcttttttttatacaacaactatattcatagcaatgatttgtgtcttttgatgatatggctgtttggggaatgttattcttcttttcctaagtttttatgtggcaattacactgtgatttttacataacttttataagcaatttattacctcttccttaaataagtcacctatttttcacattgtcactgtggtaaccgtaactgttgggcagtgtatctgccccactgcagaatgtcaaccccagattgggccactagttttatgatgttgtatttttccacatggattctagaattgtagcttagccctcaatcacaccttggatatttgtatccaatagacaggaccaaaattgatttgcaattgaagagttcccagtttgtggaatctttttatttggcctcaggacatggaaattctttacctgaccagatttacctagtggtgttctgcgtagatctgtctcaggcaggtttagaggactcctggggttcagcccaaagctctccgtcatcccttgttaggattggcacacccactagttttttttctctttccatgtacttgatgtcagaaggactgaaggtgctcgttggggtgcaatgatgttttgtttgccttttgtgtttgtatacgtacatttgtttttaatgctgactttatattttctctccttttatttttacagtaaatacaatcaagtggcatcttaaatttttgctggaagtggagtcatgagactaaagatatctcttttaaaagaaccaaagcatatccttttaatgcttataaatcttattggattttcttaattatagtattgttaaaagtttctctattttatatcctagttgaagaatagattttttttttcattcctttagtggctgtttacctaaattgttttaaagtatttaagatcatgtgttgtaagtaattctccaaagtgaaccgtttgctataaatcttattttaaaattcttactgacgtttttcttactctacttaagtactatacttaaatacttaaaaagcagtttttgtttactttagtaggatcttaaaaagaagctttttttttttttttttgagacagagtctcactctgtcacccaggctggagtacagtggtgtgatctcaactcactgcaaccctctacctcctgggttcaagtgattctcctgcctcagcctcctgagcagctcagattataggcacccgccaacatgcccggctaatttttgtatttttagtagagacggggtttcaccatgttggccaggctggtctcgaactctcgacctcaggtgatccacccgccccagcctcccaaagtgctgggattacaggcatgagccaccgcgcctggccaaaatgaagcattttttaaaccaaactgtttctttgctagtgtgatctagcatgtattcattccactgtgctctatttctttacattcatgataaagtgaaggacaagttggggaaatctgagcagtcagatcctcattatttcacatgggaaggtggcaattaataatattttctcaaacacatgaccctatattttgtcagcaagagtccccagttatgtgtcaaggagatatgacaggccccactatcatcattcttagacatttagactaattctgctcaaagtatcctttgtagactttattgcaggtctgtgaaagaataggtaaataaattgaaagtaagggctgagaaatttttgtagcaatttgacattgttataatgtccaatttttctaatattttatttttattgtatcttacgaaatatccatatgcaatggattcgaaataaagaaaaatctggtccttcatcagaactaggaaagcactgatttaaacatttggtcagacattttaaattggtaggtgttttcatttatattatcttgtttgcttatttaactattaagtgaagatgtaattatttttattcccccttaaatagtttttactgtcttttcaaaaaaaatgtgctttcaagagttcacaccatacacaattttatagattttgaccatgtctactgtctgcctttacctttcaagccaaagaataacaatgtttttagactttcttgatctggcagtcttctcatttctacgataattttagttgacctgtgagtttgaagataatgtcatggacgtctggcatgtacttatagcaatttatataaggataagctaatgatttttggtttgagatgtgtacatatttgtttgtgtgagttttcttcctttctaggttttacctaagcttctcccattttaggttttacctaacattgtttaggcgacagcaataataatacaacagttttttcaggaatggtctgttgtccttttgtttagattgtgttttgagttttgagtattctggtgtctctttattacctttttgtgcagactcttaagatctttctataatctctctttatctttttggtttctgcttaatctattgtattttgaagtattaaaaaatcttggaacatcctagaataattaggcgcattgtctgcatttccttagaaaaagcaattgtattattgctcagataagacagtaaaagtattggtgagaaaagaaggaaataaaaggattatatcataacaataagaacaaacaactcaaccaggaataatctggcaatatagaaatccagacgtagcaagagaaaacatcctttgtaaataacaaactgaaatgccttttaggtacacaattctgctagggtaatcaccctgtcctgatggaggaagtgagggctacttgagcatctcagcttacatagaaattcttctgataaattagagctgaaaaaatgggttaaataaagtaaaaatttgagggatcatatctcatccagcactatgcatcttataagtgaagtaaattataattgaattatttcctaattttaatgtaggaaagtttggtattgtcaattaaaaataagtgaagaaataaaatgaaaaatttaaaaaaagtttggtaagattttagtttcagctgttaaaccataagttctttcctaggtgaattgttatgataatatgtgattgaaaaggatagcctactgttagatttcagtcttgttttgacacttgattattttttccttagcaaaagaatacatgcttattttaataacttacatgatacagacatatataaagaaaaaagtatagttccctttgctccctacctatcccccaacagttcagtgtagattctttgataccttttgatctactaagtctcttttgtataccttttggctttgtgtatagaatattgtataacacaagttttaaattttcatgtggtcagatcttttctcccccaccttttggcatctggatttctttcttgctttccatttttacaattcttttaatagatgcttattttcttttatatagaaaaaaataccagtcataaaatggaaaatacatttagaatcttgaaaccatttgaccctattttacttataccttataatctgcatctgtgaattattcattaagattaaagacttttgtatgttttatgtctctttaacatggtgacacatcaagaattagtaagctgtgtgggctggactactgctgaagagctgtattcatgtagtgatgatcaccagatagtgaagtggaacttgttaaccagtgaaacaactcaaatagtaaagcttcctgatgatatttaccctattgattttcactggtttccaaaaagtttgggtgtaaagaaacaaacccaggcagaaagctttgtcctcacaagttctgatggtaagttttaaataaacattatatgctcgccattgtatttaaaagacttaatagtatgatttatgctttgagttgttttacaaaactggtatttgtggatctgcatatttttatccacatattgtatttcttttctgaatagtcacttggtttgtgtatgggctatgaaattattgtcatggaagaaagttagtttaactggcatatactaggattgaatatgggtctttggctttaatatatatatatatatatatatatatttagagatggggtctcactctgttgcccaggccagagtgcagtggtgtgatcatagctcactgtagcttcaaactcctgggctcacacaatcttcctgcctcagcctcttgagtagctgggactacaggcacacactattacatctggttaattaaaacattttttttgtagagacagggtctcatcttgttgcccaggctagtcttgtactcctggcctcaagcaatcttccttccttggcctcccaaagtgctgggattacaggtatgagccaccatgcccagctggctttacttttttagtactcttatgagttgagttaagctgttatcatagttttagttcctaaattcttcaaatttaacttaatataaccacactgaaaagatatacctattcatttagtaaggtatctgttaaaatacatactttattttccagtacatgttaattttcagttacagagttgaagagttttataatttgaccgcagctttcttattggtgaataacaagtatgattttttttttcactttttaagggtatgtttttatatttgttttcttagaaatacgtgaactgttttcatctgtgttatactttacctgctgtttcaattaggagtacattgattgaaagtaacagaaacttatttggctaacttaagcacaaatggagttttttggttcacctagctgtaggggtagatcaagcactagttgcatcgggtccctgttctcaccatctcttgggtagactctctgcacatggtgaacatgatggtgagtatgacggtggccagtagcccaaggctcatcatactttgtaagactgcttcttcctcagtatctcgtgcaggcagcttgcagagggacccttaatgagcttgggtcatatgcccatcactgagtcaatcagtttagtcaagagaaatggactttgggaggctgaggtgggcgcatcatttgaggtcaggagttcgagaccagcctgagcaacatgatgaaacccccgtctgtactgaaatacaaaaaaattttagctaggcatggtggcacatgcctatagtcccagctacttgggaggctgagataggagaattgcttgaacctggaatgcagaggtttcagtgagctgagattgcgccattgcactctatcctgggcacagagcaagactccgtctcaaaaaaaaaaaaaaagaaaaaaagacaatgggacactgattgagcgtatccagcctcaggccatccacatgcaaaggaaaagagaaagagaagagggcttttgtaacctgaagatggaaaggatgttaggacaaacagtagtatcagattacaccttatttaccgagagacttgtggtagttttttaaaactttgtttttcagaaacttgattaaatgagatacatgtgtaaaatcacttggtagagtgcctggcacttagaagattggccctgaaccacagctagaatttagtttacctcaggtgataaagggagtgtttgacttaaacaattattttgatataattttgcatttacagaaaagttttaagaattgtacaaacaattcctgcatgtcctttatccagattcactagtttaacattttgtcccatatatgttgggacaaagtattggctctgtttctttttacacaaaccctcctcgcccccagcacacaccctttttctgaaagatgtgagagcagtttgcagacatgtacttttaaccatgaatacttcaatgcatttcctaagaataagaattttctgttacattgccacaatttgttgataaaaatcaggacatttaacactgatgcaatgctattatctaatctatagtttatatttaaattttaacaatcattctaattttccatagaagtttatttttgctggtataggataacatattgtttttgttgtgtctctttagcttcctttaatctggaacaactcttcagtcttttgtgatcttgacagtgttgaagaatatatgcctgttattttatagttcttcaatttgtttttgtctgatgtttcctcatgattagattcaatttatatgtccttagcaggaatactcggggcatcagactaggagatttatgatgttggtttgacccattattggtgatgttaaccttaattataagttaataagttcatgttcattaagttaatctctgtaaagttactatttattccttttaataatttatgaaaagatactttgagactatgtaaaaatattatcttcttcatcaaactgcctcccactctcttagcatctattgatgactcttggctgagtcatttattactaagatagtttgccaaatggtgatttttccaactccgtaatttcttccatattgattagttggtattctactccaaggaagagcttcctgtcccatgcccatatatttatttgtttttttggggtcagattagacttgtagattctcattttatttcataaatatattattattatcatttttaaattttgatgttaaaagtgccctagatttggccagtgggagccccatcaagccagctacagtgattttttttttttaaattttatatgtgttctcataattttttgagcacttccttgctggcacaagatgttccaggcttatcttgtactttcttagtcccagcccccaaatcagccattttccacagagacctgttctttttctggtggttgatggtatttaaaaaaacaagataacagtgctagctgtgctcattccaatggggtgtatttgcttcaaggccctttcaatggacagagctaagaactgtgaatataaaaccttgaaacaaataacataatagacatatgtatatagtgctatgataaatcagaggggcataaaattctgttgtgatgtggccaagggagggtcaagagaaatgtcaagaaagtcttccatttaagcacaattttgcagtctttacttttttttttttttataggctataaaaaagctggaaaaggtataaaggagaagaaccaaaataataaaatggataatcccaagtttaaaatacttgccttatataattttatactgtgtcaggcaacaggtagacaaaagcaagccacttagttgcagaagtatgtacatatattggcaaaaagtaaaaacactgtaaaactttaaaggacataagctaattatataagagatgtcagagagacaagtcaacagtgcaaagaataagtgatacaagaagccaagaaaggatcattgtggtttacgaatgattattaagtctagtaatatacagctggtaatttaaaacactttctcatccataggtgtggtatatttattggcacatcgtttctgaagcatagacatatacccagaccataggtatttaaattgtattaactaaatcaaaaggtttatgaatttgggtttttccctgttatgaacatgtataattattttgaaccacgtaagcatatgcattttcaatttattttaaaatatttaaataattttgtttttgtgcctattttccaatagatttatatgtgatattaagaataattataatgttaatatttgcctttatgcctttagtgcctattacttagtctagtagtaggtgctttgttgattgaataaataaaatagatttttcaaatgtaatttctttcaggtaaatttcatctgatttccaagttaggaagagtggaaaaaagtgtagaagctcactgtggagcagtacttgcaggaagatggaattatgaaggaacagcattagttacaggtaagttgtctgtaaaaatgacatttgaaatgaatattttaaagaaaaatttccaaagaaacagaatattttcatttagcaatagtgtctttcattgtgtaatagcaaataattggcatagtattgttctacactgctatataaatgttacaattcagaatgttatattaatcattttcttatgtgacctttggagactgttctgtcaaagaaggcttttggaatggtcacgtatggaataaataaaagttgtaattctttaaaatttgaaaattccaaatattctcatttaactgaccattatccccattctgtctgtttccaatcccctgccctactctaatgattcaacctattacattagttttctattgctcataacaaatgactcttaatagttagtgacttaaaatcataagcatatagtacctgatagtttctgtgggtcagggatcagtttaggtgggtggttctgtctgactcagagcctctcatgaggttctggtcaaattgttggatgcggcggcagtcatatgaaggcttgtctggggctggaggatccacttccaagatgtcttactcacatggttgttggcaggaggcattagttctctggctttgacaggagaccttaattaattccttgccacatgggcatctccatagggttgcttaagtgtttttaaataggacagctggtgtctcccagtgatccaaaagagagccaggtagaagctactgtatcttttgtagtgtaccctcagatattatactctgtttcagttatattctgttaacttagcaagtcactaagtacagcccacagtggaagagagggaaattaaactgtgcctcttgaagtgaagaataagaaagaatttgaggatgtgttttaaaaccaccatacctatactgtgggccttctctaggactttcctcagtgaattggcccttctcttacttgtatctttaacatgttttccaatggtttgtcagcatgtaaatatgttcggatgtcacccatcttaaaaattaagaagaaatagaaatccctctcttaacaaacagctctctctacctgcaactattttctttctccctttttcagcaaagctgttcaaaagagtagtctattacctcacttcattcagtccccaactcactggaatttggctgcagctcttcttattacactggaaacacttttcttagaattctaagatggagactgcagtgacaaaggaaacattatttgagtaatatacttacaagtcttctaagattgaaggaaataaaaattttcgtcatgaaagttaagctactttgataaaatcgtttcaacgtaatttctattaaatgatagttataaagtactctgtcatttaaactgtttctgaattttaaatatgtagtaatattccatgatttcaggaagcctagaagaaaaaagaatatgcggtagatactgttgattcttatatgcaaatttaatgtttaaatttattttctataggtaaaaatactgattaatttttttttccctgtatagttggagaagatggacaaataaaaatttggtcaaagactgggatgcttagatcaactttagctcagcaaggtatgttttacaattgacaatttcatttttgcaaattatacaatacaaaaatgccttaaagttttcctttagaaacaatctaatacggtggttgagactgactttggttgagttcaaaacagtaatctcttatattttacactgttttgtctttctttgcttggtacctgatgtaccatggtaacactattatttcaagccaagaaatataggaaatactcaagggcttttttttatgttagtgaatctctagaaaggcagttacaagctaaatattttcaaaaaataattgtgaaacgtttgaagcatatcttatatagaattggaggtctagttaagtaaatcatagtacgaaaagatattgagtatctccttacttaaaaatccccgataacttcataatattaacaccctttccaaattaagttgtatgtttgatttctatactgatggaggggaacagacacactaagaatctgaaaccacactatttagaggagcatcttaattttttatgttaatagaaaggagtggccataaagtcaatccaatggtccttcctattggaagttagattacatatgattttttctgtgtaacagattttcttaattagattttacataggaacagtaagcagttttaatgtttacctgagtatgtatcagctgatctttaggttgccaaaaaacttgctgactattcctcagaactatttgataaagtcatattgtgaaacattttcgataactgacttccaaaaatttccaaattttatttttaaaaccatgtttacttttaggataaggttcaaatcacttgcatttctttagctgtatattaactgaatgttagcaaaggtaaccagaaatactaagtagtatttcttttctaagcttaaatgtttgctacagataatctcaaggcagaatatttattcatgagtagaaaattcagagttcatagaagtagccgtgggtaagtttcagttaacagcaaaagtcaacttattgttactttagtaataaatgtacctttagaacataaatcttactttaatctcctagtaggcagatggatttacttttggcttcatagatttttcttttaagactcattatttgacattctcactttgtgacaaatgacttatgaataattgacagaattctttcagagatcactggccttttggaagaactacaagaatttcagctgctgttactactgagacagtgtgcagcagctgaagtgctatatccgtttttcctttcttttctctttcttctatcaatttgttgcctgtagatgacacagatcttcagagaaattctaaaagcccatcccactatccaccatggaagattttttctttttctttcttttcttttttctttttttttttttagacggtcttgctctgtctcccgactggagtacagtggcaccatcttggctcactgtaacctcctcctcctggactcaatcgatcttgccacctcagcttcccaagttgctgggagtacatgtgtagagccgggattttgccatgttcccaggctggtcttgaactcctgggctcaagtgatcctcctgctttagcctcccaaagtgttgggattgcaggtgtgagccactgtgccagtctgaagatttgaattctttcccgagacccttcaccagtgccctcccagtgcttcttccacttccttcaatttttctgttatctccttcccatttactacctgtggattcaccatttcagatgttccagagtctaaaatggaaacttggaataagttgtttaatataaacattgttaattgtttagtctatgtcaggggtccccaacccttgggccacagaccagtagctgtctgctgtctgttaggaactgggcagtacagcaggagatgagcagtgggtgggcgagtgagtaaagctttatctgtatttacagctgttccccatcacttccattactgcctgacctacacctcctgtcagatcagtggtgacattagattctcatagaagcataaaccctattgtgaactgtgcatacgagggatctgggtcattcactccttatgagaatctaatgcctgatgatctgtcactgtctcccatcacccccagcagtgaccatcttgttgcaggaaaacaagttcagggctcccactgattctatgttatggtgagttgtataattatttcattatatattacaatgtaataatagaaataaagtgcaaaataaatgtaatgcccttgaattatcctgaaccacccctacctggtccatggaaaaattgtcttccacaaaaccagtccctgctgccaaaaaggctgggaatcactggtttaggtgataatagtgctagtagtttagtgctatagttttcctgtataatgagtctggaaaccaaattgctacttattttattctcatggggaaaatgcattcagagtctccagacttggaaaggctggttggaagcacatgttcacaatgaagaattggagatcacaaatagatgacctctgagcttaatctggcccattagcatggtggagacccaatattaaaaatcaggacattttggccaggcatcgtggctcactcctgtaatcccagcacttcaggaggccaagatgggtggatcacttgagctcaggaatttgagaccagcctgggcaacatggcaaaaccccatctctacaaaaaatacaaaatttgcttctgcttttgatattctagtgatgaagctattgcctaatcccatgccataaaaatttcacttacagtgaaatttcagtgtttacattctggtctgtgattcattttgagttggtttttgtgtgcagtgtttattttagagaggggatggtgatgctcttcctctcactgccctcccatagatgggtaaacaagattttcttaaaaggtaaaatacagattataccatataatacagttgattttcttatgtattcatcatatcatgtaatgatattacccatcaacatttaaaatgtgttttccttaatatcaaatgactttgaaatgactatcatttttgtcctattttaattttattgttctcaaagtttgttaattatggattaataagcagaattaaattagatagatattcccattttggctaacctcttggtatttcaacagagtaatctgatacctttttctggactaagaattacaaacttactgtagaactatgcatctgatttttgagtgtttaatcattggtgccatctatactttcctcataaggcatagacttttcctttttcatctccggaaaaatcagtagagcagttaagttgttataatgacagtaacccaaaaggaaaggtccctaattacttataaaatttctttgatctattagagactgcaagttttgagggtgattgtaaatctgaactactgagagttggatgctaaaggctcaagtaagaaggccaaggcagctgggggtgcaagactactgcctcctttgaagggagaaactaaattttgacacaaaaatgaaataatataaacctgaattatcataaaatttggaaatctgtaaagtgttggaagcatccatgtgactttgtctatgtgtgttcattatacttatttcttgatgaatagagattaattcctgaattcatttcttgactattggagccagatgttcagatagaaaaagctttagtcattaacttctcttctaatccagaagatactttaatctcagttttgggtggggggatttgacttagtttaaaaatgattcttactggtatttatggggagtttattgttccttattagagaaaaataatatgtacaccagagataattatacttaggccatatcttttgtgtcattgttctagttttaatctctaattaaaatatataaagtaatgctgcaaacctttaaggacattttccccacactattttcaagtggaggaatagaacaacaaaacatggaacttgcctataatgaattcagttaaggaggtaaactgtaaatataagtaattgtggctgggcacagtggctcatgcctgtaatctcaacacttgagaggctgaagtgggcagatcacttgagcccaggagctggagatcagcctgggcaacatgggaaaaccccatctgtacaaaaaatacaaaagttagccgggcatagtggtgcatccctgtagtcccagctactcagaaggctgaggtgagaggatcatctgagcccgtgggcgttggggctacagtgagctgtgatcatgccgctgcactccagcctgggcaccagagtaagaccctttctcaaaaaaaatcaatcaatacaaattaataaataaataattgtaatacaaaggaatgtgcttaaggtgctgttggtggcaggtgggagtggaccagagggtggagattaatgttctggggagagtgaatgtattgggaagggttcctggcaaatattgcagcatcttttgaactgggctttgaagaatgaagaaatgggaaaggaaatgggcttgttggcattggagtgaagctgttaagaagcttagcatcataagaggcttagagacagaagaccgtgagacctaaaagtcaggtgagtgggagctaactccttgggccagagtgtaggccgtgtgaaggatagtactgccaaggggaccaaaacactgacagtcctggatgttaaaagaaggggtttggcatttattctataagcatacaaaacctttaaaaaattgaccaggaaagtaaagataatgccaatcttttagacagattcccttttcagtaataataaagttaaactagaggaggtagagattaaatagaggtggccagtaagatttcaaattgtctatgctagtaaggcagcgattaaggcttgaatagaggcagtgacaacagtagttggaaaagtggatagttctcagagactgagagggatgtaccctgtaagagtaaagacttcaaagagggataaattaggaaatatatgtggagggatgatggttttggatatgtagaacttgaagctctgtgatggagatctctttggatcaagtagaaatgtgttggagctcagaggtaaaggctaaaatattaatttgggagtaagttacattaagtgaaaggtgaagctatggggaagttgagaccccccaagggagaagtggttgaagatagaaacttaaaaaaaaatgcctttatttaaactttttcttgtattgatccagtgatatatgtaagcatggagcatggaattttttgaataaatcccacttgattaactattgttagctcatgtctcctacaaataaaatgaaaaggaaatcattcttcgtgtttgaatgccaatgatttggccaaaacagaaaaaaaaaaaaatcaaatggctactactatgaacaatacagtaagcaaatgcttgcttattacaaaataatttgtagtagttaacagatagtgctatatagtgccagactctattccaagtactttacttctattcactcaatatagaccgatactgcattcaaggcaaagatagctactgtaatttattagagtagtgaacagtttgtttcaaaggcattcttaaaaacatacaaaaacagcgtttttaggggatacttttatagtatgaatgtgaaaaacatggtatatttgaccatgtacttccttaaaacaattgaaatacatttttgtctcctcttctgtggtttaaaatgccttcaacaggttgaaagaatttagataatttgttttatggagagataagggtctgacatttaacacaaccccaggtgcatgtggtttcttaaaaaatgtcaaaaaggtcacatgattttagtgtacaaagttagaaaaacaagatctttttgagtgtcttagcagaaatggagcataaattaaaatttccaatataaaaagtaaaaaactatttattataaagctattttttgttttttgcccatttttgttaatgatgaaataaataacattttgttacataatttgctaaactctgttttaaagtaattcaatgcaaaggctaagtttgttatttccatgctgactttgcaaagcgaaacatagcactgggaataattcatgctttaataaatatattttaaaaatttgaaatataaattttttaaatgctagtggatggatttcataataatacaaattatttcatgaagctgattcttccacttttaataatgatctttattagaaccacccaaattgaaagttgtatagctatgtagtttatttccttttagaaaagaaaatgtttatatgtacagtagtttaatgcttaatattttaagtgtaaggaatgattataataaagatcaaggtttttaatgtgatatccattttgaatttttaatggttaaggagagtaactatgagtcctgtctattgaccatgcttatttatcataaataaataatttatttgtttccattgcttgtattttgattgaaggaatgtggttaaaaaccacatgttataacaaaggaattacttaactttttctttataagcttattttcttttattatataagttatacctgtttctttaacattattgtttacaaatttgttttataagcaggaaatgaattatctctttgtcccaaaagggaagataaatactatgaagaaaggttcataaacaaggaaatggtgtcatagctgacttaatgggaccacaaattaaatgttaaagttaagaggactaaagagtccttagttcctcattctgtaccccaaccgtgccttttaccacaactaaagccttaaagtcacatcctgtataactcaatgggagttgtatttactgaattatttccttgagggtagatgtttgtcacagtttggtatacacgccaggaaagtataattttactgagtgtatttatgaagatttgataggctataaattaaaacattaatttacttttttgtacaaaaattataactataataatggaaataaagatggcttatataattctacaaccttagctagtaagtccctgtcactcctttccagtcctcaccaagaactacatttgaaatatctgaaattttgacttctatttttggggagtttattaaggttaaacttcgttcatttggagatttatttttgaagtacaggtcaactcctggctactcccagagaatattcccagaaaatatactcatcaagtacagaaaaaggaggagtaccttctgaggttggccatctcatcaggaagaatttctgtgggttcctttgatacagaacaatccttgatgtcattgactaaacaggatatttagacattttataacacctgaactgtggaagacatgtttcagggttttttttttttttttttttggactgggtctagattagactttctaacctgtataaaccattgggacttgctcacaattgaattgtgtttttattagggagaaaatagcacacaaaaagtagggtacctcttaaacaaaagcatttgtcttactgaaatttattcagtaagacattgatttattgattatatcatcagttgggcttttcatttgaataaacaattaaattttattgattgcccacaaaccctgaaattcagatttcattctactaagaatgtaaattccttaatgattcattcatttattcattgattcgttgattcacagaaagtcaattactacaatagtctgatttaggagtcctagacaatttttaaaagatggttttgtaaatatagttgggttactatttcatagattaactacataaccttgattcacctgcctaatgactaggcagctgggccgggcaagtggaaaacagattatttactgccgtataaccaatgctttcaataaatatgatagtcattttttaaaactaggcttacataaagtatagtcttccagaagacattaggtaatctagaaagtaattaaggtaagaaatactatacttaaatgtaattgattttaaaaataccgtctctaaattcctattggcaattgaaaacactatcaagtgtaatgtagtttatagagtggtaggtaaatcaaacttgtacttttcctctggaagtaaactttatgctagttataagatattggagctttttttagccaagcttttgggctaaagccaaacctaatagataacaaaattttccctaatctgatataaaaaaatttgccatttgtgaattcatgagtgggaggttattagattgtttttggatgaagttatttctgtccattagtctgctgcttaagcagcatgtgaggggaagttctattgcctgttgtagcatcaggtatgataattaatttataaggtgagtataccatttgtattttaatatgtaaaatttaagttactttatgcattgagtcagtttaatactgatggctataactccattgctgggtatatacccaaaagaaagaaaatcagtatattaaagagatagctacacttttgtgtttgttgcaactctgttcacaataccaagatttggaggcaacctaagtttccatcaacagatgactagataaagaaaatgtggtacttatatacagtggagtactattcagccataaaaaaaatgagattcaataatttgctacaacatggatggaactgtagttcattcattatgttgagtgaaatgagccaggcacagaaagacaaacattgcatgttctcacttatttgtgggatgtaaaaatcaaaacaatggaacccatggagatggagagaaggatggtaacaagatgctgggaaaggtagtgagggggttgtgagggaggtggggtggttaatgggtaccaaaaatagaatgaatgaatgaataaggcctagtatttgataacacaacaggttgagagtacaattggattgttcataacacaaaggaaaaatgcttga

SEQ ID NO: 334 - DNA, 32742 bp, Homo sapiens
  source 1..32742: mol_type = other DNA
ccctcttctgaagaggcgtttctggaccactgagccccgcctcccactgtgagcggaaccctaccgtttttaaaaaaatctttttcaaaacttgccaggttgtctttccaaatatttttaataatagtgctgctgctgtagaccacagagaaaagaatccctcgctcttccttttcacttagtagaaacttctaccgcgtaggtcccgccaggagttcgcgcatgcgcaggagcgacaataagatggcggtgataatcgccgcactttttttcaaattagtggatcccagaaatcattgcgcgcatttgtaacgaatttccgttcgagtttgtattttaggcgccattttcgagtgaaggacccggagccgaaacaccggtaggagcggggaggtgggtactacacaaccgtctccagccttggtctgagtggactgtcctgcaggtaaagtacttctcttcctggtcaggttgtcacgctcttacttcctgccttgtccgcgagcgcctggaaaatagaggccttgagcccgagcggcgaagtccgggcttgaagctgccgctgggagatttctcttgctgtcacccctcccccctcggccgctccccggcggcccgggctcccgcgcgcagctcccgggcgccacttttccaagctactcaaatgtctcggggaggccctgagcctcgcagatcttttctttaaaaaatcctagtctctatctggaaaagggcgtctccccctacccctcttccttctgccaacggactagtcaccgggtctcagccttcgctggtgacctttcatggtttactgtccaacgggactccgcctggggagctggagagacaaactcttgccactccaaaattagcaagcgctgccagcgtccgacttgaagttgctagtggttagtcccagccttcgcccttcgcggtccgaccgctgagaggagggagacttcgttatgccccgggccgtcaacggcgccaggagctaaagggcgggcagacgaaagcgggcggcgagtcgccagttagtcttcaccgctctggagagagttgctagccacgggatcctgacccggacacgaactcgtttctccacgtcggtgcgcgcttgcatccctggccccgaaagcgtgggaatgtccggaaatgctggcgtatgggagttccttaattagaaatgcgttagcgaatattatacgcttatactatgggcggacgggtggagagccttaaaaacaacaacaacaaactaagcagttgctcaatcgttgattgatcctcaggcacgtctagattttcccacttacataggtcttgttaagaaaccagtcctgccttcttgccactcgtgtctttcgatggctcccttcccgaagtcccgctgcctctaagcggagtgttaagcggggctctcggaagccggtggaccgagatttccccgggtggggcgggcgcggtgtagcggcccgcgggctgacttgctcccggctgtcccccggccccagcgaccatgccccgtaaaggcacccagccctccactgcccggcgcagagaggaagggccgccgccgccgtcccctgacggcgccagcagcgacgcggagcctgagccgccgtccggccgcacggagagcccagccaccgccgcaggtgagtgacccgccgcgactcggcgggaacgcgcgctgtgggactggcaggcaaacgcgcccagcccgaggctggctggggttgttgagcgcggagttgacatctgaaggtccggtgtcggtccggtagaggctcaggaaagccatttggcaactttgagataggattcccgtgcaattttggtgtaacggcgctggaagggatgggggcgagcaaacgggttcagttgtgaatttttgtttgtgacctgtggaatggtacaggtcacaaacaaaaattcaatatctttattgtattcccgctaaaatcgagacggtcaatcaagagagcaagtggacttttttcccagagacaatcaatatgactatgtgagcatgatgaaaagttttttgaccctaacctcacctccgtggtgttagattgccgttaaagagaagacgataatttatttgaagccactgtagcttttgtgagtccaggagttgggtgacattattaaaccctcgtggcagtgtcgctgaagttcatgagtttccaaaatgaaggttccaggtgctcagcggtacggagaattgcatctagagccttaggatttaacctcctgtttaggataggcagcaggaaatagcttgttacggttttcccagatttgctctatgatgtagtgttttgactcttaagaggtataggtgtatagaattttgtgaccggtggcatttctttcaagaatttcttttttagtaaaaccaagctgaaggtttagtcacccccgtgagtttaagataataacatatttaagtggaaaatatagactcctaagtttcataaataacatccctccatcccctactttaaagatgggcagtcattagttctccgaactaattgcactaatgtaggcttttcccccgccgtttgccttcgttttcctttcctttcactgacttagagactgcaagtgaggaacttgataatagaagtttagaagagattttgaacagcattcctcctcccccgcctccagcaatgaccaatgaagctggagctcctcggcttatgataactcatattgtaaaccagaacttcaaatcctatgctggggagaaaattctgggacctttccataaggtatttgtatggaaataactattttataactttttaaataactattgtaaggtaatacgtttttacaagatgtttcagttttgtaactatcctaaaattcattcactccctatttatcctgatagtctttctgtctctctctctcacacacacacacacacgtttcatatgattttaacactgaaattatcttttgtttatctggttatctttggtacctctagttacaaagttttccattgaatggagtcggtgtgtgtttctgtttgaaagagtattttcccttggataatttttttttcttaaagccttctatggaacccttagataatttaactataaaatgagttttctaaaacgtctgcgttagaattggagcattcttattgaatgttgaagcttttaagagagaacttgatgtaagaaaactcaagtcgtatgcctgtgattagcaatgagaacttttaaatacttgcagtttttaactgcaagtaaaaaaatctaacagtttcagttaaaatcagtagtattagcatgaccttatgaacttttccgtgttttgtttttgtttttttaatgcagcgcttttcctgtattatcgggccaaatggcagtggcaaatccaatgttattgattctatgctttttgtgtttggctatcgagcacaaaaaataagatctaaaaaactctcagtattaatacataattctgatgaacacaaggacattcagagttgtacagtagaagttcattttcaaaagataattgataaggtaagggatttttactgttattggcaagttcaagtaaggaaaatggacttaaatgcattacatattttatttttggctttaagaaatttgtatgtaattacagcggaaagcattggtttcattatctctgaccgtattttattttgggggagtggtggtgcctgttaaaatacttattttttagctaaagaaatgaagtataaatagttcatagtaatcctttttggaataaaagcattgagcagttttagggtcctgagtactaaataggcattattttactataaatattcagttcatttttaaagttatattttgattgctttagaataaattagctaaacttgaaaatgtagcagttagccggttttaccatcttcattatttcagtgcattttaactctaatgttagtggcccctgagtatctgtgatatgaaagagctttgcttcagtttgactactgctgtaattaagtcctttagaaatgggggaaggacaagctaatgtttgttttctagaaatggagacaactagaggtaaaatgtctagattatttacctgttgagactttttctcttctgtttaataatgtaggaaattgattgttcaaaaatgactcgatggaacctaaaaatatagaaaactaattacataatgaaattgggaggtgatttgtcttttgaattcgttttcctttttttaatacaaagtgctttaattacacagaatcatctattttaatttggtttcttttgtgctttctattgtacaagttgggttggaaaatagattgccaggaaatcagattttattccattgcatattaattacatttgatttatctaaattttagaagcctttgcttcagtatgacagaacttttaaggttaagggaaagtgttaaagtagatttgcaattgatttttttaaaaatctgtttaaaagaaaatcaagggaatttagttgttatttctttgtgattctttttactttaaattaacggcacactctttaccctcccacacaaaaaaactaaagtgtatcacccggttactaccttccttcctttttctttgaatcatcattttaaaaagctgcagctttttaatctgtcaacatgttaataatttgtgtgggttttggatatggtgggaatcttgtctacgtcttctcaatcataaacgtttttaggcttgtttggaggtgggttttttcgttggctggttggtttggcttcttgatttttgtgatctttgagaaagggaccaaaacagcatggaaaagtatcaattctttgctaagttgggttattaatgagaactactggcagtttgtgtgcatgttcaattgaagtttttaatccatagaattagtttcagtatgaaatgagtgaattttgaagtaggcctatgacttaataccaacaattgttttctggttttgtttttcctcaaaacaggaaggggatgattatgaagtcattcctaacagtaatttctatgtatccagaacggcctgcagagataatacttctgtctatcacataagtggaaagaaaaagacatttaaggatgttggaaatcttcttcgaagccatggaattgacttggaccataatagatttttaattttacaggtaagtttattaaagacttcaaagattctcttattcttgttacttttttttctataaagctaggttggatgaatcctacatttttgaggccttaaagtactgtagcagcacatcatggtttacatgctacagtcaagatgcgaatcattatttgctgctctagaaatttaaggaaattcattcaaaactatgttttcatcatcagatgttcgttttatgtttggatgaactgacatacttgttccactctagcagcacgtaaatattggcgtagtgaaatatatattaaacaccaatattactgtgctgctttagtgtgacagggatacagcaactattttatcaattgtttgtatttccctttaaggtaacattttaaatgaaatgtattatattttaatctatccttttcctttgtttttgttcttattatctcttctgatatataaccaaaaaatgaaaaaatctgtacacttggtgtttgatttacctaagcacctagttaatttaatctttgtaacactttggatggttaacttaacctttactcaagttggtttttgttttgttgaaaatgacttacttggtggaaccactactactgaaagaacgaaactttgatattacattgttaagtatcagagctgttacagagcaagtccttttaaagagatgtaaaaattaagtacctgtgccaaactgatttttattagaaaccctgttttctttaagtaaaagtatattctaccagcatggcttggtaagaaaaatcccctatctttttttccctgtcctcaaaattcagaatttttcggaaaaaaaaaaaattagggtaaaaccatggctttgtcaagttcctgtttgattcgagggtatcttcttttcctgtgttctatccagaatcaccgaagcataataaaagcaaaactattttgtgatgcagaaatgactgaaataagtagggaattttgttagggtgactggatgttcctaataacaaacttataaaatgttagcctctgtttccattttagtctttattcttcaattgtttctaaaaattattacttttagacattcatagtatacaaggtaaatcagtatcattctaggataaccttttttaatatcttttgttaccaggcacagtatatttgcaatacttcaacctaaacttatttaaaaattaatgttgaggaaattaattgcagatatatttctaaacaagattggaatttatagaatgtggcattaaaggattttgtgtgtttttaaaatcaaattgaactgttttattgacttacatattctgggacttggtttggttaataatggataaaaagttatgtccctatataatactaaatttgatgatgataccaatttgcaggaaattgtacttatgtttatcttttgcttaatcttttaccgtcatcctgggataatcaaagttttacatttatccaaagattcatcaaaatacactgcattttaacccttctaaggataatttttttctctgtacagcatctctgtacgtaattcagtaataaaggaagctaatgtaatattgtcccaacgaagtaaataatttataaattgtcaaatttatattacatttgtgcttctgaagtatatgggatgctaaagccaatttgttcacatgataatctgaacctttttatgtgatctttacaattgtttaaaaaacatttcttcccaaataatacaaaggtgaatgttccaagttaacagattcagtttgactcaattaaatttatagataaggaccttaggaactcacttgttaggaataagaaacagggattggactacggtagaactaatagtgcccaattaaaactttgagggaaagtgacaatggtttctatggattgttttttttaagtcgcttatgaaaatctcagactcctaactggcaatttaaagcatttgatggtaagtaaaaatgtgatttttattaccttctctcctactgaataacatctatcttaaaaactgatttgggaggctgagaaattggaaacagcatcgtagtatcaacatccaagacctaaatcattacttggaataaaacatgtagactatttggccagtaatagtgattaacagcaaaagtaatctaaatttagtaaaaataaacatttatttttgagattaaaaagaaccaaattttttagaagttcctaagagtaaaatttttcagtgttaatatattcgcttagcaaatttttcaagtaggcatttttattacttaaatccattaaaaatttcattaattggccattcaattgaattcctattaaggcactatgctaaaatgctgtaagtaatattaagatggctaaaccttatttcttgtccttaaagacacatacatgccttcaaaaagtttgttgtgattgaccattgtgttttttataatcgtacattttcttttatatatacctactttgggagcctcggtcccgttgtaagtctgtacaagtagagttttattagctctgtataacatttcttgggtaactatgacttataaattaggggtgcttttgctccattcaggggtagaagaatggttaatgtttttactaaaaagttgtattaatgattgctgcctcaggaatatttttgtaaactcctcaaaagctacaactattagcacaactttaattttgtcaaagttttcaacttcatatgcttttgtcttcatattacaaaatctaaagtttgaaacacgaaccaggctgggtgcattagctcacgcctataatcccagcactttggaaggctgaggcaggcagatcacttgagcccaggagttggagaccagcctaggcaacatggtgaaactatgtctctatagaaaatacaaaaattagctgggcatggtgacacacccctatagtcccacctactcaggaggctgaggtgggaggactgcttaaacccaggaggcagaggttgcagtgagccaacatcgtaccactgcactccagcctgggtgacagaccttgtctctaaataaataaataatagccaagttcttttttttttttttaattattttgtaatttggagatttaattaacctaggtctgagttgttgcctagccatctgttcttttttccaatgtacttctcttaagcttgtcacataaactacttgggttctagtctcttagtctgtagaaatgagcctatgctataatatcaaaagaaatttttagttttttcagtaatgcctcagttttccaaaggtgtctgattcaatatccacaactagggtgaaggtggtggagagcagcaaggaagctacctctaaccaaccagaaatagatatcaagaagtccagctactaacaagttactctttctgttttattttagaaagatactaaccttggtggtttagttccttggcctctggtagcttacaaagatcaaattagagtaaaatgtattggaggaagataaagaacactaatttatagtatagtataataaaagatatagaaaataaaaagatgatcaagataaaaacttaaacctcagtaattttaggccatttaatttttatgcaaacactcatatttgctgtaagaatcactgaaaccctccttcatagtaattacaagtaaaaataaagagaagaataattgaggccttactaggacaacaaaactttgttatagctatgtactgtttgagttttctgtagttgatgcttgctaaaatttggattacatttgaataaggataaagggcatcatacctattcattcctcttagatttctaagctgtatttcagtaaattgattctcaaagagtggtataactggatcataatatccttgtttgccactcaagaaagtgttccataacttaagataacagtggtgggaaaaatcatttaagaccttgtttcatatgctttaagatacaagaaatagagataacactgggaacatatgaaactttgtcagcatcagataatagtgttgtagcgacttgaaacattttttgtctgtgattgtgccagtcactatttgtgacttggattgaaccttgatatgactttaaattcaggttgatgttttaaaattatttctgaaatatattgagcttattgccctaaattaaaactatattctgtaattttacatgagttatgtaagttttctgaagaaataaggaggaatcctttaggcacagactgtcaatctacagattacataggagatggcacaaatggaaaaagaaggaagaaaggaaatggtagcaagtggtagggcaggcaaaggacatcaaagaacagagcaacaagaaaagtcccaggttgtcattgtaataccacagtagtcttaatagtcaaaggacaagtaaaggcctgttaatagcctgttgattcaataatgctaatctgataatatggtaactggtttaaaaaaaagcaatacggtataataatcttaagactgctgtaatcccagcactttgggaggcccagacgggcggatcacgaggtcaggagatcgagaccatcctggctaacacggtgaaaccccgtctctactaaaaaatacaaaaattagccgggcatggtggcgcgtgcctgtagtcccagctacacaggaggctgaggcaggagaatggcgtgaacccgggaggcggagcttgcagtgagtcgagatcgcgccactgcactccagcctgggcgacagagcgaaactccgtctcaaaaaaaaaaaaaaaaaaaaaaaaaaagactgaatgttatacaggagttgagatgtaactattttgctttgtaaatatcctgcctttaaaaaaaaaaatgctcaactctattagaggaaatcatagctgtatctttcattttatttggagagagaggaacaaacaaccaaaaatgagcaaccattgttatttacccaaagctaagctgtttcttaatagctgtactctatctcttcagtaagtaatttgccaggagaaatacaatgtttttaaggaatatttttgtcagcgtaaactgttaaacactgaatcccaacttttagctatctgaaaaatgtatacttaaataatacattatggccatttgactcaaatgtaagttcttttgggatggtttttcattttcttaaaataagtgttcagatattctccttgaattgggtagaatattaattgtcagatattgttttttatttggatgataaacactaacccacaggatttaaactacaacttctagactaggcatggtgggtcatgcccttaatcccagcattttgggaggctgaggcaaaaggatcgcttgagcccaggagttcgagaccagcctgggcaacatagagggaccaccatgtgtacaaaaaaaatttttttttaaagattagctgggtgtggtggtgtgcatctgtagtcccggctacttgggacactgaggtgggcggatcgcttgagtctgaaaggtcaaggctgcagtgagctgagaccacaccactgtactccagcttaggtgacagaacaagaccctgtctcaaaaaaataataaatgagtgaacaaacaaactgcagcctctagatcagtagttctcagctgacagtaattctgccccttttcccataggacattcagtaacgtctgaagacagtttcggttgttatagctggtagaagtggggatgctactggtgtctagtgggtgaaggtcagaaatgctattaaagcatcttataatgcccagcatagctctccacaacaaagaatatccagcccaaaatgtcagtagtgccactgttgataaaccctacgtagatacaaacttgaataagactcttggcttcctcagtgacttaacgttcatcctgtgtaatccaaaggtttgggcatttttccaggcttcaatcctgtctaaaacttaaactcttgctgcaaacatttagagagaactaacagttgaaagcagaataaaatactttatataaatatctacatattttcacttatataccgattcatacataatataatgaatgttatggaaaataacttttggggtaacagttttactttgataatcattgtgcttatagactgtcagaagtatcgaaaagtgatttatgcaaataaaattatttcttaatgagtagattttcaaataagctgttttgtccactgttattgaattgtttactttttgtaattatgttgaggcttttggtgaattatgatgctctcattagtaagttttaccccacatttttaaggttcacctgtattcacttaggaaataggaatcactaagatatttgaattaagaaaacaatatactatttttaatgtgtaattctttttgttgacttttttcgtctttgctattttgttgaaaataagaggtatatcttttttcatttgcctgtacctattcttccattgtaatagtctagagtacaaacaagctactcctataacgtagcagcatttggcctgaacatactcagacacaattttctctccaccatcaaactaaatgactgcctagcagtcagccttgatggttacttattatggattttttttctctttactcttcataattaaactgcataaatgcaaatatgtaaagttaatctaagattttaattacagttcaaagttgttatattagtgattacaaactgaaagttttctgatgtcttatgtaccagtgccattagttttctctagtcaaggtggtctgtttgatttctgttattaccatgagaaataggtaatatccttttctgtcaaaggctcttgtttttagaaaactgaacatgtaagtttttgactacctttgaaacccattacttgttaaggaactcctaaaaaccatgtttgtagagaaagttggtaatactactttgggacagggttcctaacacagtttaaccatgcaagtgtttttgaaaattctttgttttagaacaggagcttcaattgtgttattaacaattgataatgtttccactataatcagattgcagattaagtgaaagctttcctaaattttacttaaagaaacaagttttatttatttatattgaacattctagttggggaaatgagtgtgtgtaagtgggtgtatattacacttttataaggatttatctaagggaatataaattcatgtttcatatctccctgtgtaaaattaaaactcttaggaataccagtgaaaataacatttttatttataccttattaaatcattgcactactaactgtacattatttagatgtttattactcttggctttattatttaactgctcccaattctcacttaagattgatttagctaaacatacacagtgagtatgaaatataacttttttttaaagggtgaagttgaacaaattgctatgatgaaaccaaaaggccagactgaacacgatgagggtatgcttgaatatttagaagatataattggttgtggacggctaaatgaacctattaaagtcttgtgtcggagagttgaaatattaaatgaacacagaggagagaaggtgaatcatctgtagactttcattgtaaatcagaatgtttcatttatgatctaacaaattttagtaagtcagatattcatgttataatacttaatgaagaagtgttatattgaaatttatatcttaacatttaagatgaacattctccttattaactgtttttatctaatgtttgcatattttaagttcatattgtacatatgaagtgtgtattcagtctttaaacttttaatttctgtagttaaacagggtaaagatggtggaaaaggaaaaggatgccttagaaggagagaaaaacatagctatcgaatttcttaccttggaaaatgaaatatttagaaaaaagaatcatgtttgtcaatattatatgtaagtgccttgattgatattaccaatttttatattagtttttaaccattaagtcaaagcccttctcttttcctagagaaacatgaagactgaagtgaaaaaaaatctctaaatattgttttgtgtgactgaatgtgttagctcatgcctgtaattccagcactttgggaggctaaggcaggaggatcacttgaggctgggagttcaagaccagcctgggcaacatagcaagaccccatctctacaaaaaaaggaattatgtggtgaacttatccaatgtgaggactatctggctgtgacacctgtcatcccgttgatcaccagggttgaatttattaaattaggcatattaattcattgaagttgactttttagtatcctgctttaagttgggaggtaggttcacaggtatttattactgtactcagtccttttacgtgtgcactttttaaaattcgtgtaatagcagatctgatttttttcagcttatgatgaactgttttttgagatgggctgtttcacccagggtggagtgcagtgtgtgatcacggctcactgcaatctcaaccttccggactcagttgatcctcccacctccacttcatgagtagctgggactacagggcacacaccaacacacctggctaattattattattattattgttgctgggatttttttgtttttattttttcttttttctttttttggtagagatggggtttcgccatgttgcccaagctggtctcaaacttctgagttcaggcagtctgcctgcctcagcctcctaaagtgctgggattacaggcgtcggccaccacattggtacaatgaaatcgatttttgttcctaaattctagccttgacccagggggattttcccctcatagcctaggcagtcatatattgactagttaataatattttagaaacagttagttttactaaaattgttatacagttttggaaatggcattttaggagcttcaatttctttttttttttttcctccctatagttatgagttgcagaaacgaattgctgaaatggaaactcaaaaggaaaaaattcatgaagataccaaagaaattaatgagaagagcaatatactatcaaatgaaatgaaagctaagaataaagatgtaaaagatacagaaaagtaataatattttgggaagtactaaaagtatttagataattgtattacatgtgtatttatatataaagttacttctagcacattgtgagtgtaagacatttgccagcatatcaagtggtggcccccttagtgaaaaaaaaaaacttgccttgcatccagttccttgttacagatgaaattccctactctgaagtcttagaaccgtggggatgctaccccctagtggcgtagcacagtaacaaacaataagcatttggcttcacagtttaatcttttagtagtccacaaatctgatagagggataggatttgggtttttctagatagatttttaagggttttatcatgtccctacttgatgccatttttcaatgacactagtatctctaattatttttaaataaaaaaatttgtatagtaagtttattgtatagtaacttgtaagtatattcgtaaaaggtaaaaccaaaattttactcctatggtaaaatttttatatacctagacattgtagtcactggaaaatgtgttattttccctccaacttagaaaggcaaaatagctgtcataatcaaaaatacaggtgcttcttcaactatggggagagggatcatcttggaataaggagagttttaggatcctgccttattaagagcctggacatatttatagaggaagtgttccaggtaggaaatgtggttttaaaatatgtgcacattcaaaataatgacttacaatatacttgctttgctaggaaactgaataaaattacaaaatttattgaggagaataaagaaaaatttacacagctagatttggaagatgttcaagttagagaaaagttaaaacatgccacgagtaaagccaaaaaactggagaaacaacttcaaaaagataaagaaaaggtaggtgttagaaaaaaattcttaaaatttcacgtctgaatatcatacctagttttcatggatgtgtttgccccttattgcctaagagaatgaattagtattctaaatgttgttttaaggtttgtctctgaacatgattttaccccctcaagggaaaccttgcttctactgactttattttgcaggaggttttttgtttggttttggaattttgcagagatggggtctcagtctgttgtccaggctagcgtgcagtggtatgattatagtcttgaactcctgggcttaagaaacctacctcagcctcccaaagtaacgtggactacaggtgtgagccattgctcctagcttgactttgagttttaaagtttatattacaataatatgttattgggaaaacatttaccaaatcaggagttccattttggtgttaattttaattttctttttcctaaagtagtagtttttaaagatatttaagttaggtattacagacttaaaaatattgcctgtcttctacaaaaactaagctaacaggatcagagcaggatttcccaagaattaccaatgttggccaggcacaatggcttacacctgtattcccagtgctttgggcggccaaagttggagaattgcttgatgccaggagtttaagaccagcctgggcaacatagtaagatcccatctctacagaaaatccaaaattagccaggctcagtggaacttgcctaaaagtcctagctagtcaggagagtgaggcggcaggatgccttgagttcaagattccagtgaatagtgatcaagccactgcatccagcctgggtgacaaagtgagactctgtgtcttaaagagagataggaaagctcataatttggaatctcttaagctgtgttcatgttcatagctctgtcatatttaaacagatatgataccttaaccccagccccgcaaaaaaaaagctttgttccatatggttacacaataattatagattaggctctactttacgctataagcattttctaaatgtatttgttcacaaaatactttctgcttagcacagctgataaatacgttgagtcagtgtttaaggaagtggcattttgggaaatgttgaacttcacaggtactagataatcagagtaaacaaaataacaaggctttgggggtaaccccaaagacttgacagacttagctaagtgtaactgttacagagtgattagcctttaggcatagactgcatggataagtgattattatcagaagatgttaatggagtaaaatattagccctacatgatgactctggaagagtaaagttgtgaaagattttagggttggggagatggtaaagataatttgtggtaagttatgatataccaggaaggatagtttagaaaattccgtgtagtcagagcatatttatagctaaagaagaataattacaacctgaaatcaggagagaaggatgacagacctgaggccctgccagagacagttttccttcataagaggtcaggtgtttgtagaagtagttttactattagattgagagaatatagaaattacagtgaatagtcgggaaaatacttgttaaagctagctaatttaactctgattataaagaaaagaagaactagaggaccctgagaaatgcctttaaatatgtcaaatattgatagtattgggtaacataaagatgtatgctcctataacttgttttataatctcaggttgaagaatttaaaagtatacctgccaagagtaacaatatcattaatgaaacaacaaccagaaacaatgccctcgagaaggaaaaagagaaagaagaaaaaaaattaaaggaagttatggatagccttaaacaggaaacacaagggcttcagaaagaaaaagaagtaagttttttttttttatcagtgtttattttggtggcttttttttttttaacttaaagattattttttcaaaaatactgaaacctgaactggtaagtttggacttttaatgtccaacattcctaaaactagtcaacctagacttagatgactattcttttaattcctgctgacatgttttttaaaaagtttactaaatgagagtttgtagtagtagcagaaggtgtgatgtcaaatacagtaccttgattattatatatgccactcctaagcgtgttgaatcatcatattttgttgccacctgtaaaacctggagccacactaagcgcaggttaatgtctcttttgtttttgcttctatagctcttgtgtaatagttaaaagctgtggctcttgtttcagttcttggttcaaatcctaggtcaatcacttactgtctctgttcttgtgccggttgtcatatctccaagtcatcttccttaaaatgagaaagaatatatctactttgtgaaaataaagaataaatatatctatataacgtactgagaaagaaaataaatgttagctataattttagcattatattaataaaacgagagcatgaagttgtcacattgatatgtattatctaccccaacaagagtaagcataaaattatctttgtttgtatgtaccacagcatttttgacagtgctaagcatgttaaatacctatgttaatggataatggtaattgactgcattaaaaagtcatggtagagtctgctttggcatatcaacatgttctaatgtcaaactataaaacttaacaggttagaatacctgtgtgatgaagtgtcacttaatagagtctgctttggaatatggacatgttctaatgtcagattataaaactttacaggttagaatacctgtgtgataaagtgtcaatggataatgcagtagctttcatgatgggatacttcatagttagtggattttcactgtttgcttatttaatatatattgagtactcatgtgccctgcaccccatgttaatgacaaagctaggcctcaaatgtctttattcctcagcgtaatgatcgatctcacaaagctcttgtgaaatcagttgggaaaagactatgtacagtgaatattgacaactaggcaaaaactgaatctagtccacttgtgagaatttcttatttctatatactgtgcttatagaatctcctttcttaaatcgaatataaaatgtatggtttcatttcagtgtaggtttgaaagtaaatatctgtccagatttaatgaactcatattttaacagagtcgagagaaagaacttatgggtttcagcaaatcggtaaatgaagcacgttcaaagatggatgtagcccagtcagaacttgatatctatctcagtcgtcataatactgcagtgtctcaattaactaaggctaaggaagctctaattgcagcttctgagactctcaaagaaaggaaagctgcaatcagagatatagaaggaaaactccctcaaactgaacaagaattaaaggaggtaaatctttgcttctctgttgcatcagaacatcattcgtccacttcagctttatacatttttgtttttaatctccgcgtcagaggtgactagtgataaattttcttcattttgtataatctcaaaagaatgaggtcagcatttcagtattccatatgtgaactgagactatcaagaaactatattatccccagaagcaccatatagtaagtaaatcaccaccaccaccccactgtagaaataatttaaacaaaagaaagtttgtgtttctttaaatcttaagtatagacaatttaaagataaataaaaaacaagtgtatatgtatttatataatgaatatacaaacaactatcttaatgtgttttgggttttgaatttatggatgtagtttctttgcttgcattccaaaatgttataaactaactaagatgtatagcttatcggtgcctgtcccccatccttgagtgaattagatgtctaaggaatttcgtaaactttaatctccaaagatctccaaaacctcagtaggcaaggtggcaataaaaaaaaaatctgtttgaagtgtaattatactgaaaataaatatgagtctttttcattttagttaatgcatgctatttggtcatcagggaatttcatgaccaggtagaatttaaatgtaaattaagttagatccagtgactgcttctgtcttcctgggattcggtttcttttgggatgaattatgtcagtaacttggtttaaactttatgccagtacagtaagtaatagacataatttaaatctagtggatggaggaatataccagttagaaaagatggctgctgagaagttggagattgagaaacagaggttgtgtttatgtgtgcatgtttgtggttcctttcttgttgggagcctggcatttttgtatagcaataggactatccagtcatctttcgtttcagaggtgtgctttttctccagtaccccccagccccgttcagctaaaataaagcacagcataaccgtagtcctgcccagtcattttctgggtcagcttttcattagggcagagctgaagaattagggcacacttatgtataactatgtagtatcaaactgggatttccacagccccagctatacttctctatcaggatgaactgtttgctcctgaaaaaaatattacacctaatgttttcttttattgacccaagtaatttatgccccttttaaacccatccatattttccacaaccaaaccagcaattgccatacaggtgctcagttttggttcaaatttttattgttggtctttctttctttattgttattaaagcattacaactaattcagtgctatgactggtcatatttagaagttaatgcttctggatttcattttattttcacttttagaaagaaaaagaacttcaaaaacttacacaagaagaaacaaactttaaaagtttggttcatgatctctttcaaaaagttgaagaagcaaagagctcattagcaatgaatcgaagtagggggaaagtccttgatgcaataattcaagaaaaaaaatctggcaggattccaggaatatatggaagattggtaaagtagatttttggggggcatggctttactttttttttttaagaaagtgtaacttatttttttgccttgacaaccatatttcaagtgtcactgtatataaaataagattcattttgtttgttttaaggcacatttatttttaaacattttgcccttacagtttcttgtttacttagctttagataaatacaattatttcatacatatcaagaaaaatactagtaatgtcacacaaacttaaaaccattttatccttttttttaaaagagagactttagccaggcacaatggtgtgtgcctgtagtcccagctgttggagaggcagaggcagaaggatcacttgagcctaggagttcaagtccatcctgggcaatatagcaagactgttttttaaaaaatgaaaattaaaaaaaatttttttatatatttggggtttcacaccattttacttaggtttgggctagcatttaaggatataacaagggataatctaaaaatccaaggctagcaatagtgaggaccattactgcttcttagcttcgagggaagggagttgtggtccagaggagatggggaaaatggataccttaaccccacctatttcctgccctccagtcttagctgaaacctcaaattggctgaaggtggagagtcaaaggagccagttgatgcagtccttaagtcagcctttcggagaagggaacaaattgatgtaaaaattacccaacatgattgcttctgcatcttgtatcgggacttccaccttattttcttaaagataaacagtttgatcctattcatttgctctcaaagaaagcccaaaccagtgaatactgctagatagttgtgtaatagataaacagataaatgtgtttcatcaggatttacataattttagatgcttttcaataattcaaagttttctgagttttgcttatagttcatttaggttttaagcttcatgttgttttcataaaatgaaaacagttctttcattttgtgctcattagaaattcaagctgcatattcataaacttatacatattttgtattttgttgtgtacccttttgttctctttaaaaccatgtctacataaagtttttcaattaaaagaagtttttaaaacttgatgaatgaaatggtcctgtgcttttctgcctaactcttttttcaccccactcttcattattagggggacttaggagccattgatgaaaaatacgacgtggctatatcatcctgttgtcatgcactggactacattgttgttgattctattgatatagcccaagaatgtgtaaacttccttaaaagacaaaatattggagttgcaacctttataggtttagataaggtgggtattcgtaataacctacctataattggaattttttttttttgagacgtagtctcgctctgtcacccaggctggagtgcagtggcatgatcttggctcactgcaagctccgcctcccgggttcacaccattctcctgcctcagcctcccgagtatctggtactacaggtgcccgccaccacacccagctaatttttttgtattttcagtagagaggggtttcactgtgttagccaggatggtctggatctcctgaccttgtgatccgcccacctcggcctcccagagtgctgggattacaggcgtgagccaccacacccagccctataattgaatttttaagtgctaagtgtgtttttctttttggattcaggctttttcttaatggttactcagtgaacacctgatgggttttgacgattattttatgttctggggttatatgattataaaaaattgtttgacatttgcagtgcctccactaaaggaatgtacattccagagttaaaaggaaaacctttattgagataatttacctacaataaaatttatcattttaggccaggtgcggtggctcatgcctgtaatcccagcactttgggaggccaaggcgggcggatcacgaggtcaggagtttgagaccagcctggccaacatggcgaaatcccatctctactaaaaatacaaaaattagctaggcatggtagcaggcgcctgtaatctcagctactcgggaggctgaagcaggagaattgcctaaacctgggaggtggaggttgcagtgaacctagattgcgccactgcactccagtctgggtgacagagtgagactcaaaaacaacaaacaaaacaatcattttaaagtatgtaatttggtgggtattagtatattcacagtgttgttcacccatgaccactatctaattccaagatatttttatcactcccagaaagaaaccccatagacagtaacagtcgctccctataccccttcaccccctccgtaacactaactacttttttgtttctgtagatttatctacatataaatggaatcatacaatatatggcctttttatacagctacatttacttagcaggttttcaggttcatctatgttgtagcatgtatcagtacttcattcccttttattgccaaatggtattctgttacatcattttgtataaccatttgtcagttgatggacatttgtgttttcactttttgtgctttggcaatacttgtgctacgaacatttgtgtacaagtttttgagtgaacatgtattttcagttctcttgggtatatatatacctagggtagaactgctgggtcatgtggtaattctatgtttaactttttgaagaactgtcaagattgtttccacagtggctgtaccatttcccacaagcatgtgtaagggttccagtttctttacatcctcgttaacacttgttatggtacatctttttgattatagtcatcttagtgaatatgaagtggtatctcatggttttgattaggattttcctggtgatttatgatagtaaaagtcctttcatgtccttggccatttgttatcttccttggagaaatgtctgtttcaaatcctttgcccattttttaattggtttctctttgttgagttgtaggatttctctattctgaatacaagtctcttgtgagatatgatttacagatattttaccccattccttggattgtattttcactttcttgatggtatcctttgaggcacaatttatcttttttttcctttggttgcttgtgttttgggtatcatacccaagaaaccactgcctaatccaaggtcacagtgatttgcctcctttgttttcttctaaaagttctatagttttggctttatatttaggttttaatctattttgagttaattttatcacgtgatataaagtagggctcaaactactctttccatgtggctatccagttattccaacaccatttgttgaaaagattctttaccccattgaattttcttggcatccttgttgaaaccacccaaccattaatgtaaaggtttatttctgggctttcagttttattacttgtgctggtataggacactgtcttgattattgcagcattgtaataagttttaaaatcaggaagtctgagtcctctaattttgttctttatcatattgactgttctgggtccctataatttgtatatatgacttttaagatccagatggtcaattactgccacaaaaaaaggcgaggaagtaactgggattttgatacaggttgtattgaatttgtagatcagtttagatagtataggcatcttaacggtattaaatctttagaaccacaaacatgagatgtcttccgtttaggtctaattttagaaccttttgtgtataattcttgtttcttttgttgaatttattcctatgggtttttttttgtttttttttttgagttttcttttttgttaactgttgtttttgtttgtttgtttgtttacttttagatggctgtatgggcgaaaaagatgaccgaaattcaaactcctgaaaatactcctcgtttatttgatttagtaaaagtaaaagatgagaaaattcgccaagctttttattttgctttacgagataccttagtagctgacaacttggatcaagccacaagagtagcatatcaaaaagatagaagatggagagtggtaactttacagggacaaatcatagaacagtcaggtaatagtgtttttgtttcttggtttgtttttttttccccccacagcattgactttatttaatcttgttggggagacatctgaagctgacttctctcccctgttttccaggtacaatgactggtggtggaagcaaagtaatgaaaggaagaatgggttcctcacttgttattgaaatctctgaagaagaggtcagcatatctaaaattgtatccagacttttttttttttttaaatagctttaccgaggtatatacttactacaaaatttggccattttaagtatggtgtactcaaattttaatagatggcgttttctataaatgactagggattttttatgtaaagccctttaaagttttagaaaacaaaatattaatcagaaactatatgctcaaagtacactttttaattagtacatttggatcatacagatattccataacttacataattatttctgttttacatttaatttattggggttttttttgtattattgctgtattacataattttttacttcaaaataattctttaaaagtatagcaaagacttgatgcaaatctcaacttcagagtattttaaacttttttcctcctcaaaaacatgttctgaaatagcttgaacaccttttcccaaagtgttgtgctttgatttttttccctcccgtattttgaaaatacaagtttatgtccttctgcttaagtatttgaatgctgtaccttcattgaaataataggtgactgtacaacacttagttacctttccatctgattttctgatcaagaaattacttgaccatctcctgaactttaagattgggattggaacaggtggtttgattttgttctggtctttaagatcagaagttttaggctgggcgcggtggctcacacctgtaatcccagcactttgggagtctgaggctgtcagatcacaaggtcaggagttcaagaccagcctggccaacatagggaaaccacgtctctactaaaaacacaaaaattagccgggcgtggtggcacgcacctgtaacagtcccagctactcaggaggctgaggcaggagaatcgcttgaacccgggaggcggaggttgcagtgagctgagaccgcgccattgcactccagcctgggcgacagaagttttagttttcttcgtaagttgacttttctgtcaatctgaaatggctcttagagaaaactttctttgtaggtaaacaaaatggaatcacagttgcaaaacgactctaaaaaagcaatgcaaatccaagaacagaaagtacaacttgaagaaagagtagttaagttacggcatagtgaacgagaaatgaggaacacactagaaaaatttactgcaagcatccaggtatgtgtgtgtgtgtgtgtgtgtgtgtgtgtgtactgaaactattgggattcaactggaatttatcagaaccattttgctatttgcttacaatttattaaatatataagggagggaggatctataggcagatataactcttgatgattttgtttcactgagtactaatagataacgccctgtcacagtgttgttccaaccacagctattcctgttttccgtttgtactccatagaaacattactttccttaacaactatatgaccctttatttttattctcttttcaaagtggaattttttttaattatgaaaaagcaatgcacgcccactgtttttttaataagtttccagaaaatacccaaatgatcaccttcattttgacgtatgttctttcaacttttctaatacctagtttgcatgtaatgtatttatatatgtggtagatatgtgtagatatataaagtgtgcatatggtttttttaatgtcatactagcttttcttaaattatggttttctttccaaggcagtataaatgtactttgtttttaattgctttagagcattttgtttataacataatttgacaaattttttttgtattatgtacatggctatgtttaaaaaaatccttgtaggtataccttgattcagttatttccttagatttcaaaaattacaagtattacaccatatgtgtacaatgtttaaggcatttgttgcataatgccagattgttttcaaaagttataattcatgcactactaacagcatattcaaataattatttttccaagtctttgaacactagggtggtctacataagtttgctaccttgtaaacagaaatgtggcattttaacgtgtctttataatgagcttacatattttgtgtttgttggccattttcattttttatatcaatggcacatatctttcctcttcctattagtgtgtgtctttttcttgaagattttaagtgccctttttaaaaattcacaatgtttaaagcaaatgttaaaatattgaccttaaatgttaaaacttttttgtagcgtttaatagagcaagaagaatatttgaatgtccaagttaaggaacttgaagctaatgtacttgctacagcccctgacaaaaaaaagcagaaattgctagaagaaaacgttagtgctttcaaaacaggtatgtttagagatagaccttttttggggggaaaaaaaaaacaggtttttaaagcttgcaatatttaagaagcagtagaataataatagaagctaagtatatgcaagtcattgcactattttatggtgtttgttataaagtaagtgttattaatagtctcatttgacaaataaggaaactgaggcatttgcctaaggtcacacagcacgtggtggtataggaataggtgatttttgagtccatgcttttaatgtcatactttgtatactttggccctaatctttccaaaaccccttcaagatagtggttatagatttagaaaaattatatcactcagataacacagggaataagtggtatgcaatcaaagaaaaacaatgtgtacttgaaaacttaaaatatatatatatgtattttttttctttcataacttcttcttgtgcagttatagacatgtaaatgttctaccaaaatagaatctttaggcaggaaaaggaattcacaggcagaattggctctgtagccttaattgaaatcccctgatcatgcacttgagcagctgtgcttgtctttccatgttggcttcaatcaaacatagatgtgcatcttaatgggagaagggatagtggattatgccacagtccccttccaggtttacagaatcttagctagtgactccagcaaacacagcaaggttcattttattcttaagacagatccctgttacagtttgctttgtgagccaaggaagacaaatactgattaaccatcccaaagaactaatgagagtggagttggagcgattatccaactgctccaaaaatgtggggattttcttccaaaagaaaaagatttttaaatgttgacacatttccacaatgcatatcaaatgtgcatttatattaatttgtgtctgtgtttatctgcatttctaatattcaggcactcaaatagtatctgctactggccaggctttgttttaggtcctactgatagagcagtaaacaaaaataaagtctcttcccagggagcacacatgtaagatggcacatatttgagtggaggcccaaagaaagtatgagtgctaacccatgtatgtttgagaaaaaagcattccaagaagagtataaaggagcaaatacaaaggctgaagcaggagtatgctgggaacacaaaccattgtggctggaataaaggacggaagaacccagattctctgaggccttcacccacactcccctttccctgcaagcacccacaacaatggctttgatggtacctgatggtcaattgagaagccaaaatgtatatctgtgctattaatggcaacattttcatggagagactgcaagagtctatatgtgtttcatccttatttgaaaaggaatccttgactttgttaggagctctatatatctcctctcatagaaatgccatatattatcaggagactgttaatatctcatgtggaggacccatttgtgcaagcatatctttaaaattaaatattttcaactattgaacatattcatatttttaaataaaggctacagtaaaccattatatcgaaatctgtgcaaacattttatatttaagataaattgggctgcgcatggtggctcacacctgtaatcccagcacttgggaaggccaaggcaggcagatcacttgagatcaggagtttgagaccagcctggccaacatggtgaaaccccatctctttgaaaaatacacacgcacgcacacacacaaacacacacacacgccgggtgtggtggcacatgcttataatcccagctacatggtaagctgaaccacgagaatggcttgaacctgggaggtggatggaggttgcagtgagctgcgatggcgccactgcactccatcctgggccatagagctggagaacctctaacttcgttacagaaaatccagacttctgtgtgactgcttgccagaagaaacatgtccaatttgtttatgccttccaaattatgcaagtacttttgattgaattgacctaaattatgtctaaaccctagccacagaggaatctgggaaatgttaacttttactcttcgttgtcacaggaaggaacgctaattcatcttatatcctccactttgttttaatgtggagaactgcgaagttatgttagcagaagaaaataaccacaatttcttcattgtgggcaagttaatattgagttaggcacatagtgtatctaaggctaaaaatcattatgaactcagtagtcaaggaagtgccctaagaaaaagttgtaaagatattttaaaagaagctgagaacatgaagccattaagaaatggtgtgtttacagccgagctagtgtgtttaactttgtgcattgttgtaacaccatttgttttgatacaggatatcgtttttttttttaaggtgctttttcccatatgcctaaaatttgttttaatgcatcacgtcaagtcatagcaactgaagaaatgtacatctaacaaatgatgttcattagcataaaaacacaaattaggttctttattttttaatttcagaatatgatgctgtggctgagaaagctggtaaagtagaagctgaggttaaacgcttacacaataccatcgtagaaatcaataatcataaactcaaggcccaacaagacaaacttgataaaataaataagcaattagatgaatgtgcttctgctattactaaagcccaagtagcaatcaagactgctgacaggtagagtatgcatgttaccctaacttgttttccctttccctgccttcacattggaaagggggttactatgtaatgttccataaaatgtttctcttactgttaatttattgaacctgtctgacacattacctaatgggacttccatgacggaaaacctataatgaacatttatcctatggccaattaaaaaggctggtaaacaggtatgccataggaaagtacaggtagactgtaactccccagttgctgtgagggcatagaaatcagttttgtttctctggtctcggggagggagtagttggtccttaatttaaatagatacaggccttaaaagaataagtaaaagaggtaaaaatgggatcacttagcaaaattaattctcttggtaacttacattttagtttttatttttattttttgatacagagtcttgctgtgttgcccaggttggagtgcagtggcacagtcagggctcactgcagcctcaatctcccaggctcaggcagtcctcccacctcaacctcccaagtagctgggactacaggaatgcactacaacacctggctaatttttgtattttttttgtagagaccagagttttgccatgtttcccaggcaggtcttgaactcctgggctgaagcagtcctcttgccttggcctcccaaaagactgagattacaggcatgagccactgcacccagccaccttaaaattttaaatacctagaagatttcattgtccttaaaaaaaaagatttatctacttaggtttttttttttttttttttctttttgagacagtctcgctctgccatccaggctggagtacagtggcgcgatctcggctcactgcagcctccgcctcccaggttcaagtgattctcctgtctcagcctcccaagtagctgggattacaggcacacgctaccaggccctgctaatttttgtatttttagtagagacagggtttcaccatgttggtcaggctggtcttgaactcctgacgtcatggtccccctgcctcagcctcccaaagtgctgggattacaggcatgagccaccgcacccggccttaatttttttagagtatttattgaagtgtgtctgaaataaagttaggtatgtatataaaatattgaaatttaaatagccatttctttttttagaaaaaattttaacaaattgattgcatattgattatctggttaaattaatccagagtgttttgctcagagataaggaggtaataagggagaagtagtgtcttgcttttttggaagtacttgttgccttgtcttgaattgggaagtatttgaaggtacaactttatgggtgtagagatttaacaatctctgacgagaaaatgacaaaagaatttgataatctaatggacagtgttgcatcagtctaaagttgaatgatacaagcagcttatataagaaaggcatttataattaaaaatatacaactcatcccataagtgtttgtataaacctacaaaaactgatttaaggatggtttagtaaatcataaacttaaaaatatatgaatagaaaaaatgtcacattaaatttcatgaaaagttctttagtaggttttcagaaacaataacaaatcaccttaccacatttttgatgcatcattttgcttctttagaaaccttcaaaaggcacaagactctgtcttgcgtacagagaaagaaataaaagatactgagaaagaggtggatgacctaacagcagagctgaaaagtcttgaggacaaagcagcagaggtcgtaaagaatacaaatgctgcagaggtatgagttgctttgtattgaagaggagatgggatgatactggaaccaatttaaagagctggatatatgacagtgcctagaatgtagtaagcactcatagacttaaagttttataactatcaatttttatttgtacaataagaatactataatttgtgaatttaaatgcttaaattattttaaaatggaaggggcatgaggagagattggtaattccttcatctctgtaatgtgaaaatgatggctctatttggaaaattctatctagcagttcttttcggtgtttaggaatccttaccagagatccagaaagaacatcgcaatctgcttcaagaattaaaagttattcaagaaaatgaacatgctcttcaaaaagatgcacttagtattaagttgaaacttgaacaaatagatggtcacattgctgaacataattctaaaataaaatattggcacaaagaggtgagattgttaccgtttagtttaattttaaacatattctttatgaaaaaggagggtttggggaggattgttttagggggttggggttcttaaattttgtttgtgagctacattgtgatttttaattctgtgatcacttctaaggtttataggggacataacaatataaattgttatatacagaaaagtctgagtaacgattagaattagacaactaccctttcaccctagggctgatctggacatttaagaaaagattacatggacacttttgagtgttacaactatttttcttgaagtcctttgaaaaataattgataaatcagtcacaactcctgttgttttcatagctgtgtaatttgtcatatttttttttaaacaatgaattgtatgtaatattatgccttctctaactctcccctaaattgaacttttagatttcaaaaatatcactgcatcctatagaagataatcctattgaagagatttcggttctaagcccagaggatcttgaagcgatcaagaatccagattctataacaaatcaaattgcacttttggaagcccggtgtcatgaaatgaaaccaaacctcggtgccatcgcagagtataaaaagaaggtatgaatgaactgtgtatgtatactagttggagttctttttagtccttagcctaaattctgatctttagttttgtataattaacaatgctgttggccgggcgtggtggctcacgcctgtaatcccagcactttgggaggccaaaggcgggtggatcacaaggtcaggagttcgagaccagctgggccaacatagtgaaacctcatctctattaaagatac

SEQ ID NO: 335 - DNA, 25525 bp, Homo sapiens
  source 1..25525: mol_type = other DNA
gacttaggcctggaccctagtgattggctgataggaggagccagcaagtgtggctgagctccggggtgtgtggacgccgctttgttgcctgaggtgggtggcggtggaagttaagggagtcaggggctatcgctcctcgagactcgcagtcgcggccactgcagtcacttcgccagttagcccttagggtaggagtcgcgccggcagcagccatgagcggcggcgtgtacgggggaggtgagtgagtgcggccggacgagagagcgcgccttttcggcgtgtggggtttgtaaccgccgctcccagccctcccctccccggcgttcccttccggtctccccctctcgggaccccggcctccccgccccgtccccgccccacgctctgcccgcccccggagcccacccggctcgccgtgctcctcgggctccctgaagtggcggctctctgtggcctcttcctgcctctgtccccggaggagcagggttttggggtgcgcgctcggttctctagggagcctcggggctgggcgggaggctcagtctagccggccgccgggccccggcttgggtgaccgccccagggtcgcatctccccgagtgcctcctggactcagctgtgtcgggacgcgtgtgcgcccgcctaaacttggaaggtcccggcggtttgcaagcgtggacggagggttcccagagtgtcccataggtggcaaagcgagcctcaagccgtagaactgactagggaagcggcggccacttagggtactgcctcctccccgtctgcgccccatgcgcgagctgcctcacctttcagtaactcttgcctgttttttggctgcggagtctccagagtgactcgtgggcgggtctgtttgagatcaattcaggagcacgtgtaatttaaggatgcccagaaagtttgctgggggtcctaggcgtgttattttttcactttctttgattagactgtggtgtggtaggaagattaccaggtgccgggggttacagacctgggttgaaatatccacctcactctttattaagcgctttggtcttgggcagtttatgtaactttccaacttcaggcctcatttatggaataattcctagccgatgggggtgggcatgaaggttaaatgaaataatgctgcatttgccacttaaagtctggcccatggaccagcagtgtcagcatcacctgcaagcctgttagaaatgcaggatctcacgcgtcattcagaatctactgatttagagcctccatttttgcaagatctgcaggttaatcgaaacactgatacatataattcatgtgttgggttgtgtttgatgagttagagacccagaaaacaaatccagactattgctgttgttactgtgtctagtagtgatgctgtttctataaaggatgtcattttacaggtaggaaacaacaaaaataagatttttccttcatgttccccaagaaaatcacatcacccctaaacttggaaggagaaaaacattaaaatcctcaaaaaagacaaaagcctttttagtagagtagaggttcaattcttgaggatttttatagactagaaattgcatcctaggttttaaacatccagaactctgtggttctattaagcctcctgcctcccatggccactctcctactttgggttcatggggcttgatttttaatgaagcagggtacaggaattagatgtatctcccatcctggaaaaggaacagatgtaaaattctgagaatttagagtcttaaattaaaattccaccatatccagtttactaaactaattaggacaggaaaatgagctgatatgttggattttttctatttcacaaaaatgttttttgagtacttgctatgtggcaggtataggctcttgtcatcaagaagctcagtcttgtagatgagtctgttaggtaaatagacaccgtatttcactgattcttcgttgtacattttttcccacatttaaacagctgaagttggaatatgtcttttttttttttttttttaatagagatgggtcttgaactcctgagctcaggcggtcttcccacctcagcctcccaaagtgctaggattacaggtttgagccactgcccccagtcagaatatgtcttaacagtgctggcgtggcagagtttaattgccatattattttgttagtgatgcaggaaatagtggtgcatcatgtagttgatagcatcttatattgatcagaaatggtaactgtaattcaatgagagatgttcattgataacaatatgtagaaggggccgggtgcggtgtaatcccaacaccttgggaggccgaggcgggcggatcacttgaggccaggagttcaagaccagcttggccaacatgacaaaaccctgtctctactaaaaatacaaaaattagccaggcgtggtggtgcatgcctggagtcccagctgctggggaggccgaggcacaagaatcgctcgaacctggaactgcactccagcctgggtgacagagcgagactctatcctaaaaaaaacaaaaacaaacatatatatatgtgtgttatatatgttatatatattacatatatgttgtatatattatatattatatgttatatatgtcctatatatacatatatatagtgcaaaggtagctcagagaataaagttattgattccgtgtggtggagtcaagggactttacaatagaggtaatggggatgatggaggaggagtggaaagggacagcatatgcaaaggttagctgagtgagagtatgtggtgcgttcaggagatgacatattacccagtaagttagtgtatgaggcaggaagtgagactgctaccagattttgctacaccttgaatttcaactggctagagtgatttaaattttatcaaatacagtgatgagaaaccacggaatgattcaccccctaattttttttgaaggatttatgtaccaaaataatgacagttacagtattgaaagatcatagtgcagcagttggaagggtggattgaagaggcaaagaggtggaggcacaatatctgtagggaattgtagtttcccggttgagataagagctcgattgaaggcagtggcaatggtattaaaaaggaggggatttgagaaatacttagcagaaatatttggcagaacttgaaagatggaggtgttcacaaaaactctcagatttttgccagtgtggactggtggtcagcaatgtgttaggcaatgctgagatcagcagtgcttcagatgtgttgaatttgagatacccatgaggcatcagatgcaattatgttgatgtacagtgaaaagttcaggatatggatgtagacactggttagagcttgagagagagagagatttgaaattggaattatcagtatttaggtagaagttgaagctataggagtagaatatattacccaggaaagggtaaattagggaaggagctcctaacatagggtttgtggccttcccaaagtttccatggtagaactatattttattataattggcttcttttataaacatttaaaaacattctaagaagggattcataatttcctaaactgtattagtttgtagggctgccataataaagtaccacagtctgtgtggcttaaacaacagaaattagttttctcacaattctagaggatagaggtagatctaagtgtcagcagagttggtttcttctgaggtctgtctctgtgtgtagatggccatctcctcctctgtcttcacatggccgtccctctgtacaagtccaagtctgaattttctctttttgttgttgttgttgttgttgttgtttttgagactgagacttgctctgtcacccaggctggagtgcagtagcacgatctcagctcgttgcagcctccgcctgccgggttcaagcaattctcctgcctcggcctccagagtagctaggactacaggtgcatacggccacgcccggctaattttttgtattttgggtagagttggggtttcaccatgttggccaggatggtcttgatctcctgacctcgtaatctgcccgcctctgcctcccaaagtgttgggcttacaggtgtgagccaccgcgcgccctgcctgaattttctcttaaaaacatcactcatactggattaggacccaatctaatgatttcattttaacttaattacttcttcaaagattctggtttcaccgggcatggtagctcacgtctataatcctagcactttgggagggcaaggcgagtggatcacctgaggtgtggagtttgagaccagcctggccaacatggtgaaaccccatgtctactaaaaatataaaacctagccgggcttggtggccagcagatgtaatcccagctactcaggaggctgaggcagaagaatcacttgaaccccggaggtggaggttgcaatgagctgagattgtgccattgcaccccagcctgggcgacaggagtgaaactctgtctcaaaacataaaaataaataaataaataaagaataaagactctggtttcaagtacagtcacattctgaggtactaggggttaggattttgacatatgaattttagggcgacacaattcagtccacaacactgtcataagggtccataacacagaacaggttaagggctcctggcgcagggcaaaagataaatccttgaggaacagaagttgaaatttttggttaactatacaattaattcatttaattaggatatctctttacccagcattctggttaataaaagtattaaattttaccaactcatattcattgctatacttacgatttgtactcaagtttaggtgctgtggtgaaaacaaatacagtgttctccttttaaggaccccctagtttctgacaaaataatttggaccagagaatttcacagggaagggttaattatcttgagaaatgtaacaaatacgtaaactttcttttatattagaaattaaaatatgtctctgttttatttgaataaaaatgagaggctgggcgcggtggctaacacctataatcccagcactttgagaggccaaggcgggtggatcacgaggtcaggagtttgagaccagcctggccaatatggtgaaaccccatctctactaaaaatacaaaaattagctgggcatggtggtgcgcgtctgtagtcccagctgctcaggaggctgaggcaggaaaatctgttgaacctgggaggtagaggttgcagtgagccgagatcacgccactgcactccagcctgggcagcaatacagcaagactccgtgtcaaaaaaaaaaaaaaaaaaagagatcattctgcaaagctactgtctcttaactgatacttgcaaagtaatgggtttgattttaaaaattttaagtttttgaaatattttaaacatattaaaaatatgtaagtttgtatgtgatattactgtaatcacctgtaagtttgtatgtaatacaatactgcattcaccagtgagattaaatagatgtcatattttgccatattaatacctcagatattttaagaataaaaatgttattgatacagatttcctctctctcccttcttcagttcatgtaaccactgaactgaagttggtatgtaacattcccagaccccatgcatattttcttttttttttttgagacgtgtgtgtgtgtgtatatgtgtatatatgtatgtgtatacatatggttttttgataactagcttttaaaactaagcattcttttagatttattgatgctgacatatgtagatctaaagtgttcatttgaactgctgtacaggattccattgtgtgaatatattattgcttatctatttccctgctgagagaccattagattatttctgccttttcctatggcaagcagtgtgtcaattataatagcagcttacacttagcatgtgtattttctaagacttcatatacatgaaagcacttaacatgtttaatcattagagtatcctgtgagataagagctattatgtacattttacatattaggaaactgaagcagagaggttaataaattgctcagttcttgtagctgttgaacattcttttgcatgtctccttgcaacctgtatgagagagtgtctccagaataagtaagtgtaattctatgtatgcacaatttcaactttaatagatatgactaaattgcccatagtggttgtcccactttggacaataaattatagaatcaccctagttgatggtggagggaggttgctggtatatttattagcctggttcattcacctcagggtaatccatggctaactgcatcccctctactaaaagtcacagctcctgtcaggtagccctccccatacaactttctctccagattctgataacagttatttcttcttgtttcttcagtttgaagaatggcaatggatccattattattagttatcattatagtactggggtactgtactgtcccttctggttgtcctgtatttcacctatatctttgcaaataattccctttaataagtaaactgaaattacccagttttagtgtaccatttcttaactgattgaacctctacttaaatacggtgtatgccttgttatattttaattaaatgattctttaaggtgtatttgaaactaggttcaagtgagtaataatatgaatataattgggctgagtgcagtggctcatgcctgcagcactttgggatgctgaggcagaggattgcttgagccctggagtttgagtccagcctgggcaacatagtgagaccttatgtctacaaaaaatttaagaaattcattgtagtcccagctatttggaagactgaggcgggaggattgcttgagcctaggaggttgaggctgcagtgagctgtgattttcatatgatacttttgcaagctgttaatgctaattatctttaatcttttcagatgaagttggagcccttgtttttgacattggatcctatactgtgagagctggttatgctggtgaggactgccccaaggtaagtgtaatgttagagttaattggatatgtaaagccattcatgtaaattaaatttatgcagaaattctgattcaaaacaaaatataataaaatacattaattggggaaaaaatgccttcttgatgaaaggtgaaacttgtatgtcatgtttctgactcttacaggtggattttcctacagctattggtatggtggtagaaagagatgacggaagcacattaatggaaatagatggcgataaaggcaaacaaggcggtcccacctactacatagatactaatgctctgcgtgttccgagggagaatatggaggccatttcacctctaaaaaatgggatgggtatgatgttttccccatggaattgattatggagtgtacatgttatattttagatacaaagtagtagcttcctataagttgaacatcaaccatggttttttgttttgttttgttttttattccacaaactgatttccagacactgagaatacaaagatgcataagaaatgttccttttcattaaaagcttacagttagttgggggaaatagatgtatatatacaaataatggtacactgtgggataagtggtacaatataggtatgtgcaatgagcaatgggattagagaggagaggtatttgactctagtgttgggagtcagtgatggttttcacaaaggaggtaacatgatgaatcttgatcaatgagtaagaattagcttggctgacaaagctgggtaaagcaaagggaccagcatgtgtgaagggatggaattgtgaaagaaacttatgtgcttgaaaatgtaatacaattaagtatggttgcagcattgggcttattagggtcagtagcaggaaaggtaggcagagagcagtagcaggaaaggtaggcagggagcagtcataaaagggcttgtaaaccatcccagggttgtattaagctagtgactgaaggataaccccaaaggaatttaaacagatgtgatggtcagagtccagatgagaaatgaaaaaggtttaaactattatataatgctggtagagattctgaagggactttcagggtaaccaggagacaaatggtactaaatgatcgagggagtgaaagcaagagagaagttgagaaagtttcctagatttttggttggggtaactctgaacagagagtaccatgcattgagataggaatataaagggaaggagcaagtgttacggttttaaaaggcatggttggccatgcgtggtggctcgcgcctatataatcccagcactttgggaggctgagactgtgggtggattgcttgagtctaggagtttgagaccagcctgggcaacatggcgaaaccccatctctactaaaaatacaaaaatttgacaggtgtggtgatgcgtaccacctgtaattccagctacttgggaggctgaggcatgagaatcacttgaacccaggatgcagaggttgcagctgagatctcatgactacacaccaacctgggtgacagagtgagactctgtctcaaaaaaaaaaacaaaaaaaaaaaacaagcttatcagggatagccaaaatcactctcaggttcaattattcaccagcaagactcactcacaggactcagcatatggttgtattcacagctaagatttattgtactgaagattcagatacaaaacaaaatcgacaaagggaaaagggacaggggatgatgaagtccagatacaggctttggagagtcttctcacagtggagtcacacaggatgtgcttaatccctccagcaacaagttatgatctgtgttaccttccaggagaactctgaggctcagtacccaaggattttacagagggctggttatgtaggtaccatctacctggcatgtaacaaaattttagattctcagaaggaaagcaagtgttcagaacaaaccacattgtataaacagtgtaggtatagcgagctacccttaccatttagggacaagttttatatgaacatagggaactgtttgccagtcatgtttccagacaccagctaagagtcagccttacaagcaggcctttctcaggcttgcagtgttaactctttcatgtgtagtaagtaaatgggttcactgagttcaaagtacttagaacatccaggtgataattcagtaaacgggaataaaaggttataagaaagattttaagacatggagttgcattttattactctgaaaaaaattggaacatgagaagaggattgaagatggagttctagcaaaaacttgttgtatattttaaccaatagagaataaaaggtacccttgaaggagaaagaaagggaacaattagggatgtaggaaaaaaagcaggggaagaacaagaaaagaaaaagtttctggaagcataaaattccagttattctcggtgttttctgctgtgacattgaaagctttacactaagaaagaagttaaaaaaatccaggtgggcctgtggaaatatataattaatgacattttttctttgggctgtgacagaaaagtttgtaaactcttgtgtaggcaatactgtcataatttagagaagtcagatgagattaaaaatgttaagtatccatgaatttgcctagtagaaggtcattagtggctgggggcggtggctcacgcctgtaatcccagcactttggaggctgaggtgggtggatcacctgaggtcaggagttcgagaccagcctggccaacatggtgaaaccctgtctctactaaaaatgcaaaaattagttgggtacggtggcgggcacctgtaatcccagctactcgggagcctgagggaggagaattgcttgaccccaggaggcggaggttgcagtgagctgagattgtgccattgcactccagtgtgggggacagaacgagactccatctcaaaaaaaagaaaaaagaaggtcattagtgacttatgtcagtagttttaatggaatgtttaggtggaagccaaattgaagacagatgctcttctttgaatttttaacatgtcttttagtctttttccaaatagattgtaagtttttttgagtgtcgggtctagaccatacaattctttcttttttttttttttttataaatccagcagtagtatcatcagaaggccatacaattcttctgtacttcctattatcattctgatcacattctgggcctctaataagtatttattgaattgaataacatttacttcatattttaggtctgttagattaattacatttgggacaggtctgggggctggagggaccaaaaagaagttctatatatctagaaggcaaaggtaatctctatataaagtaatgtggtatgaagttgatctgtaaaatcagtaggttctgtatactaaagtattaattgttaagtcatagaaacaatttctcaaaagatgctatattcatcttcaactatgcattatttccaagttactaatcttatattctagttgaagactgggatagtttccaagctattttggatcatacctacaaaatgcatgtcaaatcagaagccagtctccatcctgttctcatgtcagaggcaccggtgagataaagattttctttttcacgtttctctagttgttttttttttttcttttttttttcctttagttttctactcatttgatgaacatttttctttaaagaggcatagaaattcatattttgaatttgaaaattagggaaaaggattaattttttaacactattataacttttattttactattccaataaataaaatatccagagaacaacaaaacaccctaatggattcttgtggttatttatgtatttctagggatttgtttaacattttatttcctaggactgcttcccattttgaattatgaatcatttcttgtgccccaagggcagcgtatatctacttttattcaagtttccaagaaagaattgagatgttgaacaagggctggaaatttctggaccaaagtctcttgtgaaatacatttggtacatagacaaaaaggtcccagaaagcaagcataatggtcataaattatcagtatcttattgttactaacttacagtattcttttatgaataccaactataagtgggagaatttggtggtctaaaattcatacttaggatttggattaccatatttactctttagatttaataatatgtttataagaatcctggtttcctcatatgtggaaaagtcaggagcaattttattattaaagaattttaattcttctctgatagatttattaaatttaatctacatctaaagaaataaatattatagaggtttttttatttttatgagatattatgaaagatgatttcccatggtattttattctgttcttaatgttttatatctttgttaatatagtgctagattttatctggagataaatcaactttttaattcttaataacttgcatttctttttcccctcttctcaagtggaatactagagcaaagagagagaaactgacagagttaatgtttgaacactacaacatccctgccttcttcctttgcaaaactgcagttttgacagcgtatccttgaaagagtaatacctttcctcttgaagtatgtacgatactaatgaatatgataactctgggagaagacatacgccaattattgcttgttccgaagttgtttttttcccttttctcttgctttttagctattcatcttttagtatttcttgttagaactgatgatacaccagaaggtatgagggaaataaaataacactcaaattctgagtgttaagacgtttttgtttttgtttttaagaaggggcatgtggatagaaggcaatgttttaaccagttggcttaggtgaattgaaagattgccattttaaaatctccttcccttccaatatcatagaaaactggaaattggctgtaaattcattctccttcaaatttagtcagtcatcaaatcctgcctgttcttccctgctatttgcttctctctgtcctactgccacagcattaggtggaagctatttccaggattactgaagcacgtcctcttgtctgcccattctttacgctgttgctctaataatctttctatttttatttatttatttatttggtagagatggagtttcgccatgttgcccaggctgctctcgaactcctggactcaagcgatatgcttgcctcagtctcccaaagtgctgggattacaggcatgagccaccgtgcccagcctctaataatctttctaaagtgctagtctgctttaagccagaatcgtcttctacatttcttcctttattttactttcagaccgtgctgaggtacttgcagttctctgacctcgctgtgttctcttgcttcttggtcttcccacatgctcctactcttgcccatattcccttccccagattttactattgaatatctcaggaataggtttcccttttacatcaccatcttccctgggacatcctgagcttttctttttacagctttattcatcatctacttcactaaacaggataaccttcagggaaaaggcagttttggtgcaccattgtgtgtctactgtgttaaaggaattttagtgccaggtgagcagcctccctccttcctccctccctccttattaagcaccagacttagtagacacctaatagatgctcagtaaatatttgatgaatgagtgaatgtccctactcctaaacatcagtttagtatattcaggtagtataggccatctgcagcacagaactgtggaaaatgggatctgccaatatttaccaactgtggaattcacctggaatagttttcccgctcattgagttggaggagataggaactgccatatggctgccaaactgctgaaacagctctttttcaatgctatgtgagaatggttatagtccctagctcaattatcacaacctcccactgttcttaccaagtttctgtatattttgttaaataaatgcatctcagtttgttgtaagctctttgatcagtctccagagacttttagtgattgtgttaattttgaccagcttaatagtagctgttcctaggataaaggtttccctgagtgcctgatacctccattctggaattcctgcctcttactatttgtttttaagccagaaatattattttataccaatttttatccctagattcactgtaatacatttttaactataaggtacatgtttaagaaatagtttctgaaacattataagagcctgccctttacaataaacattattttagcggccttgatactttcttttccttaatgttttaaactagatttgctaatggtcgttctactgggctgattttggacagtggagccactcataccactgcaattccagtccacgatggctatgtccttcaacaaggtaaatgtatttaaccaggatacactgagatgattttagatgccatgaggatgcacataatgaaataaaatgatgagtagcactattaaagcatatcagtttctgaataagattttttttaagtatgttaaaaatctttagtatataatgtatatttaaaactgatgcatggctttatttatgtgttgaaggatagttcagttcattctacctgaaaaagttattcacataaatacacccacagaggaaattcgttcaaggaagtttggacttactgccctcttagccttgtttcatctgtttcataggcattgtgaaatcccctcttgctggagactttattactatgcagtgcagagaactcttccaagaaatgaatattgaattggttcctccatatatgattgcatcaaaagtaagtaattattgaattttctttgtagaacttacttctagctcccccacccctatgaagtgaactccattaacctagcatctcttggtactctcaggaagctgttcgtgaaggatctccagcaaactggaaaagaaaagagaagttgcctcaggttacgaggtcttggcacaattatatgtgtaatgtaagtaaccctcattctctttacaaaaatgttacaggctttttgcatgagtattaaaaaaagttatatataggctgtaaatccttgagtaaaatatgggcactttatattttcaagctctttattttttttattactaaatacattttgaagattaaatagaacatgatctcagggtcacactctatatttttaatgatattttactaacaaaagagcttttctgtgagaggcatgcttttcatacttgccaaacaaatctctacaaattactacatactcacttggattactatggtgagacctggaaggaattttggttttatgctattctgaacatttttggctgagaaaatggttttaggttttgtagaggcctactagtatgtctcagttatgttctgtttcccagcatcagtcagcaatatcaaaaatgtgtttttgttcagaacaaggaacccatgagagattctctttactaaaaacccatctctgaacatatggcttactgatggggaagaggttagtaaaacaacctgatgccacagatacgccttaatttcttaaaaaaaaaacaaaaaaaaactgttactttaggttcaggggtacatgtgcaggtttgttaaatgggtaaactcatgtcacggaagtttgttgtacagattattgtcccccaggtactaagcctagtacccaatagttattttttctgctccattccctcgtccctcagggaggtccaactgtctgttgttcccttctttgtgtccatgtgttctcatcatctagctctcacttgtaagtgagaacgtgctgtatttggttttctgttcctgcattagtttgctgaggataatggcctccagctccatccctgttccttcaaaggacatgatctcattctttttttttttttttcactacataatattctgtggtctgtatgtaccacattttcttaatccagtcttccaccgacgggcatttaagttgattccatgtctttgctattgtgaatagtggtgcagtgtacatacacatacatgtgtctttatgataaactgatttatattcctttgggtatatacccagtaatgagattgccaggtcaagtggtagttctgggccaggcatggtggctcacgcctgtaatttgagaggctgaggtgggtggatcccttgagctcaggagttagagaccagcctgggaaacatggcaaaaccctgtctctacaaaaacagaaaaattagctaagtggggccgggtgcagtggctcacgcctgtaatcccagcacttggggaggccgaggcgggtggatcacctgaggtcaggagttggagaccagcctggccaacatggtgaagccctgtctctaaaaatataaaaaaattagctgggtgtggtggtgggtgcctgtaatcccagctacttgggaggctgaggcaggagaattgcttgaacccaggagatggatgttgcagtgagccaacacggtgccactgcgctcctgcctgggcgacagagtgagactccatttcaaagaaaaagaaaaattagctaagtgtgggggtgtgcacctttagtcccagctacttgggagactgaggtgggagaatcacctgagccctgtgaggtcgaggctgcagtgagctgtgattgtaccagtgccttctagcctgggtaacgagtgagaacccatctcaaaaaagaaaaaaaaacaaatggtagttctgtttttagctctttgaggaattgccacatggctttcaacaatggttgaactaatttacattctcaccaaaagtgaataaacgttcgcttttctctgcagccgtgtcagcagcatctgttatttatttaattttttcaagacagagtcttgctttgtcacccaggctggagcgcagtggtgcagtctcggctcactgcaacctccatctcctgggttcaagcaattctcctacctcagcctcctgagtagctgggactacaggtgtgtgccaccacacctggctaatttttgtattcttagttggccaggctggtctctaacccttgaccttgtgatccacccgcctcagcctcccaaagtgctgggattacaggcgtgagccactgtgcccggccctattttttcactttttaataataaataatagccattctgactggtgtgagatggtgtatcattggggttttgattttcatttatctgatggtcagtgatattgagctttttttcatatgctgttggccgcatgtatgttttcttttgaagtgtctattagtgtcctttgcccactttttaatgaggctttttgttgttgttgttccttatagaagctaggtattagacctttgttagatacatagtttgcaaatattttctcctattctgtaggttgtttgcttactctgttgatagaaattaatgtgtatccagcaaaagaaactaagagtaaaattatatgagtcataatttactatgagagggatcatatctaacaggttttttaaaaattattttatttatatcatatacacacacacacacacacacacacacacacacacattttaaagacagggttggctgggcacggtggctcatgcctgtaatgccagcactttgggaggccaaggcagtggatcacttgaggcaaggagttcaagactatcctggccaacatggtgagaccccatctctactaaaaatacaaaaattagctgggtttggtgctgagcacctgtaatcccagctacttgggaggctgaggcaggagaattgcttgaacatgggagatggaggttgcattgagccaagattgtgccactgcattccagcctggacgacaagagcaagactctgtctcaaaaaataaataaagacagggtctctctctgtcacccaggctggagtgcagtggtgcagttgtagttcactgcagtctcaaacacctgggctccccctgcctcagcctcctcagtagggaggactacaggtgcatgccaccatgcctggctaattttttatttttatagagacagtgtctcgctatgttgcccaggctggtcttgaactcctggcctcaagcgatcctcctgtctcggcctcttaaagtgctgagattacaggtatgagccactgcatccagctctgacagtttttgcacctaaagataaagattttgtctgtgtgcacatgtaatatacgaggaaaaattaggatgattagtcatttttcctagatattagacaagatttttctagaggtcgtgttagttcacaacattttattaaactgttttatactatgtacagtcattaaaagttgcataaaatgtgatgtacatgcacatgtgtatatgtaggtaatgaaatcttgcttctaatctagcttatttttaaggagaaagtggtgttctgaaattggttttgttatgcagaactgtggtgcaggggttcctgcacctgcagttatttatctctcatttcataactgttgtaacttaaatgtgtgtaattaacttctaatgcaaatgattagaattaggtttcttgatactcagaatccttgttaggtacatttatactcttgaaatgatttacccatctagaaacatggtccaatttcattcagaaaagtatttaaaatatgttataaaagtatagattacaaagataaatctcaaccttgtttgttacttttttcttttactcacagtgtgttatccaggattttcaagcttcggtacttcaagtgtcagattcaacttatgatgaacagtatgttttcttattaaaatgtatactttataaatgaggaaaggatttgtttaaaaaatacttaattgaataatgtttaaaatattctcactcccttttttttttttacaagtttataattccctagtagtttataattttgaagagaattattttttgtcttttgtgtaatacggtttaatatgttttcagagtggctgcacagatgccaactgttcattatgaattccccaatggctacaattgtgattttggtgcagagcggctaaagattccagaaggattatttgacccttccaatgtaaaggtataaaagcttatttcataattagcctggcttttcctatataggtaaagagcttttgtggctaaaatgttttggatatgctttactgtatgaagagcttccatgtgactacttgttttcttttgttgtaggggttatcaggaaacacaatgttaggagtcagtcatgttgtcaccacaagtgttgggatgtgtgatattgacatcagaccagtaagtgccagtctcctgttacggtttaaaggtatcttttaggggactgaaatgtccccaaatcattgttaggttgacagtgatctaatggttgtcagtgtcattgactttgaggttcattttataacagtatatgtaaaaagatgaagtactagaaaaggaaaaatgtgaaactctagagctatggtgtccagttttgtagctacccgccacatgtggcaatttaaatttaaaatagataaaaacataaaactcaattcttcagttgtagtagcctcattataaatgtggctagtggctgcatcagacagcgcagatatagaacatttgcatcatcacagaaagttattgtagactgcgctagagatttcctgaaatgtggcaaaccaaaatatgtattgttggtgattttcttacagatagcacaacttctacttttatttttcaggaaggcgtggtttaaattatatgagtaacttttacatgaagtttattttaaatgctcttcatattttttgtgctttgtcaggttttaaatactaactccatattatatacttcactcattatcagtgataggttcttggagactgcaactttaactgaaacgatgtacagtaggtccttgaaggacattgtttcaggaaaaaaattggttttgttacatgacattttgctgaaagtcagtttccaaggtcatattgatgacattaaatgaggacttactttatcttatttaaacccaattcagcttatcacccacatactgcctagattttgagtaaattaatttgcttaaagcatagtgctaataactactatgttattcaaaaaaggctttgagtggctatgaaaatcatactttattttacctttatttcacctggtaacctagtaggcatgtgatgtttctaggacaatagtagtataagtttgggatttttttagcgcaaatacaattccacctttcggggaaggtaattgaattgaagtatatttattgcaacagtgataactgtttttagtgaagtttctccttttaactaatgagatacttttgcattccattttctacttcaaaatttagatgatttagacatttgaagtatgttttaaaaataggaacttacccactaaaacagtttgacatttaactttctgatgcatacatgcaaattcaaagtaaatacactgcttataagtagtaatttatttttatttgggaagggcttagcatatgtgttttggaaaagctcccatgtgcttctgatgcttacctctgcaaaagagaaaagtagcaataattttggcgaggaatatgttcagagtttatcattgtctgtcataatcataaaataattgtctaattttgaatatcctaacttacagataagcattctttttcaaaatatttgtaattttaatttttggctggtggttgcaattaatatttccagatgagcattctttgaatatcctaacttacagataagcattctttttcaaaatatttgtaattttaatttttggctggtggttgctattaatatttccagatgagcattctaagataaagtcattataaaatgtacttctaattaaatattggcagctatctgccaaaaaaaaattatgatttttagaatgattcctttaagttagtggttcttaaaactttgtacacattaaaataatcttgggagttaaaaaccatgcctgccaggtacagtggcatgtagtcccagctacttgggagcctgaggcaggattgtttgaacccaggagtttgaggctgtggtacgctatgcctgtgcccgtgaatagccactgcattccaatgtaggcaatataacgagaccccgtctctaaaagtaaccttgcctggatcccatccccagacatttttatttaattgcccctaggaatttgtgttttaaaagctccttagatgagttgaatgtacagccaggatggagaattgatggattaagctattagttctatataatagtaaaacatttccaaaaaacgaaagggaaattgtagtagagcacatggttatatttgtagttgtatttaaaacttttggaaacatatggaactaattgatttttcttgtatttttatcctagggtctctatggcagtgtaatagtggcaggaggaaacacactaatacagagttttactgacaggttgaatagagagctgtctcagaaaactcctccagtaagttctgtttgttctttaatggtattcttcagtcatatatttcctcactgatggtgtaattttgtagataagcgtccatttttcaatagatacatgatattttgtgtgtgcctggtatagtatcactaaagttaatatcctttaatcgttttcctagttgacatctattagtttctcttaaattatttgaatctcatttattaatatttaaatatgtatagtctgctaggcactagtccctgcacaccaagggctcagtctactaggatggttagacatgcagaaaatgatgactgtaacatgctcaacaattcagtatgtcatgaacgaggtgctgttgggaacaccaagaagccactacttaactctctaggagtatcagaggatagcctcctgaagaagctatagtttgaatgaatagttcaactcattgctaatttatgaaaggatatctagatggagggaataaaaccatttacaaaaatactaagagaagacaggtatgttccagtaattcaaagtagttggcttctagtctttacgtaagtggggaaagcaatatggctagaaagatggattagtttcctagagctgccgtaacaaagtacatgttagtggcttcaaacaacagaaatttgttgtcttatagttcttgaggctagaagcctcaaggtgtcagtggagctatgctgaatctctaggggaaaatacctccttcttcacaggataaaatctagcagtggactgatgagctcatgtttgttttaaaaagatcagtgggtatattataataacttttaaaagaatagaaaaactcggtttgagaaggtaatttatatagtacttcggtaacagaatgacagttataatcttttaactttaaaatttctatcagctgggcgtggtggctcacgcctataatcccagcactttgggaggccgaggcagatggattatgaggtcagggagaccagcctggccaacatggtgaaaccccatctctactaagaatacaaaaattagctgggcctggtggcgggagcctcttaattccagctactcgggaggctgaggcaggagaattgcttgaacccgggaggtggaggttgcagtgaactgagatcacaccactgcattccaacagagcaagactccatctcaaaaaaaaaaaaaaataacaaaaattagccggacacggtggcacgtgcctgtaatcccagctacttgggaggctgagacagcagaatcgcttgaacccaggaggcggaggttgcagtaagccgagatcatgccactgcattccagtctgggtgacaaagcaagactctggctcaggaaaaaaaaacaacaacaacaaaacttcaagtgctttttttgtaaggtgttctgcactgaagattacatttaaaaaaccttattagtggttacatatgccctaacaatatctataaatctgtatatttaatagtcttttagcttcccatataaaataatgttttacgtgtgccacatttctattattaaaagtgatatctaaatatataggcacacagttgacatctgccttgtattttctaaattcttggagatctagagcatacctgaattataatactaatcattagattgattgattgattggagatttatttatttatttatttacttgagatggagtcttgctcttgtcccctaggctggagtgcagtggcacgatatcagctcactgtaacctccgcctcctgggttcaagtgattctcctacctcagcttcccaagtagctgggattacaggcatgttccaccacacccggctaattttttatttttagtagagatgcagtttctccgtgctggtcaggctgatctcaaactcccgacctcaggtgatccacccgcctcggcctcccaaagtgctgggattataggcgtgagccactgcaccggtctataatactaatgattagatttcatagaaagtccctgaataatgaatacagataagcatggcccaagctgtggtcaaggccagttagaaactatccttgtcctttaggaggtgataacaatctctgaaagaacaggaaaaaaattctatttaatagttaccaatctttcttacctacaaaaacccatgtttaccctatccccagtaccttctacccacccatatcccatactctacccacccttgctgcacacatacttatttcactttgaaaagccccaaaaatatgttcatttatagaataataggaagatgtcaacaacttgagaactgtccccagaggcagattccttggtaagagaaagaaaaaaacctcttcatataggaagtgagatataggggatagtactgtgcaataaaattgtgttatcaagagaaaatgagagtcagaacagaagcactaatttggaaggaaatagtatgaataaaaaactaacctgatatctgatggttgtgtttttatttagaagggttggggtgaactaaggagggattaggatagcatgaaagcctagaaaggaagcagttagaaggttggggaggactacagaaagggagacagattgggatgataattaggttggtgttggatgaaatgaaataataaagacttagcacagcaccagatttatagtgttaggtgtggatttgctattttaggatagaaattgtgaatgctatacttcagtatgcagctttttaaagtttgtatgttttctcatcatataatcgcatgttaaaagccataatcaaagtacttttaaaagtctgtacattagtctaacctatgcttgttatcttggctatttcaaaattaccgtattttaatcagtgtttgaaccacagggagccattatgaagtctgtcaaaattgaatttcctggctgggtgcaagtggctcatgcatgtaatcccagcactttgggaggctgagatgggccgattgcttgagtgcaaatgtgaagaccagcctggacaatatggcgaggaagaccctgtctctatttgaaaaaaaaaaaaaaaaaaagaattttctaagttgagtcacaagatttgattgtactaatgcatattcttctatttcagagtatgcggttgaaattgattgcaaataatacaacagtggaacggaggtttagctcatggattggcggctccattctagcctctttggttagtagatgagctactttgcaaaaatattcttactgaattatactaaatttagtaaaaatacaaaaaataattccagtgcttcatttgtctgtgcattttataactgtcaaatgagtggaagacctaatggaataaccagttttatgtgttctgatgtaacaaaatgcctctgcctaattagtggacatttgtcagcctaatttcaatgtcccctctcaaacagaggtggaaatatgttaatgtatgcatgccttttctaataatacccccattggcactggtcagggcttgtctggagtgcatttaaaatgaaaacattgcttctcaagttctggtcattccccagtctgcagtgagatctacagtgaggtctaggaagtcaggaattggtcttggagcaaatggtgaagtcatggtgcggggtgtaagatgttgcttggactaccatctgccttgaataaggacaaaaagtccttgtacttttctgcatcctggacttagagcatttctccccttatatacagtttatatacttatatctatactgtatatatagttacttatgtatatacatatatactgtatatatacagtttatatacatatatatgtatactgtatataaagggggaggatgccctttacctcagagcaacaaaagtaaatgtcattaagtactcattcaagccttctgacagtttctgttattgccttaggttggcatcaagccatcacacctaaaccctcagtcttccttgccagatattttctaaatcctgacaatgtaacagatacagaaggacttagtattctttttaaccataaaggcaaggctaaatagtgtgtttggatggttctggaggagggcagaaataatcgagtactattttgggggacgggactcttaaatgaattattcaaagtttaggagttacgaaaataagatattaaaaaaaacgctggtgcagtggctcacacctataattccagcactttgggaggctgaggcaggaggatcacaggtgcccaggagtatgagaccagcctgggcaacatagtgtgagaccccatctctacaacaattaaaattaggcaaggtggcatgcccctggagtcccaggctgaggtgggagcatcccttgaaccaagaagttcgaggttgtaagctacaatcacgccattgcactccagcctggctgacagagcaagaccttctctcaaaaaaaaaaaattttttaagccatttctagtaagaagtaaggcataattatataaatttctttccattttacagggtacctttcaacagatgtggatttccaagcaagaatatgaagaaggagggaagcagtgtgtagaaagaaaatgcccttgagaaagagttcccaagcttctaccttccttttgtcaccttacgtttcatagctttagtatactcaggaaaagaatgaccatcttttgtagaatgtttatacatttttgcatatttcaatttccacttaaattttttaaagctttaactggctctataaattaagtttgtgctttccttgaaatgcacttattcttattacaagcattttataattttgtataaatgtctattttctctaaatattttgctttcagtaaaatgctttccaactctgtttagtgtattaattaccagtggattggtagaactgctttttattgactagtaaaagttactgcctatgctttttaccttaggcttacagaattaaataaaaattagccattccagaaata

SEQ ID NO: 336 - DNA, 16802 bp, Homo sapiens
  source 1..16802: mol_type = other DNA
cgcgctcacgtctgaagtgggagcaatgcaccgggacagggacacctcctaggccatgcctgttccagtccagttctgcctgaaagtccggctggctcatcacctgcctaaataaaaccgtatacgggcaaactccctccgcaagcagcgcgccccagcaccggaagtgacgcgttacgtgcccgcgtattcctaccggcgtattcccgccctgcttttcgcccgccgttccgtggcgggaactgaggcgactgtggggacatcagtgatcgtaagtctcctgggcccgttattctcagattaggtgacggagctaagacttcgagaccatctcgtcctttttgtatcgcggaaacctgaggaacgagccggcggcggtgacctgcacgagaagccaggctaactggtaacctgctggaggaactgcaagcccgcttcgccttccccactcctgcccttgatgccccttgtgaggtcttccacctccttcggggccccagcctagtggccctttcatgccctggccgcgccctttggtgaaatggtggttccggacagcatcttgcaggccccggctttgggctgtattaatgtttaacagcccgaggcagggatggactaatccagtaacgttataaaaaccttggctgctaacagatattaaaaatttattttattgagcatatccccatatgccaagcaaggaactatgtatttgcatacattcttttatttaactcagttgtcctgtggaataggccttagctcctttaacagaaaaggaaaccgggtatcatagatggtaattcattcaccaaatattacggagcatctaccatgtaccaggcactgttctaggcaccagggcatgtagcagtgaaaaaaatagaattaaccggggacttttcaggcgagctaatgatgctttttatccctgaaaacagcctggaagaatgtttacctgcatgttagaaatagttaccttctgggtgggattttgtattacttttttaaatctctcatgcttttatgcattgttttgatttcttcaagtgagtgtgttatgagaaaaacagctgtttctattttaacaacagagtcccccaccttcccttccccacagaaagtctctgaaggtaggtaagcattgactctgccatgaaaataggtccctggccaggcgagatggctcacacctgtaatcccagcactttgggaggccggggcaggaggattacttgagcccaggagttccagaccagcctaggcaacatggtgaaaccctgtctctaccaaaaatttaaaaaattagccgggggtggtggcacgcacctgtagtcctagctactggggaggctgaagtgggaagatgacaggagcctgggatgtcaaggctgcagtgaaccatgattccgccactgcactccatcctaggcaaaagagtgagaccctgtctcaaaaacaacaacaacaaaaaaaggtctttgagttctgacccaaggaaaggagtgaaggttctcatttgtggtgcaagcagagcacctttaattgccgaagagtccatttcagggtctgagctagagctaggcccatgactgtgaaagaaaccatggaggcccatgtggtttggtcattagcaacatcatatttatcaatgcatttggaactcattaaacatttttgtgacatatgatctttgttctataactcctgcactagaaatagattctaagttcgttagggactttgaccacttttctgttcttgtagccctcagtacagtgcattcagagtgtcctaggtcatggggtgatgtcctttattatgtaacatctttgcacaaggctaagtttattttcgggctgtactttctcataatggttccccaccaccacccccgctttcctatggtgctgattcgcaataaaagtttcaataaaagctttttttttctgtcttgcacctgaccagggtgaagtaccatgcaagcatttcttaaaggtacatccatcagtactaaacccccgctgaccaaggatcgaggagtagctgccagtgcgggaagtagcggagagaacaagaaagccaaacccgttccctgggtggaaaaatagtaagaacacttgtgtctttgttaaaataattcataaattatctctctaaccagtactgatcacttttttttttttttaacttatggaggaatgctttgttctgtttagaagttgtctttgaaaaaaaatcacccacttatataagtcatagaaccctggaactaaagttacctgagaataatctagtttaactcccttattttgtagataaactgagatctctacaagcagaggcttccattttaggggctgggatacagaagtgaagaaaacaaaagtttctgtaaactggctataaatactaggtcaggagttctacttaaatccaaatatgtaatctgttcctccttcttctcattacaataggtggaaagtattattattattattactatttttgagacggagtctcactctgttgcccaggctggcgtgcagtggcatggtctcgactcactgcaacctccacctcctgggttcaggtgattatcctgcctcagcctcccaaatagtagggattacaggtgcccaccaccacacctggctaattttttgtatttttagtagagacggggtttcaccatgttggtcaggtcgatcgcaaactcctgacctcaagtgatccacctgccttggcttcccaaagtgctgggattacatgcatgagccaccgcgcccagccctggaaattcagttttggttagctcatacatttttgtccaaacaacacttgaattagcatttaaattgtcagtcaccacctggcatggtggctcatgcctataatcctgtatgtaatcccagcaatttgggaggccaaggtgggaggatcacttgaggccaggagttccagaccagcctggccaacatgtcgaaaccccctctttactgggaaaaaaaaaaaaaaaaaattagccaggcatgttggcgggcacctgtaatcccagctacttgggaggctgaggcacgagaatcacttgaacctgggaggcagaaattgcagtgagctgagatcacaccactgcattccagcctgggtgacagaacgagactctgtctcaaataaataaataaaattgtcagtcatctaagtgatattaccacaagtaattgtaactattggttgaatgtagcctcggtaattaccaatgtttacagattacttataggccgagtaaggccctcatatgttttttgtgtttttgttttttgcttgcctttttgtttgtttgtttttttgggacagattctcactttgtcacccaggctggagtgcagtggcgcaatgtcagctcactgcaacctctgcctcccaggttcaagtgattctcctgcctcagcctcccgagtagctgggattacagacatgccccaccacactcagctaatttttgtatttttaatagagacaaggtttcatcgtgttgaccaggctggtcttcaactcctgatctcaggtgatctgcctgccttggcctcccaaagtgctgggattacaggcgtgagtcactgcgcccagccccttatatgttttgtttggcaccaataaacctcatgaaaatctagatttttttaattatgtggaggagggtctggattttcagcttctcaggagatcaggcaacactgggggcaggttctcacatgacaggagttatatggacttgtgtactgcttctccttttggaaaggtcgtgtgttcctcaatttgccatggtccctactatatcttgcatcacactctgccttcctcactcttgttatctgcttaatctctgcaggtatttgaatatgagtccctgctttataacatatactggattcccaagagaagacattaaaaaaaaaaatcataattcctacctagtgttaacctgatttatcgaaaagtatggatcaaagaacttttgattagttaactaagcacaaagcctaagcttagagttggaagtgtaactttgttctagcttctcttaaaaatcactgttgtaagatgaaaattatatatgatacttcatattggttcagcttgttgtttttgttagccctcaatgaattgaataggtcttcatttttttatgcagttagatgatggaaaaaattggcattaaccagttaacacatactaagtatatatgtaactacattaaccaaaatagttacctatactaaggttactaaatggttttcccttttcatcttaagattcatgatcttattttgtcaaagtggaacaatgctttttttttttcttttgagacagagtcttgctctgtcgcccaggctgaagtgcagtggtgcgatcttggctcactgcaacttctgcctcctgggttcaaatgggactacaggcatgtgccaccacgcccacctaattttttttgtatttttaatacagacggggtttcaccatgttgaccaggctggtctcaaactcctgatctcaggtgatctgcctcccaaagtgctgggattacaggcgtgagccaccgcatccggccaataataatgctttctaagcaggtgttcactttaattttttttttttttttttttttgagataaagtttcgctcttgtgacccaggttggagtgcaatgatacgatctcggctcaccacaacctctgcctccagggttcaagcgcttctccttcctcagcctcccgagtagctggcattacaggcatgcaccaccatgcccggctaattttatatttttagtagagacagtgtttctccgtgttggtcaggctggtcttgaactcctgacctcaggtgatccacctgcttcagcctccctaagtgttgggattagtgtgagccatcgcacccagccccactttaatttctttttttttttttttttttttgagacagagtctccctctgtcacccaggctggagtgcagtggtgcgatctcagctcactgcaagctctgcctcccaggttcgtgccgttctcctgcctcagcctcccaagtagctgggactacaggcgctcaccaccacgcctggctaattttttgtgtttttagtagagacggggtttcactgtgttagccaggatggtcttaatcccccactttaatttctaattagtgtttgtagcatataaaataaaatcctttttctttaatttttgtgggtataacagattcgagcaatgcagaaaggaagtaaaacattatttcactctttcagaatgtgtttggttacggtaaaaacaagtggggtttccacctatttccgattatgaaaaagtttctcatttcattgctgatgtttaagaatggtcattggtattttagtagaaggaacacttgagagttttctgtggctactataatatactaaataacctctttcctccttctcaccccgcaagtcgcccaaaatgtgtggatgaagttgctttccaggaagaagtggttgcagtgctgaaaaaatctttagaaggagcagatgtgagttgcaaatggtgtttaatgtcattgggatatttaagacttaatttattcaccctctttcttcctttataacttctagccctcgttaaatatcttgctctgtgtacagtaggtccttgataactatttgtacaatgataattagttcaaatatttattgagcatctcctatttaatcttacatagcagtgttacctagtattcaagtaaaagtcatagtaattaagacaaactatgaaacatagacatagaacaagacataaaacatagaacaagacaaactatgccccttttttcatgggtttttattggtaaggaaagatagaataaacaagtaaaccaataaataattataggtagtaatatgtgctataaagaagagccagagattcctctaaagtataattgcttactaactttaggatttggattgacctataatacaaaaaaaaaatcgagctttgaattctgcttatagctctctcttctgctgtgatctgggggataaagtatccatggataacttgcattgtaaattattctgagataagataaacccatgtgaaaaattagcaacttaaagttgtgttatgatgaatgcccaaagtgctttaacagctcagtaaagtgctgaagtgggatgtggtttttgctttagtttcaagatttgcttccttcctctcaatctggctgcttttaattagaagttcttttgggttttgctgccatcattcccttgctgaaattatattactacagtacacattttgaaagaagttaaatttataaaactatttagaatctttttctttaccagtatgtgttttgatttgactcgcatactcttatacctttttggccggccacagtggctcacgcctgtaatcctagcgtttcgggaggctgagatgggaagatcacttgaggtcaggagttcaagaccagcctggccaacatggtgaaaccccatctctaccaaaaattagaaaaagtagccaggcgtggtggcacacacctgtagtcccagctactcaggaggctaaagcgggagaatcatttgaacctgggaggcggaggggttgcagtgagccaagattgtgccactgtactccagcctgggtgacagagtgagactctggtctcaaaaataaataaataaataagtaataaaaaataaataacacaaatactcttataccttttaattttataatagtatagcattttattttttggtatattctgcttgcatatcttggtaacagtatataccattttaattgcagttgcatagtaattacacagattgcaggacaatatctaatttaattactagtatcttcagcaaatgtagtgagattaagatccagttcttttgtttttttgtttttttttgtaattgagacagagtcttgctctgtcacgcaggctggagtgcagtggcgtgataccagctcactgcaacctccgcctcccaggctcaagtgatcctcccacctcagcctcccaagtagctgggactacaggcatgcaccaccacacacagctcatttttgtatttttagtagagatggtgtttagccatgtcaagtgacctgcccgctttggccacctaaaatgctgggattacaggcatgagccatcatgcccagcctaagatctagttcttgactttatgccacgtaatttatgaggctgaagtaagaacttcagtttaatattttgtgcaccttttcagactaagttttgtaaagaggtgaaatagtttttttaattcaaaagagtaaaggaaaacaattcattcaatttattttgaaaggttttaaagaattataagaagataattttttcagaaattgattttaagaactggtattccacatacagttcttgaatgtactacatatattagactagtgtataattaaggtttaataattttaccctgtttcaaagaatttaaattattgtatctgatagttaacctggatgaatcgttacattgttaagggatgcacagatcaaaataatagttgtagaccttaattactaagaagcctgggaggtttttaagttatgaatctcatagtttgttctgtaagctatatgttatgaatgtaacagtaatagtcttctaattaacatatttgtctatgtattggtttattcattcatttggccaacattgactactgtagtagatgctagaatacagatgtgaatagaacaaataaggttcttggtcttttaatgaagtagacaggcattttacaattaagccccacagtgaaataacaataaaccaatgcaaaatgcaacaaacactaatgagagaataggagaggagacctactttagactgaatggtttctgatttgtaatgcattaggagttggccaggcagaaagaagaggatcagactccaggtcatgggagcaacatatgttcgggccagaaagtgccaagctgttagaagccattgtaagctagagcctggaaggtgaaggaggtggtaggcagatcatggaagtcctttaggccatggtaaaaagctgagggttttttggtttgtttttgtttttctaagtggaatagttttaagtagcaagcagagtggtatctgatttaggtgaagaatgaatggacaggaagagggagggttaggcaagagtggaaacaaactctaatgcctagtttcctgtgtacactgatttccttatgtgacaggacatactgaagattgcacagtatcataacagagctcattagaatttagttgacttattaattttcaccacggatcagtcgactgcttgataggagccaaactagctagatacaaggtataaaagaaggtagctagtgatttaattttatcctttcctcttctaatgaattctccctgatacatgcaagcatccttacagagtgcataatcatgatgtggagcagtgcctagtacttaatatatatctagttttggattttttgttaatatttctgttcttggtacttctgctcatccaaagccctaattatgtcttttttagtcctttttcctcagttttggccaaatcccattactcttttggtctgcttcccctttgaagcagctgacattttgtgtaatataaaatcttacctaatcttgagcatagaggtgggataggaaactgagattccctttagaaataaaaggtttctcattccagctttgaaaatttcacctaagtggattagctatagagcaagcataaatattggttcagcttaagagattaaaaagacacttggggaaaaaagtggtagtatatgaaaaagcaggatttaaatctgtcagtactatgatatcagttatattaagaaaactttatacttagaaattacgtgccctattagagaagtcattgcactattccacagacatttttttcgatcttccttttcatctatttgtgccagaataccatttattaaaaataaaatttaatttctacagcttcctaatctcttgttttacggaccacctggaactggaaaaacatccactattttggcagcagctagagaactctttgggtacgttgaaatcagtctgtttttctttttttaaagatttgacaccaaaattctctgatattgctttttttcctctaaaaatttgcgtttcgttttctgtaggatagttttctatttctgatttttaaaaatcccatgagccattttgttcctccctcactcccctgaagaaatcagcttgcctgcgtcttttgtgaccttcattgtgaatcttgttcaagtgtggggagcctatgattttttccatcactttctttaaattttccattataactttggagtccagagggcccaacttaatgtccagttgtgctgatagttttatcaccctcttaatgattgtgttcacatctgtgtggctacatgatagaatctgctgtttctgatggcactatttgcaccatccattcttgagtcctgctctggacttcctaggctctgactctggagtggccagtccagctccttgcctcaggtctcctgagcacaagtgatggttgatgtagtgtgattccaggtacaccagaaaatcttcctgtgagtcaccttcttatgttcctcttcctagattgaccatcttggcttaaccagccattctagaggagccctttacctagagttaaaagatgtgtagtgggctgggtctgatatacatgaaacatgcaccaacataacaaaggctgttttgagtttatccagaattaatatcagacatacaactgatagaaatatctgaaatcctacatatgaaaataggctgggtgtggtggctcacatctgtaatcccagcactttgggaggccgaggcaggtggatcacctggggtgaggagttcgaaaccagcctggccaacatggtgaaaccccatctctactaaaaatacaaaaatttgccaggcatggtggcatgcacctgtagtcccagctactcggcaggctgaggcaggagaatcacttgaacctgggaggcagaggttgcagtgagccgagatcacgccactgcactccagcctgggtgacagagcgagactccgtctcaaaaaaaaaaagacgccactgaaatcaccaaatgtgtaaggattattagttatgtcaaaatgtaaaagacaaagggagaagctgctatgtgcctaatattttatttgacagcaattttttattctcagtaaaattatagaagaacttttttgattattccacaactcaatcagatagaaccaatctgaatcagccttaacagttgtttattattacttagagtaggtcagtccagattatacaactttttctatatcctttatgaaataatgtttgtctttaaagaacttactttaacagtgaatttcatatttaatattgtggctttaaaatagaaaatagatgcatgtaaatgtttatgtccataaacatgcttaggataccatgctgattaggaaaaatagagatgaaactaaatcacaactcttgttttttatttaaatgtgtgtgtgtgtgtgtgtgtgtgtgtgtaaaagactagagggaagtttcaaaaacagtgctttgacagtgtgcccacttttttcttttgatttctcaaatttctctacagtaagcatatattacttttagtaatttttattaaaactcactttaaaaacctgctcatgttttaatccattaattttccttaatccagtaggtttccttatagcaaactaccctgtggaatttatttatttatttgtttatttatttatttttgagacagtgtctcgctctattgcccaggctggagtgcagtggtgcgatctcggctcactgcaacctccacatcccgggttcaagcaatcctcctgcctcagcctcctgagtagctggcactacaggtgcctgtaaccacgcccagctaatttttgtatttttagtagagacagggtttcaccacgttggtcaggctggtctcgaactcctgacctcgtgatccacccgcctcggcctcccaaagtgctgggattacaggcatgagccaccacatccggccggaaataatttaaaatgtgctatattataacattatttaaaattacagtatttaaaactatctagatgtctaacaatagaagaatgtgaagtaaatgatggtacagtcataggatggaatatcatatgactattaaaatgttatttacagtggttttgataatatgccaagatacttattataaatgcaaagtggaaaatcgatttaaaattttatatgtggggccaggtgtggtgcctcacacctgtaatcccaacattttgggaggccaaggtggaaggatcacctgagaccagcctggccacataatgagtccctgcctctacaaaaagtaaacaaaattagccaggtgtgatggcatgtgcctatagtcccagctagttgggaagctaaggtgggaggatcatttgagcccaggagttcaaggctgcagtgagccatcatcatgccactgttctccagcctgagtgacagagcaagaccttgtctccaaaaaaataaaaagaaaagaaattgtatatgttatgtaatgtctacatttttttaaatgcatggaaaaaagccaaaatgttaactgcagcactctgctgaagcgagaatgcaaaagtgattgtgtgccttctatccatgttgtttactaggtggattttaaacgtctgcaaagtgtgcaaatgttaaaatgtgatttaagcctacttgtgctctatgtttcatatttgtttcattttgagataggcctgaacttttccgattaagagttcttgagttaaatgcatctgatgaacgtggaatacaagtagttcgagagaaagtgaaaaattttgctcaattaactgtgtcaggaagtcgctcagagtaagtaaatttgccctccctcctccatagcatgtattattttaaatatgtatttctgccatcgctcctcagccttttggctaagatcaagtgtatttctgccaaattgtcaacttttcatgttagaagactatcctgcctgaggtaaacagggatttaatcaactacttatgctccttaggtggcaaaggtccaggattacattggtggtacctagacatatgtgtaaattttacatgagcacatttcaaaatttgtgaaagtgaatgactaatttttgatatgcaccttaaattgatggtgcagtcagtcacaaccgctatagcacctaatgtatttttatgtgaaatgaagactgggaggtggactaaaagactctgagatcccttctaccattaatacttgaaatctgttttcttggtataattttcatacaattatgttaatgccacttttggtgggagaaaaactttaatggcagattaccaaaaatcaatgtacagaaggtaataacccgcaacgtgggagaaaatatttacaaatcatatacctaaaaaggtacttatatctagaacatatgaagaactttaaaaactcagtaataaaaacaaataacccaattaaaaaatgggcaaaggccgggcgcagtggttcacacctgtaatcccagcactttgggaggccgaggcaggtggatcacaaggtcaggagatcgagaccatcctggcgaacatggtgaaaccccatctctactaaaaatacaaaaaattagctgggtgtggtggcgggcgcctgtagtcccagctactcgggaggctgaggcaggagtatggcgtgaacccaggaggcagagcttgcagtgagccaagatcgcaccactgcactccagcctgggcgacagagcaagactctatctcaaaaaaaaaaaaaaggcaaaggatctgcatagacatttcgtgcatgtgtaataagcacattaaaagatgctcatcaacatcattatccatttgggaaatgaaaatcaaagccacattgaaataccacgtaactcccactaggatggctatgataaaaaatacagaaaataactagcattgacaaggatgtggagaaatggtaaaccgcatacattgctggttggaatgtaaaatggtacagcctcttggaagacatgtctgctcaaaaacatgtacacaaatgttcacagcagcattattcttaatagccaaaacatggaaacagcccaaatgtccaaccgattaatggatgaataaatgtggtgtatctatttgccatagtatttgacaatacaaaggaatgacgcaaacacatgctacaatatggatgaacctttaaaatatgttaagtggaagaagtcagccacaaaagactgcatattatatgttccattcatatcatgtccagaataggcaaatctatagagatgaaagtagactaatgattgcctagagctgggaatgactgggggaagaagagtgactcctaataggtacaaagtttcttttaggagtgataaaaatgttctaaaattagattgtggtaatggttgcacaactttgtgaacatacagaaaaacactgaattgtacattttaaatgggtgaattgtatggtacgtgtatctttcaacaaagctgttaaaaccaatatacatattaatgttcaactcttatgtgtttctctgaatcagtgggaagccgtgtccgccttttaagattgtgattctggatgaagcagattctatgacctcagctgctcaggcagctttaagacgtaccatggagaaggagtcgaaaaccacccgattctgtcttatctgtaactatgtcagtcggtatgtatattgccctgaagacagatgctaggcagccttattttcataacccaattagggaaaggaaatttaggattttcaaggctacattaatttttcctccatcaaatcttgatttgttcttgataaaaatgagttcttttggggaaattctttctttagacaccaacttggtttttctcatcttccacagaataattgaacccctgacctctagatgttcaaaattccgcttcaagcctctgtcagataaaattcaacagcagcgattactagacattgccaagaaggaaaatgtcaaaattagtgatgaggtaattactaattattacaattattagagttactaattcctttgatgaatgcatataaagaggccctgaaagatttaaatgtgtgttgcctcaatcctgatgccagttcttcagacaaacttaagctaaaggggcaacaattgaaatgtgtaggaattacaaggtttagcttttctattactttttgagttaattatcttttaatatatcagagacccgaaactgaggtggatttcatacatataatgcaaattctgcaacataaatctctgcatgatgacaagattttagtcttctagctaatacttcagtacttccctaaaattgatagaaacataaggcccttattcattataacagaatttaaccataatttgaatttgctttacgtgagcaagaaaatgggataaatatggaacattttttcatctctgcaaatttatttcagaagcaagagatctctatccttccattgtacccggcccctagactgatcatattttctcccaaaacagaaatgttttttctcattaactctagactaaaacagggtttttcacttttattaaacattttaaaattaaagttataaatccttaattggccatcataggttaaaaacaactcttttctcttcagggaatagcttatcttgttaaagtgtcagaaggagacttaagaaaagccattacatttcttcaaagcgctactcgattaacaggtggaaaggagatcacagagaaagtgattacagacattgccggggtaagagtactggatattctgaatttctttttagttggcttttttgtggcttttaggaaattttcatccaacaaatactgggtgtttagcaagtgccaagtactgcactaggaagtataagggaataacctgggagtatcagagtgtttgaggtgaggagatagcactgacttttcagtttgtcaggcatgtaacagacatttcaggaaagaaaaggacactttcagttgttagtttttttgtttttttttttttgagacagagtcttgctgtgtcgcccaggctggagtgcagtgacgcaataccgactcactgcaacctccacctcccgcctcaccctcccaattagctgggattacaggcacctgccaccatgcccagctaatttgtatatttttagtagagacggggtttcacgatgttggttgaccaggctggtatggaactcctgacctcaggtgatccgccccccgcttagccttccaaagtgctgggattataggtgggagccaccgcacccagccttcagtttttagattttataagagatgcctttggcagttaaatcaattttagcagatgttcttatacatgaaaactattttgccagttgtatataaacaaaaggcatatccaacttacagtaatcatttattaaagagaatggagtaccccacttgtctttggatactcccatgtaaaaactcacttcagaatcactactacttaacaacttttgtttctgtgacatttttcacctgcacggtaggccttccatatgacaagactggtaccactaatcctctttgtttctatgacgtttttcaccttcacggtaggccttccatatgacaagactggtaccactaatcctctttaattttctggatattgtggactttttaaaccaatctcattagtggcatctttacatggagacattgagagaaagggcacttcccctttaaagaaatcagtctttttgattgatcttggccactgttctgaggaatcgttatagccgctaggggaaaacttaatcttcatccactgaccagaacaagctataatccatgtgtgcccaaacttggaagttcacaaagccattaaagggctttaaaagcacagttgttagcaccttggttgcttagtggtgactggagttactctggccctttccgttctcccaaagccttcccaggaaagtatggaacttaggtgtggaacagaaatgactgggggcacgggggccagttggcagagtgtatgtctagtctcacctagaaacatctttaataccgaacattcaattacctaggtaataccagctgagaaaattgatggagtatttgctgcctgtcagagtggctcttttgacaaactagaagctgtggtcaaggtaaagtcagcttactaactttggggaaaggaatattaagtcatcataccaaaagttttttttattataggatttaatagatgagggtcatgcagcaactcagctcgtcaatcaactccatgatgtggttgtagaaaataacttatctgataaacagaagtctattatcacagaaaaacttgccgtaagtaggtactttgcacatgtcaatggaacatttaactacctgaaggatgctaatttcttaaatttttctcgtaggaagttgacaaatgcctagcagatggtgctgatgaacatttgcaactcatcagcctttgtgcaactgtgatgcagcagttatctcagaattgttaacgtgaatatatctggatggggggttttgtaaataatgaagttgtaataaaaataaaatgaccaaaagcaccttta

SEQ ID NO: 337 - DNA, 32742 bp, Homo sapiens
  source 1..32742: mol_type = other DNA
acacacagagtgatacaaatacctgcttgagcccctcagttattttctctcaagggctgaagtcagccacacaggataaaggagggaagggaaggagcagatcttttcggtaggaagacagattttgttgtcaggttcctgggagtgcaagagcaagtcaaaggagagagagaggagagaggaaaagccagagggagagagggggagaggggatctgttgcaggcaggggaaggcgtgacctgaatggagaatgccagccaattccagagacacacagggacctcagaacaaagataaggcatcacggacaccacaccgggcacgagctcacaggcaagtcaagctgggaggaccaaggccgggcagccgggagcacccaaggcaggaaaatgaggtacgtgccaggggaggagagggcacggttcccttttggggaccagtgtcaaatagcagggaaggtctgaccttgtcactgacagactcacctgcgtgtcctgcatgtggtagtgaggggctttctcatcaattcttagggctctgagaagggagctgtgggtgggctgggtgccttccccaggactccaggagacataaaacttgaaacgggagacttcgtgcaaatcctgctccggacgctgctgaagctcagatttctcccactgcctgcacagggtgctgcctgctggcgaatgtgactctcctcctgttcacccacaaggctgatttttccgtgttcctcctctggaaagagcattgctttctctcttccagcactttgtgagttagatatgtgtttgtgtgttcattccttctgaccagaaaagaaaccagcttcccatagcttggctctgtggtttcttcaacctttacaagtttgccagttaaacctcaatttagaaaactaaaaatctgtccccattttacagttccctataaattttctgcatttctcattgaaatcagaggcagctggtggcatgaatcaggctatgaagtacaccaaatggctcttaaagagatatcatacttaaaaaaaaaaaaaggattttagagttctgaaatcaagaacttcaaattctaattggttttaaactctttaacctttcttattcctcattatacttgacactccttaccagacctttcatacaagttctatcctgcaagtctgaaaacccaaccaccctagttatttttattagttaagtgttaatgctgttacacacacacacacacacacacacacacacaatgctctgcagatgtgtaagtccctaaacacatcttttactattaattttcttttcacttgggaaagtgtttttatttgtttctcttctgcaaagtaacctagcaacttttctggacctgagaccaatgagaggcttcagactatgttaactctttgaactccgattacctgtggttcagagagataaccaggtccttaaaaagtgagtgcaataattctgttcttcttaaagccatagtaattttaaacctgccattaaacatcatttttctttctccaaaaaaaagtgatttatgtcaatctacattgaatgataatctcatttatctgtcaatgatctggtctgaatcccaccctaccattcagtgccccagcccatatcaaactacttggctgagtaacaattctgtatctttgcatatgctcatccctcaacctggagcaaccttcttctttattttccacctagaagacctgattgttcaagctggcacaaatatctctttctctctcctgaccaccatattccagagtgagcatcccctcctttgtcctttgttctgtttctgtcccttgaagctgcatctcttattgtccttgtagtatccccttgtttaaatgtccacctccccttacaagtctcagcactccttaagttacatgatctatgtcttcatctttgtatggccagcacctagcataatgtctatttcctaccagccattcaatacctatttgttgaattgaattcaatttttgaatagccaagcaactacgagaaaggtgctctgctagaaaagtctccagcaggtcttgtctcacatggatacagtatttcagtgtttgcagagcactttcaagagcactgtctcatgggggtttcagattctggatgaagtaaggatttatggataagtagtgggtataaaagcagttaagcaacttgcccaaaccacactgatgatcatgaaaaggtccagattcaaatttgggtcttcgggctccaagttcaggattttttctactatattccactagactttcagccaagtgtattattctaaactgacggctcataattctgactgtacgtcggaatgatctgtgctgccttgaaacatgccagtgctcaggcctcaccccagagcaattaaaccagaacctcctgaggagggactttggcattaatatttttaaattttttacgtaaagccatgggtttttcaattatttttcacaggattaattgctttggccagatgcctgggcatgatatgggcatggacccagcttcttctgtgagctctttttattcccttcttctgttgaagttaattcaccatatggtattgagcatgatgtgacatctcttggggtatccttttcatcgtctgtcaaattagggtgctctgtaaaggatccatgcagtcccttccaactcttcaattcaaaaatggagtcttggtgtggagtgggttgaaacaaggggcgtgtacggacagtgtatggaaaagatagcaagtgccgttcatgccgcaatcatagatatatgcaggcatttttacagagtcctgctagcctgttcctacggggggcctctgaaatctcagctctatatattacttttgacatttctgcaatgtagctaaactttttgattagccggaggatagatagcaggtgttgggaactatacagccggtgcctcgtatacaagaagccaaaaacattcagagagtgtgacgaggaatgaaagctgccacttatattcttcaatttacagcccctaacgcaagcaggcaagcatatgctcaagcccattacatgaagggagatatttgtttcatatgtttgaaaccgttttgagatgcaaacaaagtagaagggaaagcttcctgggccttcctcccacgctgaccagttgcctaccacacatggcaccgggcttctgggctacacagggctgtctgctgccagtccttgacagaaccggcctcaggaggctcagtgtctcctcgatgtggtctggaaaaagcagtcatggaggaagttgacctttcggccttgcataatttgggtgtcgctattatagggaagtccggtttaggagccaaagctcattcctgactcttgctttttgggaactggcaggatggaataattataactaatgtttggctagggctggacagttaacaaaatacttccccatcctcctttacgctgatagcagtgctgtgggaagtcgttattattactacttaatggatgaggaaacaagacctcccatgacctcctaaaatggaaaggataaataaagtcaaagctggagctgaatctagctcttttgacccagggccagtgccctcccctcctcagcagggctgaacctgaactcccagccctgttaacactggttcatttcctcacttgaaaatgggatgcctgggccctgccacctggttttttgactcagctttccaactaattcacaggttaacttggacatatgccttcccttccttctgcctctgaggccctccttccacagattggtttaagaaaatattgacattggctatgggattaagacattttgttttcttaatagaatctcacatattgctattgtagggaccttgaaaaaaattaaataaatgtattttctttttattgaaaaaatagtacatggtccttcttgacaaatgtaaacattttatatgcacaaaaatggaaatacttatattcccatttcagagataactactgtcaataccttggtgtatatcctttcagacattttgtacttacctatttacactttatgtaaatattaacatgacatagctacataatctatgtatgtagttaacttgctctgtttacatacccaaaaactcaaatgtatgcattacacagatatatgcatctgaatacatgggcagactgggtattggagagaaacaacgtcctgattagcaaatatatcattgttaatctgaagatgctggtatggtttcccagcattgactttttaggctatctaagactcaggccccactttcatggattcattcatttataatctgttatatatcagactctgtactgggacctttatatacatcacctttagtgctcataggagccttatgaattagatattataatctccattttacttctgaggaaactggggctcagggagactagttgcccaagttttcacagtcagtaagtgaaagaattgggacttaaatccaagtacatttcactccaaagggtgtgtctaacgtagtgcaatgtgatacccacaataatagagaaatgtgcagggagcagtggcttgtggaggagtgaaaggatactccatagctgggaagctctgagctggatggtggaggataagcaagacagtggaggataagtaggtgaggagtgagcagggcacatgcaatgaggctggaatggaagggcatggtgtgctcccagaataacagggggctcacagggctggctactgagatgaggtgggaaggacagatcagccagatcaaaagggcctcaacagccatcccaggagcagacgctttaccctgcagacacagtagaacagtgtggtcctatctgtgtttgagaaaatcagctttggcagaagactgctggtgggtgggttggggatatcagttaggatgctatagcaataagccatataggagaatgtaaactatgtaattaactggagaggaggagagatggatttccaaaacacaggaagcagaataagtaggatgtggtgactcttgactctggggtaaatgaaaagatgaatggttaaagttcaggccagggaactggttgatggtagtaccatgaacagaaatcagaaatgagagcaggaaaagattaggagaggagtgatgaggcaagtttgggcccattaagttcaaggttactggacctcacaggggaatcggtctgttagacagaagcctggtgtggtgagtacagactgaccagaagggctttgaccagccttagtcattctgcctcgttattgcgtcagccatggtgacgtgctctgtaagttttattgaattttccttgtctcttttgcaactctttattagtctattatttctgattcctacaggaataagttgtaggtttttgatccttttaccaagaggaagaaaacttgctttgcttattctttctttattaaagattttgcatactttgactgagtttgtggtgaaataccattttcaacgttaaatctgtttaaggtactacagattccatcaatgcatttaagcctcacccagtatgataacatttactttttcaaaaagagaatcaagagttaaatgaagctgagctaaagaaatatcaacttttacttaattatgaaaattacattttcaacagtaaaatggaaatgtcagactcccaaatgtgatactttctaggagtttaagttaacactattatcagagctttgaatgagcaaaaccagaagaaatcttagaaattatctagttactatattcccataatacagactgaggaggcaaggtcagaaggggaaagctaattacggcaggccagagacagagacatgctgagatcttgttctcctggctgtgattgagatgaatggcaggggcctgtgtttataaatgtaagtagacctacattcatgtctttcaggtggctgcttctctattatgctctgtgcttctccctgtcaaaggcttcagcccacaccgtggagctaaacaatatgtttggccagatccagtcgcctggttatccagactcctatcccagtgattcagaggtgacttggaatatcactgtcccagatgggtttcggatcaagctttacttcatgcacttcaacttggaatcctcctacctttgtgaatatgactatgtgaaggtgagactcctgatgtcccctaactgggccaggctctcttctgggatttagacaaggcaatatgaaattagacccttccagggtggcatatagtaagagagacacacaacatcacaatggtatgaattcaggtcaaggtggaaagctaagtgcaagctgatgggtagaactagaaaggtccatgaaggaaactgaagctgattgatagagtatgactcagcccaacacaacatcccttctttcttcctgttctcaaagcctttagtgtttctaccagcctctgttccaagatcacctttaattcaacaagcagaaaagggcagagacctcagagtaagcagtaatcatggaaagagaaccataattatgtccaaagttgaggcattagaaagcattgtccaatttcccaaataaagatcaagtatttgggaagtgcaggatatacagtagtaaagagtcagagatgaagtaggaaggtgagtggaggcgagattcttaagggccttgaatgtcatgccaagtagtttgcattttatcagcaaaaagtgtgggtaggaaggggacggtcaccatcagaagtagatgtaaaaagtaaatatgggggaagagcaggaccacatcaaaacaatataccctggaatttagagaaccccccacaaaaaaaaaaattccatgggtgggaagctgttcttcttttaaagtgaggctgaaaaaggtcagaatatttctaagggatcaagtttattgcagttatatctagttaaaaaagacgtggagacctaagaacctaccttctaagctctctccagcttcctgaaagaggttctcatcaaacaactctagagcatttagatatttttagtattattgtagactcattattccatagccagtaattcaacatgaattaaccttgtattaaccagaatatttggtcaacagcagagaagtgagtttacaaggtgcttttacaattataatctcaatcaaactttaaaacaattttgagacaggagccatgaccccatttcacaggtaaagaagtaacccaggaaggttaagcaactcacccaaggttgtacatctggtaagtgatggattaaggtctcaaacccatgccttgtgtttttgaatcacatgctcttttgtctacaccaaacaactcccaagctattctccactgagcctaagatacagcagaggcatacaaaggcactgtgcttccgcttattttatatgtagagtattgtcattgtatatgttgggtctgcctgcaatgtcccatttacaataggtctctgcgtctaaaaattttccaaaattggtgttccatggtagggatttttaacctcagcactactgatattttgaaccagatcatttgctgagaaaagctgtcttgagcattgtgggatttttagcaacatccctagcttctaccctaactaggtgccagtagcagccccggccccaccagttatggcaatcataaatgtgtccagatgttgttcaatgtcccagaaccactgctatatgggatgatgccctcttagaatgccctgtgctagggacggtggaaattttaggacacaaaagatctggtcccttaaaaagaaagatgagtcttgaaaatagccattgcacaagatagaaaacagtgatggcaataaagactaactgataaagaatgagaaaatgtggaactggttgctctaagagacaacgcggattggtaatctagatgcgatttctacaaattcattaaaaatagaacaaatttctcagggtcacaaggatcaaccaggggggtcttcactgaggccatgagtatgtatcatcctaaactgaactttctgacaaaaaggccagttacgcttttcaggataaaagggttatccagagttaaactccaggataagatggattgtaggtatgggtcctcaggctaagtggaatctcccggcccattcccccaaataatgttggtcacaaaatcatggcattctttagtattttggttggagagttgtcttaaccggaagaaaaattaccaaacactggtttaatatgacaataagttccatggatttagacaaggctagatatgaactttctaaccacatttttctctactttcaaacatgctaaccatctagaaattttgtcagtgccaatagcttttattggtacctgaggctcaagatcacagaaattatagaatttttttgctcagttgtagggatgacttcttctcataatttgccccctctcctccttaagatttgactcttaacttcatagtcattgagaaactctttctcttaagtttgattctttttcagacagaagacaaatttaaccttgttaggtctccttcatcaagatgataaacacacaagagaggatttagctcatttctttgctccaaataagtggagtatccaaggaaggcagatgaagcagctgacataaagcagcattttgttaatgggaaaaaatgatgatacttttcaagagcaataatataatctgaagacctcttctaacactgaattaaagacactggaatagatttctatccaaagcttgactttcttggctagagaatattttggaaattggttgatggtttctatctagagtggtgagactccttcctgaaaccacaagtagatggacatgggccctctggaaggggcagcatggtcctgggcccttacatggaattcaggaaatgccttttctggtctcagatctgtcactaactccccaaatgacatggagtggagaagaatattattttacagcaccctctctgctccaaaattagacagatgacctctgggcataacagagaagtagtctacttgaggcaacttagggactgagctgcctacctgaagtgccctacagtccttgcatctgtgagttgggacaattttccagttcctttcaaagaagagattaacatggtggcggcgggaggtgagatagacttctccacttgtgcttgcacagctgactctcttccagaaggccaccctaatgtcagcattagccttctgcagaggttccaacagccgtggggcaccagcaggcctcccctctgcaggatgctgcatgctagttggctgactactggtgctcatgtggaaaccaccctgtgcccctgcctacacacacccagtgagttgccctcctagagctgagaactcacagaatgtcaggctgcaggggccctctggggacgcatctcatcttaagttgtggttttcaaatatattctccccagtacacgttttcttcttcttctttttttttttttttttgaaacggaatcttgctctgttgccaggctggagtgcagtggcgggatctcggctcagtgcaaactccacctcccgggttcaagtgattcccctgcctcagcctcctgagcagctgggacgacaggcacatgccaccatgcctgactaattttttgtattttagcagagacggggtttcaccatgttggccaggatggtcttgacctcctgacctcgtgatcctcccacctcggcctcccaaagtgggttacagacgtgagccactgcacccggcccacattttcttcttgaaaatcttcagttaggcccaacgtagagaagagacagaagtgagctgctctagctgaaggtggttttgcttgctcatccttcttggttaccctgaagcaccttgagggattatggcttgaatcttgctgctctggccacattcctattggacagaagaggaggtcagagttcagagagtgggtgagcagtctgcctctgaaatcccaaacccagaagtcttacacactgagttgaaacccactgactttttctaatcgcctggccaatgctagcccctagcatatatgctttttctggctataaatggaagagaagcttttccctttccatctgaataaaagcgcaaatatgccatgtggcccccaggtaaatccacatccctctccaaaattctgttttttcctctgttcagtgagaggatggaacaagatgatccccatggtcctttcaattctggaattgtaatcccaatcctcctcaccagaacttccaagatgaccccaccaaacactccttatcatagtcaggataacaccagaaaacagaaatcgtatgtttacagcagctgcttctcaatgttgcataactgcaagcactccagtaggagcctgcagcctgctggggatgccttggtggtatgtcatcacagaacttgtaaacatatcatgccaacactgttctttaccaagaaacttaaaatatcactgacttgcctttgacaggataaaattccctgttttgaggcatttttcctctatgactaaattctcctcacaggcctacataggagtaggtttaagaaaccttccaactcacaggaacattttccagcccagcccaaccccgcaagctgcccttcccacccaggcccataggggcgatgatgatggaactgctcatactgctcatcagtagcctgaagaagagcaggactcccaagtctgtggtccggatgctcacatttatgaaaattcctctcctgcctgatttcccacagttcttggtcttcaagactcatgcacatctgcacagcagcatctgcttccttggcatgtggctgcaatgtttagattcctgtagtgtacggatgaggcatacgaatcaaggctggttaatgctgcaggcaagaggcaaagcacagatactagtcagggagtcaggcagcctgggtcctgggtgtcattctatactcattaaccttgggcagatgactgcacctaaaatggactctgtttcctcctctttcaaatacaaacggttaaaccagatggtctctaaggtctactttgccttgatgttctgtgcatctaagaccttagaaatcatgatccaaccccatgatcaacatgtccaaagtccagggaagggcagttgattggccaacatcatgcttgtattagaatttacatcttaagattctcagtcttttcttctatttatttaacagaattatttaacagattaaaaaacagcaaagtcccatcttgtgaatgactagtttttatgttgtaacataagacaaatattgtctctagtcaaacttaccattaaaaaatcccttaaatattgcaaagcattatcttttagatgcccagaaaagaatttttttccaaaaatgcaagaaattaaagttcctttggttgagcaccagatgaagtggtccatttatacttacaaagaaactatgaagctatagttatggagagagtctagatagttagaaaccagaaccaacaagagaacagcagattacacgttccaatttcaagttcatttcatggcatctattcactgtaaaaggaagcataaatcatctgcatttggattgcactctctttctttctttctctttatgtcaccatgtgtaatattttaatagcatctgtgacatgtttatgtaatgcaatgccactgttctccttttaaccctatatccttgatgtattcgacatttcttccatcctctccactgctaattccttagttccaattcttattcctctcaactagtctattgtaatagccttctatatgtctaccagatgtcagcctctccccatctagcctaccttctatgagtatccagaaggatcttcttggaacatagctttgattatgctactctaaaaatctttcaatgcctccccattgtctatggaatgaagcacagtaatcctattgaaaatctaccataagctggacactatgccaaagactgggtctgcaaagatcagtaaaaagaattcttcgaagtaaaatgaactataaagtcctcaaggaattcacggttccatagaatataatgaaataagtgcataataaagccagacaaagtaacacaagggttatcagtcagtatataagtttgggagtggtcatttttagatggccagggagggctttggaaatagttgatgtttgagattagtctttagaggtaaataataatttggcagtgcagttctctaagtaggatttcttagcagagctaccatcaaagcagggaggttgaagaggatgggaatgatgcaaaactgagaataatcagagttggcatgttttggggagacgtaaagcccagaaaggttatctgagggtcaactgagaaatgtttggtaaatttgggtttaagcatgtgctccccaaatcacatacgtgtggtcaaaggttgaattaatttcacagatggattttgttggccagcctaatattaacttatactatgatttgggggtgtaaaaaaaagaaagaattatgacaacataaaatttccgatctcacacaacaatctgcatttccaagttctcttagaatattagaaaatctggcaactcttgcagcttcctgccttcaacaatcagccaacaccaggaagaggtggccttgtgggtagggtccccaccattctctatagctcccccatgctaatgctttctggcctcttaatggcaccattgctgattttacagtaaagaaagtgaatcatttttccccagtgtctctatcaaaagtagaaaagttgaaagttcttgagaaagacacgtatttcaggaaaaatttctttgcagagtgaagaatatccctctgtatttaacacgcaaagtgtatatttctgtctaaagaattcatagcagcttgtttcactcatttatgttttctgcctggcatcttttagcattttagtctaggacgtccaattagaagctgtgatgtggcggaggggtggggcagtggggttcggggatgtgacacagtcgagggtatgcttgaggaaggttaatctggagctacatgagggatgtcaaggactagtaaagtcaaaataaactggagctgctgaatgaggccatttaggtggctgtgctaaatagattggatatgactatgtggagcgtagtatacttcaagaaagcccacaggcctcctggacagctatggaagagcaggtaggatgtgcagaggtaaactccacaggaactggctgcgtatgggagaggaaaaaggaggaatcagaggctttaagccccagttatgacaacttattggctacttacccagaaattgagatcaggaacgtgaagatgtgtagatttagaaagatatagagtgcactgaagtgcattgagttttgaatacagctggaaatgctggtctaaattttgagacagagcttaaagagtcgtaagagtgggtgtagaaagagcacagagacagtgatggagagaggattaacacagtgaggattaaattctgtctctgccaccatctgagtgaggaaccttggtgaagctccttgatctccctcagcaatggttttgtcatcagttgaaaggaagagttcctaatgaatacaacgtcttcctcacaggttgtgggaggatttgaatgacatgagggtctaagtggaatcagtactgcaaaacgcagttgtgctcagtggttgggagctcaaactttggagtcattcagacccagcgtcaagtcttgcctccacttcttactggagcagttgcttaaccttgctaagattttcttctccatctgtaaaatggagataataatgatgcttatttcatagacttactgtgaatgccaaatgaagtaaatgctttaatgtcatatgtccaacacatctctaattagctcaaaagtactattatagtggtaatgaaggcaatggtatgagtaataaagtgtctgcctggtatcaccagatgttcaatgaatgtcagttttcttatcaactctgaccctaccactgactgcctatgtatgaccttgctaatgttactgagttttttctagcaatttatggaaaagtgcttccaaagcactattcgaaagcaggaggttatttatttctcctttgtatttaccttgtagaaacacacattttacagcagtttctaatctattaactcatttgattcccatggaataggaagagcacggattattgcacctaatttacaaaaaaggaaacaggtacaagtgaatttgttcaagtctctgcaggaaagccaggcttgaatccctgctcttctaactccccaagtcatggttctgtgtctccatgcagccttcctcagaacaggctttactgtggaaggggtcctgttgtgtttcctggccatgcattattcctgaaacaatactctatttgtcaagatgatttcataaaatttagtaaaacagaaggtccttgagggtccctatattgtctagattattttaaataacgttctcttttatcctttgagagaaaaaaatgttttttaaaaataatagaaaatggagtctgaactacagtgaatctgcaagtgcttgtatcatctgcttgtagtacatcctttctgatgagctcaagctcattcccactagattgccagccccatgagttcagggcctatgtctgtgttttctccagtagaaagcacagtcctgggcagaacaggaaaaggcacatgtctcctggcagtggaaagggctctggcctagaaaacagctgctgactcctgctgagagcttgggcaagtcacgtcttcattcaaggcctcagtttccccatctgcctgatgagggaactggaccagctggcctctccaaacccttccagttctgatggtctgtgactcccagtccaatgccccttccctcaggccacattgggtcagtctgcatcctgctgtgtaattgagaggtaagtcgctcccaagtgggactcttctgacccctaagctcctaatttctgtgcaatgctctgtgtttacttagaacatgccctcgaccttccggctgaactcatttcacctactgcataactctgctcattctctgggagtggacaggaggccttggccccagaaggaaatgagaaatgggtaaacatttctcatgaatttcaattgtagtctccggtggaattctcccactccagagacaccaggacccaaacaccaattctagcttattcagaagaattagaaaatgaaaatgagcttgcttcaggaaagtgtaatgaaagctcattttatgccaaaagtgcaaacagcacaggcttcagggtgatggaaaacaaaaggaagctcgcagtgctgaggaagagcatgtgggtgagtgtgagctgggaaggtcccaggtgtgggtgcacatggggtgcatatctctgtgcttgagtatattacaggttgctgttgaaaacaccttggtgaagagcagtgcctgactttacttcgatgtgcttataaagggaaaagttaagggacgaagaggtattcatttattcaacaaatattcatccagtgcctacaatttattagagcttagggtacagcagtaattagaacagatagaaatctctgaagtgaggcttacattgcactgggataaacagacaataaacactaaacataatacataactaaattatgtactaagtaataagtttatggacaaaaataaaatagagcagggctctgcatgagttgagatgggggctctgatttaaatatggtgctcattgagagagtgacatttgagcaaacacttgaagcaggtaaggttagccatgtggctttcttgttgggggggctaccctggggggcactttaaccagagggaacattcagtgccctcaggtggaaagtgcctggtgtgtttgaagaatagcaaggatggcagtgtggctggagggcaggaacatgaatgaagactgagaggtacagatggggggcgggatgggagactggaaaacagggttcctgttaaatgctgccagccaatggcaggctttacaagctgctttcatgccccgaatctcatttgacctgatgctcagagtattaatgtccactttttacgtttgtgaaaactgtgccctggagacaggggcatgggtgctaacaaccagattggggggtgggggcagggaatgggggcaaagagatgcgcagtggcttatcattcgacattcagatagcacagacacagagagcccgcagagcatagagcatagaacaatcacataattaggaagtaatgagttttcacagaactggttttcatagaactggtttctaatagaatgtacttaattttaagtttatgaaacttgatgatggctggatttaacaacagggtagcaaaatctctgaaaagctgacagttggctcttataaactggtgtgagctgccggctccagcacacctaccgcctggggaggtttaagtgacccctgaggtatgagtggcagagctatgacagttggtccttattccagcactcttgtaggatttctgtgcaaagatttgaggatataagtttagcctgagtcagggcaaggtcctgggcagtgtcacaggaacacagcagctcacaatccttgaaactctgctggaagacactggcccaaggcggccccttctgtccactcagcacaagcctcatcactgccttcacccacgtcctggctatgacacacctggagccacgcagcttctgccgcagaagaacacagcaaccctttgtgtttcccatcctcaggctattttcccgtcctgaactgtttggggcccagcctccaagttgctgaagggatttgcatatgaatgagctcagctctggagtcccagaaggggtgaggtgggggagtctgagccattctcaggccaaacagtgccaatcctccctggctctccctcccagacacaattccagactcttccctcccaccccaccccccaagcccagctccctctgagacggtgggcactgctggtttcccacctgcgggatgcccgcttcccaggctcttggcaggacccctcccctgccagctctttcttctccctctgctcatgctgcccttttctgtccagagccctcccgagaatgggcaatccttcctggcagcagtgggattcttggactcttaggacctgccagctgtttctctggcccccaccagctgtttctcaggcccccacattctttatggcgccaagcatttgcatgtacacaatacctgcttaggggctcactcagctctgttaggaggttttcaccctaattaacaaataagaacaccatcctggaaagagcagtgcacctaggccccagtactggctctgccattgactgactttgaacaagtctgttcctccgccaggtatagacttgaggtcttttcatgttcttttcagctctgacctttgctctggcaggtggcttatcagctgtgtgattccaattattgagccaaacctggatgtcagaacatcctgatgttgtctcaggtctgctacttgtaggctatgtggacttgggggagtcatgtcacctccatggactcagaactgtctccctgaagtgcactcactacatgactgccattaggagcaaataaaatagagaaggtaaacgtgccctgtcaactggaaagttccacatagaacaaggaattattatcatcatcattatttttattactttttttttttttatggagtctcgctctgtcacccaggctggagtgcaatggcacaatctctgctcactggaacctctacctcccgggttcaagcgattcttgagcctcagcctcctgagtagctgggattacaggtgcccgccaggacgcccggctaatttttgtgtttttagtggagacaaggtttcacaatgttggccaggctggtcttgaactcctgacttcatgatttacccacctcggcctcccaaaatgcagggattacaggcatgggccaaggtgcctggctgattattattactctttttttatggccgaaagacttgagccaggactggagcatcaacctccagaacctctcatttgaagtcaacttgagcttagatctgccagctgtgttatttttactttacatggctttcaagagtttctgaagtgcagcacacacatgcaaacacataccagatgcctccttcgtttctagacccaagtttctatctggtatcaggtgcctttaacttgcttctactcagatcactgactgaaattaaagctacctggtgaagtagcaggactgggccattaaccactggcccagcagctgggagtgatggactttccgtgaaggtgagctcaggagtaccgagctcgcacaatgagcaggagtcagcccggggctgtcggtgaatcattggcctacggctcacgcatctaggaaaatcttttgaagcacagcaaagtaaagagagaaattcctagacttaatgccatcttcttgtggacagaagcctttagagatccctcactttgctctgatcgtctttcataacttaagagtacccttttgatgtctctcagccccaggactgttagaaggctttgtaaagtgcaaagagccaaacagctaatatgccacctgccagaggaggaggctgggctgggaggtctctctaggtgcccttccagctctatcagcctgggttgtgaatcctcacaaaaggggaaaccactgctgatggcttcagcgagattaggaaaggagtgaaatggagaaatagtatccagggacaatctcagcttcttaatgttctccaaatgcatgaagtgacccttgccccactagctgggagccagaacgtgtcatctcagttggtggatggatctcagcagtcctgtttttctcattgatgtactgagtgctcaacgtatcccgggcacttttctgagtgttttatgtatatcacctcccatcctatttacaacagttctgtaatataaataggattattttcactattttacatatgagaaaaactatatacagagaatattagtttcctaggacttctgtaataaatgtccacaaactaggtggctgtttaagttgttaaatttcttaacaacagaaatttgttctcacgcagttctggaggtgaaaagtctgaaatcaaggtgtctgcaggaccatgctccttctgagggctccagagggggatccttccttgcctattctagctttctagaataggcagttgtaggcgggccgtctttggcactccttggctagtggcagcataactctaatctctgcctctgtcttcacatggctgtcatccctctgtgtgtgtctctgtgtccaaacttccctcttcttataaggatatcagtcattgggttagggtccactctaaccctttgtagtgtcatcttaacttgattacatctgcaaagacctgtttccatataaggtcacatgcagagaaacaggggttaggacttgaacatgtattctagggggacacaattcaccctacagtacagagagtttaagtaatttttccaacatctaatcattggagaagatcatataaaaatgagatgccccaataagtaaggcgttgcatcctaaagaaacagaaaacctaacaaattgaaaacaattcacaatttgactcactcttgagaagtcaacaaagggcacagatgttcttattgcaacctttcttgaacatctaagatctgtctttcttctctttttctgtctctctccctttcctgtcctttaggtcttcatgaactctggactaagaaactcttctctctccccttagccatccacttacacccacctactcactccttggacttcacagtcacaaaaactgtcccctgacatgagaccctccctgccatacgctgccatctgtgagttttaggtattctgagtttcttgatattttctcagaattttacttttcaccttattgtttatgaagcaaagatctctttttcaactctgttgcgacccaagggctagagaaatgagaggaggtgacagagtgctgaggagttcccacgccatgttctgtgatgaagggaagacaaggggggaggagggtgatagcagatgaatgaccctgcacttccaggctagttaagttgcccttcctgtgtgctccccttgtttgttgactggaattaaccaattttataccatggggtggaagctagagggaagcagctttgagctcaagtttctttttaaatgtaaaaagagaagaaaaagaaaaattacctatagttccactaaccattgctaacagttactctaattccttctactttttattttcaatgcgtactttcaacataggtataattataccatatatactattttttctgctttttcacttaatattgcctcctaagaatatttccatattgctataaaccctcgattaatgtgataattaatggctgccttgtatttagaagttaatgctaacttatttctctagaaaaggatatttacagttatttctaatattctaatatcatatgactgctataaatatctttgtttataaaagtttttttccacatttggaatatttttccctaggttatattcccagatatggaaccaacagataactttcaaagtcaaggataatccaaaacagcctgatctatcttggaagatactgagtttctcatccctgcagctgatagtgaaaaggtggtatgatatttgctaagggtgtggtaaaaagataataagttagactaggtgacttttgaggccccagaaacccatgagattgtggttctccaaatttcaatttacaaacgtgagcctattctttgtcccaaatcactttcttacttgctataaaagttatctattgctgtgtgataaaccactccaacacttagcagctaaaacaatatccattttgtttgcttatgattctgtggtcaggcgtttgagctgggcccaatgagatggtccttttgctggattagcctgaggtccttcatgcagctacagttgttcagaggcatgtctgaaggtcatctttggccttagtttctcatctggtagctgatagtgaatgccagtgaattggtctagacattttaatcagatggttcatctctgccctatgtggccgctgagccctatggcctcacagggcttcttcacacagttgcctcagggcagtattccacatgtgaaagtgttaaagaaaaaattattcaatgacacttgttaaagtgtggtaaggcagactttattcaggacagggatgaaaaggatagggaccacggcatgggatttttgcagtgagggagagagattgggctctattttgagtatagcatgggcaagtggggatttatagccagggagcatggtggtggtcagtggatgttaaattactaatgggaaacatcaggggtaagaggggttctagctaaaatgacctaacaggattcttgctggtgacaggccaagatgatcagacagcacccgtggggatggtggaggatgaagatcccaattggaactctagggtgaaaagatttcagggatggggcgttcttgctgcactgattcagcaaagattttgctaaaactgagttttacaaggaagtgcacagatgagttgaggagacgtttcagaagcctgactaaaatttggctaagcaaagaatctttgttaatagctgcaaggtcccttgaggcctaaatttggaaatagtatactgcttttaacgcatcgtatacttgttgtcagaccaagttaggccaatcaatgagcagtgaagttacattgcagaattatctgtgtgcagaaatggaagaaagtattgtgaataatttttgcaaacaatgtattattatctatcttagggacaaaataattcttgtcctttgcatatgtgaaatgtgcttttgccccttctctcaaagttttatcccattagccgttcaggcttgaactccaggacctcatgatctaaatcatgtctagaattagatgacacacaaaggtatagctcttgaagtatatctcttcttgatctagagatctctgaacccaaaagaaaagttatttgctctccacatgctcaatatctccttgtcttggtgagagaagaataagataaccacaatagaatttccattgaaaaatggaaaaaatgagaggcatatagcaattactgctccatagtaattctgaaatttagccaggcacatgttgccaactccagataccaagaatgttccttgattagagcccagttctgcttccttggaggggtgagagtggatccccagtccattgctctctgggagtggtgagagtggctcttgcctctgatcttgactctgcctctggcttcttagctttgtcttctgagacattctttcctttctgtaagaaatggcccatgtttgtagctgagtagtctattcagttcgctttctgtacatagaaacctgaggctcaggagcctcttttcattttgaattgccacagtcatttctagtccaagcggatatagctcccttaaaatctttttgggtctccaatgtagcagaatatagttcactccactagatgaaaaacatatccacaattcttttcaaaataggtcttcctactttgaagggcatgtcagggtgctacagaataatgctcttaagattcttaggtgccttgtggtctggctgatagggagtactgggtactgccttaaatcttctaggtcttaacaaatgattcttacagtcacaccattgatttgacatttaccctgaagccatttttggttttaaaatctttttttttttttttttgagacagtgtcttgctctgttgcccaggctggaatgcaatggcatgatctcagctcactgcaacctccgcctcccaggttcaagcaattcctctgcctcagcctcctgagtagctgggactacaggcacacaccaccacgcccagctaatttttgtatttttggtagagatggggcttcactatgttggccagcctggtctcgaactcctgaccttgttatccacccaccttggcctcccaaagtactgggattacaggcgtaagccaccacacccggccttaaaatcttttactagtggataaactgttttccaacccagctagttctgggccctctatatttcctctaagttctgctcacatattgaagacttacttcttcctgaagtacattgccatacacaaccagaagtacacactgacactttcaacattctgtctagagatctccttagccagatatgcaagttcactacatacagtccttcctttcttttcttttcttttcttttctattttcttttcttttcttttctttctttcttcctctctttctttctttctttttcatagacagagtctcgctctgtcctctgttgcccaggctggagtgtagtggcatgatcgtggctcactgcagcttcaacctcccaagctcaagtgatcctcccaccccagcctccagggtagctgggactacaggcacatgccgcaccaccacacctggctaatttttgtattttttgtagagacagggtcttgctatgatgcccaggctggtgttgaactcctgggctcaagtgatcctctcaccttggcctcccaaatttctgagattacaggtatgaggcatcacaccttgcccattacatacatttttctaccttctaagttgccgcagacaagttttgccaattgattcaccattgcattattcaagtggtctgttttagactcctatagcagtctcttcactgtttttctagaatttacttgctagccaatcctaaaactgaagccacatattctagttttttgttactgcagcattctacttctggtatcaataactatttcagtcagacttcaatcaggaaagcaaagtctttatgagtaatgtgagataatgaatatttatgggtattagaactcgtaattatagaaggagctgggcaagtaaaagttggaaatggggatttaaaggattagagaaaaggtcaccaagcagttctcttaaagccctggcatgggtggaaatattggcatctgcaagggaatctgataagtcaattctacctaaggggccaaagtgcaacaatgaaggggaggctcatggaaaagggtctctgagaagctgttggctgtaagcagctaccacctctgtggtttcacctgaaagtatctgatgataggcatgggccactgttggtcatcagagccagtagttataaagagccgggtgcagagtagaggaacgtgagagcaagtgaggatgtgttggacacatctacacatttctttctctgtatgtgattacaaaacagccttcagtgagtaatgactattgcctttcaaacttgcacaaattcctcttttggccaactctaatctagaactatacagggaaagaaagtctggggaacgtagctcccagattaactaaactggcaacagggtaatccagcatactccctaaatgtctgcctaaattaagtctgcaatgctcctcaagggccctgagcagatttcagaaaggctccaggagatagctcgggaacattgacaaacaaagtcatgaggcatttgggttataagacagcctttgtttatttgcctaatgtcttgaggagcactggctagggaatcaggatgctgcaattgtggacctggatccaccactcactagattcatttatcatgagattcattcaccactcactagattcaccagtcaccttgcccaatttgttcaaattatctgggcttcaatttcctcatctataaaaggagagcaatcccccctgggctgctttctctatacattgctttgaggagccagttggtagctgtcaatgcatttgtttagctgatgtaatgaatttatggacatgcagagagcagccatacatagcgagagtagctgtccttccctagagtagctgttcttccatagagtagctgtcttcccatagagtagctgttcttccatagagtagctgtccttccacagaaatttggccaatcccagctgccctgccatagttttgcctagcaggtttgtgctgtttctgctgaggtagaaaactcatagaaaccaaagcctcttggcttctccttatcagatgtgccttcccagctctctgtccttaacagagcccctttctgacgccaggtaatgggtagtggggaggagcagctgagatttgaataccccaggccttcactatttcctctccctacatactctacccaccccctaccctccatctatgatttctacctgcctacattctattcacgtttcagtctccagctcaaagattattctcttcttcctaaatgttttctgatttccctcagctggattcaatcttttccattccttaaacccccagggcagcccatctttgattgcatttacgataccctgagaataccccaacacatatacctttgagtacttatcttattcttctaccaagtgtcacattcctagaggcagggaacttgcttattgagctcgtataacaaataaataatttttggcacccttcacattaaagtgtagacagaacttagtacacacatatttggtgaattgagttgaaagaaaacaaattgaggacatacagccacatgttggtgtcctaaataacaatagtctctaaggacatagtcgcccacaagaagaaatagaaaaatgaagagtttattattcgcagccacatgggtctccattattatgaatgttttgtcttcacttgataaggtccctccatcatgttgatatgatgacctctgagaggggacagtccaaatagaagctaggtctcaatctgcctatactcagaggtaaatgatctttatagaactccatattccacagcacaggatgcaaatattaaccgggaccagtgacccctctgtttaggttatgactggagctgtcactgagccacatcctctctaagagacagtccatgcacccaagataaggtttcaagaggcctttgagccaggaaaattgtttggccaagtgtctgtgtctttagtcatgtactctctgggttggtgggttcttttctctcatctcagaatagttcccaaagcaaaactgatatcagaaaatgttcatgttatctctccagccttgagcaagtcacttcccctctcttgacctctgtttcctatagaaggaggcagatagaaatagctcttaaaggtcccgcccagctctgatattccaggactctattctgagctgcaggctgaattcccagggccccaggctactggccttctcttctctgcttctaaaaggatgtatggctcaaattttcccatgggcctcagctggggcatgcttcctgttctctggaatactgtggctctgcaggtgataaccatttatctgatttatctgccattatgaaaaggtccttcagcccagacgttacaaggagggaggtcatttatcacagaccctcagtagtatctccctaatccaaatgaccagtgtgttcacttgaaaatgttcatgtcccagtcactgcagaacccaagaggcactggggataccaagttccagaaagaagcctgtgtagctggaactattaatgcccaaggcatgactattcattattaacaaattcaagttcatccgcaagcagtaatcctgcatatgttaaaactcctgcttaccatcttctggttggtttatataatatatgactatgatgatttgttagaactgtgttagactatgatgactgctatgtctggaattggaaaggaatctagagctcagctagtccaaacccctgtttttacaagtggataactgagagctagaaaggagatggcccaaaatgcagaatacggcagtgtcaggaacaggacccaggacctccaactgccaggttcctgtatatcgtattactccaaagcagaggtcaccaagatggtgtactctagttcatgcagttactcacagaagaatccctttcccaggccctcattctaaatctatttagcttttttttattaagttctagcaaaagcagttaactggtttctaattcacaacatattaaaaataagcagacagaaaagtacagtgaataggctgataaaaagacaggaaataaaacatgacataaagaagacttcagaagttcaaggctttatagtccggcaatgtttaacgccaggtcaagcgacattacacaactcaatatccccaagattatcactttaatatagtatcacaatggttgacattcataacaatgtccctggatcaccaagaaagggttagcatgtttcacttgagaaagtgggtacttctttaaagtacttttttttttttaagtgttacaccaaaaagaaaatttttagttatagttaggtaaagctttggctatctggaaaactgagtcagataaaataaaacagcagctgggaggttcaaggaagtgacatttcagctgtgtgcagataggcacattctatagtaacaagactggtgtgagttcggctggtatctgcagagaagaggaataaatagcaaagccatgatctcatcttctgtttacacttcaattcccaaagttagtgattaattgtacttgcgttttgttgccagggcaaattgtttttctttgaaactcccacttattttaaataaataaaccattagtttcaaaacaggagtgtcaaatgtcaagatatttctgacatgctaagctaacgaacaaaacaatgaattcattagaagctactagagatagccgcctttgagaacttttctctaatgactttgaaaggcagcaggaatcattcttggtaagagatttttttcatgcatcttggctaaaatttggtccagaggttgcaaacacaaatacaacttaaaagaattggattaggtataagataatcgaatagatacgtcaagaatttatactcaaataaatataccaactagctatcatacgaagcttcccaaactcctgtctcacataaaatcagctttaagccaccagtttaggatctctgcttggatctctgaattcgcacagggcctctggctcttccaaagaagggaattcttttagcaaacaggcatgttttttgcatctaagtcttaacacaaacatgtacacacagagatacacactcaaactatttttgggtgattccaataaatagtttctgtattaagactgcctattaaacattagttttcattacatgactttcctgcttaaaagttttcagtgtcttccacttactcacagaattaatggcattcaaggtcaaccataattttctttccatgtatccttccaagtacatctcctcctacaatccccacagactccctggctactcactgttcacagaatggggcttgtactttcagttcttgtaaacaaatgtttattggataactattatgtgccaggtcctgttccatgcactgaagacacatctataaagaaaataaagtccttctctcctgtagcttatattctaatgtggattgtttgcctgctttgagtgcatatgcagtgcttctgcttgtgtgaaagcatttgtcacactgtgtaatacctgcctgtgtctgtgttcctcaatctcaacactgctattgtgtgcacagcactgtgtctatctctcatcacctccatctcatgctttgctcggcagtaggcacacactggatactcaatgaatgacttatattgtgtatacagtttccattctttggaaatgtggtaagttcctgttgtgcagagaatctgtctgcgaggttatctaactttttaaaactttcatattgagttatttttaataaataagctgcttggttattgacagcaacaacaaatatcaagctacttctaatggaactaaataagacgaatgaaactgatcagatgtccacattgaattaacttgtaatgcgtcttttctcaagaatccttaacctcctttctttgggtttctcaggctgactagcctactcttgggtggccccttcctttttctttctaaagataaggaaagaagcctagctgggaaactgctcatcttgttccctttctctttgacctcaaaggtagaaactgaggaccaggtgctggcaaccttctgtggcagggagaccacagacacagagcagactcccggccaggaggtggtcctctcccctggctccttcatgtccatcactttccggtcagatttctccaatgaggagcgtttcacaggctttgatgcccactacatggctgtgggtaagttggagaagtgactcatcctcaggtctctctctctctctccgaagatgaaaactgccttgtgacctctcctttacgatggaaatctgtgtgtgcaccacatagattttaccattaatgtcttaatgcatttgctctatcacgtatctatccatctatctaccctctatccatccagcaattcatcttttacaaagtgttttaacgtaaattgcagacatcagtatacttcttcctaaataattcagcatgcatattattttgctagagtttcatatttgttcacagcattttttctttttgtgtaaaattgacataaaatggaatatacatatctcatgtatacatttgttgaattttgaaaaatctgtatttgtgtgtaacccaaacctctaacaagacactgaactttaccaccagcccagggggttcctttgtgtccctgccagtcaatctctgctcccacttcccttagaggaaacaactgttttgattttttttctgctgtagattagttcttgcctcttctaaaacttcatttaaatgaaaacatacagaatacattttgggggtgaggattcttttactcagcataatgtttttgaagttaattcatgtgtcgcatgcatcagtaatttgctccttttcctggcagagtaattttccattgtatgaatatactaaagtatgtttactcattctcttattgacggctacttggaatctccccattttttagctctcactaacaaagtttttatgaaccttcttgtgcaagtcttcttgcaaacatatgttttcaattctattgagtaaatatgtaagagaagaattgctgagtcataggataggtatacgtttagctttatgagacattgccagaccttttccaaagcaaatgtaacattttttatctgtccaccaatgtatgagagttctggctgctccacatctaaaccaacattagatgttgtcaatttttaaaaattttaatcactctggtgagtatgtagtggtacctcattgtggtttaaactgcattcccttaatgactagcaatgttgaacatcttttcatgtgcttgttggccattggtttatcccttttggggaaatgtacattcaaatgcctaggacagggcttgacccacattaggggcagaaagaaagaaagaggtagcatgaggtagaagttaagagcacaagctctgtacccagcttgtctgtatttaaatcctgggtctgccacttattatctgtgtgattctaagtttgttaatgcctctatgtcgccatttcatcctccatagaatgtgactagtaacagaatgcatagtaacaaatgtgtaattcttcctgaggttgttgtcccacacacagttattattataactgttagaggatagtggtcccaccagaagtcaagttacctgggtttgaacttggctttttgtgaccttgggtaagttgcctaacctctctgagttccagtttcctagtctgtaaagtgaagataatggctacctctgggctgtatgagaggattaaatgagagaacgcatgaatctcctaacatagtgagtggcccatatcaagtgctctataaatgttggctgtagtcttcatcatcatgcatgtattgatggagaggctttacctgccctacagatgtggacgagtgcaaggagagggaggacgaggagctgtcctgtgaccactactgccacaactacattggcggctactactgctcctgccgcttcggctacatcctccacacagacaacaggacctgccgaggtagagcctaccaatgattgtatgcattgcccttataggccacatcctcaataacattagatgaggctcagagaaagacagatatgcaataggaacaagtaaaaatgaagtcaatgatgcacctcagacaccacatggatgaagatgcagaaatgcccacccagcctggaaacctgatcttgggttcccaaaggagagaagctctagactatttggccatctttctttctggggcagcatttttcactatacaggttgctgtctcctatcctattgtaggcaattggtctggtcaagttaggggaaaacttgggtttcccagttccttctctttgagccacgaattatgctttacccagcaactccttttctcttcttttccatggcccctaagttcctctacaatagagagacctcagtccaaagcaaagaagtgagagaggaaagaggcaaacagaaacagccagaaaacttcccattccttctatctatctttgttttcatctatcatcaacgtacctactatgctatagtctcgtgcttagggagggatggagaaatggaagggtttagccactttctaggaggagctcttgggctagtggggtaatgggcatgtaagcaaatggtgaagtgtcttatggtctccattttaacattaatgtttccattacatttatgtaatggaagtatggacatagcacaatcagacctgtgcaggcaaacacttcccagagttgtgacccttgacagagatgaaagaataaagagaagaagggccttccaggcagagagaagagcttctgcaaacagtcagaagtgtggtagaacttggaatgtttcagggaacagtcaatagattagtgtggtccaggataagcatctgtgcttgaaatctcacttggaagctgagtgagggatcactgggggagcacaagtctggagacaaaagtttttttcttcctccttcaaaacctgctatttgcttctgaataaaaccctatataacacatcagtataaagcaatccaaaaccaaaagaacaggcacgtgcaggatttttcttaaagagtgtatattttctatttttttattcggttaagttcttcttgagtatctactatgtgttcagtacagtcagggccaagaatgcttagggcagagcaaggtttctcactcattttcttcattttcacccttcaccaggagcttttttaaatataattttcctaaggcccccaccatgaaattttaatatcacagatagactatatatctgtttatgtactgtatgtccatctgtgtattgtgcatttaaaaagcaagaccttccccaccaagaaggaattttagctttcttgagggcaagatcgcccccatgagaatgcttggggtaaaaaatgaaaacagtcaggaactcaggagacttccatcttcaccttgtcctgcagctcatagctg

SEQ ID NO: 338 - DNA, 32742 bp, Homo sapiens
  source 1..32742: mol_type = other DNA
acgcacagcccccctgggggccgggggcggggccaggctataaaccgccggttaggggccgccatcccctcagagcgtcgggatatcgggtggcggctcgggacggaggacgcgctagtgtgagtgcgggcttctagaactacaccgaccctcgtgtcctcccttcatcctgcggggctggctggagcggccgctccggtgctgtccagcagccatagggagccgcacggggagcgggaaagcggtcgcggccccaggcggggcggccgggatggagcggggccgcgagcctgtggggaaggggctgtggcggcgcctcgagcggctgcaggtacacggggtcggcggctgtgcgcagaggcgtccctgcgcctctcgtcccttcgcctctcgtcccttcccttctctctgccttcttgcccgcctcctcggtcacagagcgacgaatgacgagaccaggtgtacccccactgtcgctctcagccccggggacttcgggtcctcgcccttgaaggccgcaggccctagtgcgccggctccgggctgcgggtccgggagcgcgggcgcagccaaggtgcagctgcgcggcgtgcggcgccgggggaacacgtggctgctccaggaagtcgccccagggaacggctgggattcgtgggtgaccttgggctcctaaaccttcggttccccgggctccgggcgggccccgttctcactgcggaaagggacaaagctgtccccgattcggttactagcgtgttacaggcattaattagatacgggtttctgtaaacttacccttcggctctggtacaacctgatcttgccatgctctgcctgttcgccttgtgtgtggattctgttttctcaaggcagaatccgactgaacgccgcaggtgttcacattaagaatattgctagcagttctcactacaagacgggagccataggagtgacttatttgtgaaagatacttggagattagcggtgtggtcagagggctgtgctggattgatgggcgccggagaggccgattgtgtcacattctgctggacagttcttttaaggttgggagggtgggtaagaaaatacattctgattcggctcttttcggataacgctttccctctgcttactgcttgtagagacctcacttacccgggggactggattctgcagctttttccattttcttccccgttgataagaggattaaagtaggaaattgtatttggctaccccatgcttatatgctaagcttactgtgaaaattaaggttaggctgtctagagtacttgtggaccctgctggttccccccgccccccggccctgaattttgggttacaatatgcttctcaagaaaactcagagttaagataatttttgtcatcgattttgcaaggttatatatagcatagcatccttcaatttcctttggatgttcttatcaagtaatggtggctgtaaacctagcctgtgttgaagattgttagatagacagcagtttggctaactccgccctaaggcgaggcagttacttgcctctgataatgtatttaaatgtcatggagcaagattcccagctaaacctgaatcgatcacaatgctagttaaaaatgaccctcggctgggcgcattggctcccgcctgtaatcccagcactttgggaggccaaggcaggcggatcacctaaggtcaggagttcgagtccagtctgactaacatggtgaaatcctgtctctactaaaaacacaaaaattagccgggcatggtggctcacgtctgtaattccagcactttgggaggccgaggcaggtggatcacttgtggtgaggagttcgagactagcctggccaacatggtgaaaccccgtctctacgaaaaatacaaaaattagctgggcatggtggtgcacacctgtaatcccagccactcaggaggctgaggctcgagagtcgctttaacctgggaggcagaggttgtagtgagctgagatcgtgctactgcactccagcctgcgcgacagcgagatgccatctcaaaaacaacaacaaaaaaactccctactaaaccagaagagtgatggggacgggaaaagattcctggtccaatgttttcattatatttttcatatcatttggaatctcatgcatcaggcatgccccagtactgttaaagacaatatttttactcattatcaggtagttcaataccagttattacaggatagggaagtcagtcagagaaggcttcatagagatgaagccttgagctgagcctggaagaaatgaggaggacctcaaggaacagagaagaatgttggtgggtaaaaacaggggctggattctgtctgattttggagaaaatagagggtagtgaagttgttaggcagtgaatgtgttccatttcatggttcaaaacgtggggctacgttttgcctacctgagcttcattattaatgtgagaaattgaattgttgttttcagtcaccattgagaacaccaaagataacacaagtagcttagattattatttatttatttatttttgacagagtttcacgcttgttgcccaggctgtagtgcaatggtgtgatctcggctccctgcaacctccacctcccccaggttcaagtgattctcctgcctcagcctccccagtagctgggattacaggcatgcgccaccatgcccggctaattttgtatttttttggtagagatgggatttctccatgtttggtcaggctagtctcaaactctcaacctcaggtgatctgctcgcctcggcctcccaaagtgttgctgggattacaggcgtgagccaccatgcccggccatcgctttgtgttcttaaaattaatttaaaacaagaaaacttgaggaatgatggttcagatgagtgttaaaacttgcaagatgttttttcctagaaaaggatgattaaaattggttcagggtggggccttccagttctggctctaatgattgggtccttactgttctggtggagtggtagtgataagctttttgtaacagaaggggcaaaagattgtgcttctggctgggcgcagtggctcacgccttcgatttccttgggatgttcttatcaagtaactaatcttagcactttgggaggccaggtgggtggatcaccctaggtcagaagttccagaccagcctggccaacgtggtaaaatcccgtctctactaaaaatacaaaaattagctgggcatggtggtgggcacctgtaatcccagctactcggagtctgaggtgggaaaatggcttgaacccgggagggggaggttgcagtgagccgagatcctgccattgcactccagcctaggcaacaagaccgaaactctgtctcaagaaaaaaaaaaagattatgcttctaagaatatggtctattgcatatggacactggtttttaaagcttgaatttaaaaagaattttttgtaataggttttagagctttttctttttcttttttattatttttttgagatggagtttcactccgtcacccaggctggagtgcagtggtgccatctcggctcactgcaacctccacctcccgggttcaagcgattctcctgcctcagcctccccagtagctgggattacaggtgcccaccaccacgcccatctaatttttgtatttttagtagagatggggtttcaccaccttggccaggctggtctcaaactcctgacctcgtgatccacctgcctcggcctcccaaagtgttgggattacaggcatgagccaccgtgcctggccagaaagctttttcttaatgccagttataataccctttgctttacaatttgcgtatacctcacagcttgctttgtgccgtgtgtgtttaatatgccctaagtgtactcgtatataggaaaagctttaaaatggtatccaataaatgtccattttgcaaatctcaggataatgtcattttcaagtatctagatgccctcaaaccaaattaactggaaaattcagatttcagttaaggcctttaacttaacttaggactttgattacagagatgtattttgctttgacaaaagttaaggttaatgtcttaaatttccagagatgataacacaatttctataacccagtaacccatttaacttcgcttagattatcaattttcagccttgaacaggccacttagtttctctaataactggcctcttcatctgtaaaacagcgtaatctgtgtttcatgtttcttcttgtgtcaaagatcgaatcacttgtaggaactattcattcagtcaggatcagtatttcttccccttcccattggagatggtttgtggtatttgtagcataactggtcttgtctgccttagtcttaattttgtctttttgtatgtgtcactttcttttttttttgagacagagttttgctcttgttttccaggctggagtgcagtggcgcgatcttggctcactgcaagctccacctcctgggttcacgccattctcctgcctcaggctcccgagtggctgggattacaggcgcccaccaccacgtccggctaatttttgtatttttagtagagacagggtttctccatgttggccaggctggtcttgaactcctgacctcaggtgatccacccatctcagcctcccaaagtgctaggattacaggtgtgagccaccccgcccagcagtatgtgtcacttttgtctactcagaacatagtggttcgtacttataattgcagcactttgggaggccaaggtgggaggattgtttgaggccaggagttcaagaccagcctgggcaacatagggtgaccttgtctctacaaaaagaaaaaaaaagaattatgtatataacaaactttaaaaaggatcccacttaatttagttgtcatgtaaactatggttaaataccttttctagaaaagtgataatgtattttaaaaatttaatgtatcatttagcctggtaatagaaagctcactaatctgatacagtagtatctttctcaataattctctattctgatacctaggttcttctgtgtggcagttcagaatgatggatcaagctagatcagcattctctaacttggtaagatattttcagttgtatttctgtgtctgcaagaatgtgaaatatacaagcatgactttaactgagtaagcatgaaataataaccccaatctattatcaggtattcatttacatttgaattggtagtcttgaggcataactgatctcacaaagagttcagccttcagtagggttaattatggaaagtcttggaagaattctcagagtggttctgggtgtggtagacggggacagcttagtagataagacgaattaaagccctgatcaaaatgttttagtaggagaagtaaaaagcaaaggcttgcggggcgctgtggctcacgcctgtaatcccagcactttgggaggctgaggtgggtggatcacctgtggtcaggagttcaagaccagcctgaccaacatggtgaaactcggtctctactaaaaatacaaaaaaaaaaaaaattagctgagtgtcatggcgcatgcctgtagtcccagctacttgggaggctgaggcaggagaattgcttgaacccgggaggcggaggttgcaatgagctgagatcacgccattgcactccagcctgggcaacagagtgagactccgtctcaaaaaaaaaaaaaaaagcaaaggctgaatgaggccaagtgtggtggctcactcccgcaatcccagcagtttgggaggtgaggcaggaggatcacttgaggagtttgagacttgcctgggcaacatagcaagcccatctctattaaaaaaaaaatgaaattttaagaaacattgagtagacagtatgagtgaaagctgaaagaacatacaaaaaaaacagccatccaggccatgacgagaaggagcctaactcttaacactctgtctagacctcaattctctcttatttgtatttatttatttatttatttttattttattttttgagatggagtctcagcctgggctctgttgcccaggttggaatgcagtgtgcaatcttagctcactgtaacctccgcctcctgagttcaagcgattctcctgcctcagcctcctgggtggctgagattacaggcgtgcgacaccatgcccagctagtggtttttttttttttgaatttttagtgagaggggatttcaccatgttggtcaggcttgtctcaaacttctgaccataaatgatctgtgtgcctcggccccccccagagtgctgggattacaggcatgagccactgtgtctggtctattctctcttttctgtcttctatcttatgcttagtcagaatttctgcttatttataactttgttttattcttgctcccttgctcccaccaacatcatggtctgggttactgcatagtatcctgaactgatttgtgcccctagtcccagctactcaggaggctgaggtgggggaatcagtagagcccaggattttgaggctgcagtgagctgtgatcacaccactgtactccatcctgggagagagagggagaccttgtctcaaaaaaaaaaaaaaatttacaaaaagggagagactgactgagaagaccagtgtgaactagcccttgactgggcccagggaagaatgttggtttgaaaggagaacaccctaaggaatatatagcaagttatagtaatggcccaataacaagcatatacctaaacgagcttttcctaaacattcccgtgcctgttcttcatcatgcctttttccgcaacacagtttggtggagaaccattgtcatatacccggttcagcctggctcggcaagtagatggcgataacagtcatgtggagatgaaacttgctgtagatgaagaagaaaatgctgacaataacacaaaggccaatgtcacaaaaccaaaaaggtgtagtggaagtatctgctatgggactattgctgtgatcgtctttttcttgattggtgagaatgaccattccaaacttcaatgttttctataaccaactctgggaagtctgttatgtcagctcagcatatagttattttgtaccttattttttttttttttttttttggagacagaggcttactctcttgcctaggctagagtgcagtggcaccatgttggctcactgcaacctcagcctcccaggtttaagcgattctctgccttagcctcctgagtagctgggactataggcgcccacgaccacacctggctaatttttttttttttttttttgagttggagtctcactctgtggctcaggctggagtgcagtggcgtgatttcggctcactgcaatctccgcctcccaggttcaagcgattcttctgcctcagcctcctgaggagctgggactacaggcgtgcaccaccacacctggctaatttttgtatttttagtagagacggggtttcaccatgttggtcaggctggtctctaactcctgacctcgtgatctgcccgcctcagcctcccagagtgctgggattacaggcatgagccactttcccgtccactttatgcctttttaagtgccactaggaagacaatcatgagtagattctatacctgtcattgaatttaatctggttggaaagagagacccatgaattatttcaatacgacgtgcaagtgttttctttttatttatgtatttttttgtttgctcccactccaccaggaagcaaatgctacgctagaaaatatccgcaggacactggcggtgcagcagctcagtctcatgtttcaagggggtcttttggaaaaaactacctatgttttgaataggtagctatttgaaataaagctagtatataatttattaagtggtttaaagtatacaaaactgagatgcattatatactttaaaactacttagaatttgatgaaaaccagtattttcaaggcttacctgaaaatattaacagattaacagggatagattacaaatgaaattctgagttcagctctggaactttgtctctttaggatttatgattggctacttgggctattgtaaaggggtagaaccaaaaactgagtgtgagagactggcaggaaccgagtctccagtgagggaggagccaggagaggacttccctgcagcacgtcgcttatattgggatgacctgaagagaaagttgtcggagaaactggacagcacagacttcaccggcaccatcaagtgagtgccagctgctgtgcaagtatctagacaagtaattcaagaattatgataggccacggggaaacaataatggtgacactgtggggaatggcttgttagagaagacaagacttgtcatgtttagctaaagaggggaaggggcctgtaaaaaactgaaactatactggtaggggaaaaggtagaacttctctggggagtctcctttttcttaaaaaattaataggcccttgatgttttccccatctttgtagcttattgcttgctgtcattctctggctctgatttttcttcttaacctcttgtaacgttgtactaagctctgctttgctgacaaggacatcagtagcttttctctgttttaggaagcaacacatgccagaagtagcctttttcatctccttgatcatgggtaactgcctgccttaagtctctagtgcttcttaatttctgtgatactcacccattaacccctaggccagtcagtatccagagacaatgtctccctctggtggaggctggaatacggtggcgtgctctcatctcaccgcagcttcatccccctaccatagcctcctgagtagctgggactataagcacgcagcaccacacccagctaatttttttttttttttttttaagagatggagtctcaccatgtctcccaggccggtctgttcttagatttttatttatttacttatttattttgagatggagtcttacgtgttgcccaggctggagtgcagtggcacgatttcagctcagtgcaacctctgtctcccaggtttaagcaattctcctacctcagtctcctgagtagctgagatcacaggcttgtaccaccatgctctgctaatttttgtgggttttttttttttttttttttttttgcagaaacgggatttcaccatgttggccaggctggtgtctaactcctgacctcagatgatcctcctgtcttggctcccaaagtgctggaattacaggatgaggcactgcacctggccaaatttctattttatatttatttatttattttatttgtaatgggctttctggcaaaaactagaaagcatgctagacaaattctaaaagagctgtaacacttgtccatagagttttactatctttgcacatacatgcctctgtgcaaagaataaatttatcttttcctttttgcaagcttcctacacttacagtggtactataattctttagtcttaagttatggcattttctacttcatctagttgatgcttttgtgtttatttactgtacaccagaccttatggttaaagtgagagtatagtccaccccacaaaaatgtaagaactaatatgctgagtaaatagaaagaagtatgggagatcggaccaaggagcagttctgcttcagggtattcagatgcttcacaagtaggtgagaattgaaactatgcactctgttcagcacagtattactatcttagattttatagtagatctggaagctactcatttcccctaaaactatcctaagcagatacattgtgttatgatgaggctcttgaaggagtgctttgtagtgggtaaagaagctttgaagttacaagatttggggcaaaattttttttcttttgtgatattctggtcagtctagaagttttgggtcacagttcatttatctgaactatgagggataatattttgctttcaaaacaatttgtttaatccttgacttaaatgtttattttaaagtaaacttaagttcatttaaaaggcattttctcctccaggctgctgaatgaaaattcatatgtccctcgtgaggctggatctcaaaaagatgaaaatcttgcgttgtatgttgaaaatcaatttcgtgaatttaaactcagcaaagtctggcgtgatcaacattttgttaagattcaggtcaaagacaggtatgttgaaagatggtaaacttatttttatacaagtagctattttcaggtgtgctaaatatagcaaagactttttgttagtgttgttggcttttttttgaaatggagtctcgctctgttgcccaggctggagtgcagtggcacaatctctgctcactgcagcctttgccttctgggttcaagtgattctcctgccttagcctccagagcagctgggattacaggcgcacgccaccacgcccagctaatttttgtatttttagtagaggtgggatggtctcgaacttttgacctcaggtgatcagcccgcctgggcctcccaaagtgctgggattacaggcgtgagccaccgcatgcggcccaaaggcttttaaaataaaaatcaagcttaagatttagaggtaaatttcctcaagccaaataatgcaagacatactaaatgtaagctattgtgttttttggaaggatgaccttaggcttattttaacttaatctttttaacagcgctcaaaactcggtgatcatagttgataagaacggtagacttgtttacctggtggagaatcctgggggttatgtggcgtatagtaaggctgcaacagttactgtaagtaaagcaaaacagtgcatgagactcttccctattgaatcattcaaaactcatcttttctgttcttaggagttataaatttacctgtaaaatgtaaatgatcatgagatattttggttttcaaccctctaatgacacagtcaacatgcattgtcttctctctctaatcactttccccatgtcctgttttattttttctttatagtactgctagcagctgacattatctatgcctttgtttccattagaatgtgagccagatgaagaatcatgggttagttctatttactgccatgttgcagagctttggagaatgcctgacatacatagtagtatttgctaaacaaatgcatatcctccctgtggggacagatgtaaatatccatcttggctggggcctagtcttagcttgattcgttaatgcttgatctttttctatttttgttttgagacagggtgtcactctgttgccctagctggagtgcagtggcgtgagcttggctcactgcattctccaccaccacccaggctcaagtgagcctcttgagtagctgagatgtccagttaatttttattttttattttattattattattattattattattattattatttggtagagacagggttttgccatgttggccaggctggtcttcaattgaaactcctgggctcaggtgattcaccaccctcagcctcccaaagtgctgggattacaggaggaagctgcttcgcccagcccttgatctttttaaatttaggcaaatatagtcaaattaacacagaaatagagaacagatagatagaataattttcagcttaaaaatcacatttgtggctgggcgtggtggctcacgcctgtaatcccagcactttgggagtccaaggtgggtggatcacctaaggtcagagctaccagcctggccaacatggtgaactctattaaaaatacaaaaattagccaggcgtggtggtgggtgcctgtaatcccagctacttgggaggctggggcaggagaatcgcttgaagccaggaggtggaggttgcagtgagcggatattgcgccattgcactccagcctgagcaacaaaagcgaaattccatctcaaaaaaaaaaaaaaaatcacatttgtaagtcaggcgtatctctagtggatacctttcggggctggtgcagttctgtgttgattccttgcctttctggatacttgtgctttatccctttgcctggctgcctataagccaggagtttagagatgggtaggttgttctgttaaagaacattgaagatttttgttcaacttcaagctttctgtattgagggcttggttgttagtgtcagtttatggctgttcatctggactcttatgagcttaggaacatcatgacacatctaaagttggtgtatgcaagtcactttgttgtaatagatggtgttttaattttgggacagatttattatcagacctttcagttaaaacctatttctatgatgtcctcaaggctaagattgttccaggcctccagtcccatgaccagcctacataggcctctttaatctaaatgcccttcagatgaaaggcagcatgggataaaagcatgaaagacataggaggccaaaaatcttgattttattccaatagctctgacctaaaagttgtaaagttttttagaactcatgtcttttttaggccttggcctccttttatctcttacttgggttgcctgtcttaggtttgatctataacactcttctgtctcaagattttagagctgttccgataccataatgctcattaaatctaatgtctttgttctagggtaaactggtccatgctaattttggtactaaaaaagattttgaggatttatacactcctgtgaatggatctatagtgattgtcagagcagggaaaatcacctttgcagaaaaggtgagtatgagttattataatattaaatacagtacttttggtatcttactcttcaggtaagtgatatttcttgttaatattcttacattctgaaaatcagcaatcttaaactctcataccagataatataatttattaaaatgctcaacaaatgaagtaagttccacttacctaatcagaagtgcttaagtgaaagctatttctctgtataactcagttttacgcatatacagaattcagctaaaagcatgttttataaaaaggaaaattaatagccaaacatacacaaggaactagagtggaacatatcaaaagacagtggtgatttctgcatttttaaaaaaagtggcagggctcacacctgtaatcccaacactttaggaggctgaggtgggaggactgcttgagccctggaggttgtgagatgtgactcgtgccactccagcctgagtgacagtgagactcaaaaaagtggttgtcttagatgggtttttgttatttttcttttcttttttttttttttttttgagacggagtctcttgtcaccctggctggagtgcagtggcgtgatctcagctcactgcaacctccgcctcccaggttcaagtgatgctcctgcctcagccttctgagtagctgggattacaggtgcccaccaccaccatgcctggctaatttttgcatttttagtagagacagggtttcacgacgttggcctggctggtcttgaactcctgacgtcaggtgatccacctgccttggcctcccagattgctgggattacaggtgtgagccaccactcctggcctttgttattctttttttttttttttttttttttttgagagggagttttgctcttttgtccaggctggagtgcagtggcgcaattttggctcactgcaacctctgccttatggtttcaagcgattctcctgcctcagcttcccaaatagctgggaatacaggcgccagccactgcgcccagttaatttttgtatttttagtagagacagggtttcaccatgttggccaggctggtctcgaactcctgagcttgtgatccccctgcctcagccttgcaaggtgttgggattacaggcgtgagccaccactcctggcccgttactcttattttgcaaacaagtgagttaatttttcaggaagcaattaataaattaccagataaacaatttgaaatatttggaagtattataagtttagtcctctgtaaccatttggcctttagcataatgtccaggatgtattctcatttcgtatgatcagatcttcattttctgagctttatatgttttcttttaggttgcaaatgctgaaagcttaaatgcaattggtgtgttgatatacatggaccagactaaatttcccattgttaacgcagaactttcattctttggacatgtgagttatttcttgagtaaatcaccgttttgagttccttgagttgttcttggattcctgtattagcagaaatagcactgtgtcttccttaactgctcttttttctgggagggcgttagcagtaagcaagaagatagattacattgactttgaggctttattatttgttgctaaaagtactttgtcaatagtgccttgaatttgagaatttccatatgccatgaaaacaggagtcacattgtagagccactcagatttttgaggcttcaagttggtaaactaaggttgggctgcagccttataccaaacctgaatcttacagagaagttttgaggaagtatgtgatggagtgaattgctcttttgttttcctaggctcatctggggacaggtgacccttacacacctggattcccttccttcaatcacactcagtttccaccatctcggtcatcaggattgcctaatatacctgtccagacaatctccagagctgctgcagaaaagctgtttgggtaagtttttatttgaaagcggtcttgcatagtgaggttttatgattagggaagaacggtaatatgttgattaaaatgttaaacatgatgataattttccacatttgggaatttggaggatggttagctgttaccttggtacagatataaatgaatttttctctataaagagatcttaataatggactttggacttataaacacaggagaataaggagacttataaacccagtgaattccttgtgcaagattcctggcatagcttctgctcaagtacttctgtgctgaagcacgatgcctatagcagcccattcagttagtagagagaatctgttagaattcatattgggataaaatcctattccccgaaacatccatttgtctggatttttcttctaagcaatacggtatgattccagttaccttgtctatagattgagaagccttgcttcttatgatggtttccagagaaaccatttatggttgtggctcgctcctctggatatcctccctgtaacgttagtgtctctctttaaaaacagagcccagttccattagagtacgtagcattaattttgatttggatgtggacatatttatcatttcctgttattacaggatggagatctagtttcaggcctttatgaaagcatttatctcctgtatgacataggttctctgatcctgtttctttaacataattggatagtgaaaatatattctacttgatagtctcaaatgaagaacatctgtatataaggagtatatgaaataccatgactgttgatcatgctgagaggcctttagcataggggagtgtgtaacataccatgactattgataacgctaagaggcatttagcataggtgatttttttgactcattctacctaccacctacaaatcgtaaccaacctgtgaagccagcgtcccatcttatccttatgtagtaggggagtaataatgtttcaacctatatttatgtaagtaagcccccttaggagcagctattatttgggtaacacagaggaattagataggggaagcacaagattttttttttattttgacagtctcactctgttgcccaggcaggagtgcagtggcatgatcctggctcactgcaacctccacctcctgggttcaaggaattctgcctcggccttccaaagtgctgggattacaggcgtgagccaccgcacccagctgaggaatattttttataactgagctaagaatgtgtactatccttgttagtggtgacagttgggaaacataaaagtgtattaatattcttttatatattagaagaacttcattttgagtccatcttggtatgtattccaaatataaactacgtaagtatgtctggcagaaaggcgcatagttagagaagtgttttaaaatattgcttaattaatggtttccaattggctgcctgcagatcaaagtaagacgcaaatggttcaccactagagagtaagtttttttttgtttttattttgttttgttttgttttgtttttttttgagacaggacttgtgctctgttgcccaggctggagtgcagtggcgtgatctcggctcactgcagcctccgcctcccaggttcaagcgattctcctcctcatcctccttagtagctgggattacaggcgcatgccaccatgcccagttaatttttgtatttttagtagagtcggggtttcaccatgtcggtcaggctggtcttgaactcctgaccttgtgatccacctgcctcagcctcccaaagtgctgggattacaggggtgagccacttcgccgggctgagagtaagttttgtttatatgtcctcttaatctgtaacttcactggacaggagtaaaccctgggcaaggaacaataactcagaacttacgcctgctttctgattctaggaatatggaaggagactgtccctctgactggaaaacagactctacatgtaggatggtaacctcagaaagcaagaatgtgaagctcactgtgagcaatgtgctgaaagagataaaaattcttaacatctttggagttattaaaggctttgtagaaccaggtaaagaccgcccccccccccccccgccccgctttttttttgttttcttttctgttcctaaggatgtggctagagaaggagcgagtgtaggaatgctggcttggcttggttttatgaagtgctcaatcttgtctgtcctaaagttaattgtttatgtgttagtttcttttttttttttttgagaaagagtttcactcttgttgcccaggctggagtgcagtggtgtgatctcggctcactgcaatttccgcctcccaggttcaagccattctcctgcctcagcctccccagtagctgggattacaggcatgcgccaccacgcctggctaattttgtatttttagtagagacagggtttctccatgttggtcaggctccatgaggtcagagctcctgacctcaggtgatctgcctccctcagcctcccaaagtgctgggattacaggcatgagccaccgcgcccagcctatgtgtcagttttattgggaggtaataaggccctaggaaattcttgttaaaaattgaccattatgactagaaaatctattctaagttattgactagaccagtgataagcaaatttcttaagggggcagataataaaccttttgccaggctatacagtctctcttttagctgttcaactctgtgggagcaagaaaacaggcacagactgtgcgtagtgaatgggcatgcgggctgtagtttgccagtccctggagttaactttaaatgcaatcaaacagccaacacttactaagaaataagtccttggacttaagtagtcagtaaatttaattagtagtgtaggaaaaaagtagctctactagtaaggtaaaattaatattctcatgtgaatttttaattcccagagtttttagtcagatttgaagtaaggctcttttatccttaatacatatactgtgcttttacctttctactgatgtgctaattctagaaaagtttagaagctgattatataagttctttcttcctcttttttcttttttaaagatcactatgttgtagttggggcccagagagatgcatggggccctggagctgcaaaatccggtgtaggcacagctctcctattgaaacttgcccagatgttctcagatatggtcttaaaaggtagagtacaaattttgattcttttgaatattggtgcactgcatacagttctagatgttatactgtgctttgctcactttgcctgcattcctgtggttctcatgctagactctagttcttaaatacaaggcagattgtcttttgttgtagctgccttttcctttgaaacagctttccataaagtgtcttaactgtgctagaaatcaccagtttctttgagacagtggagttactgagccctagtgcttagtgtggtggatccagagtgataaggtggatcatagtccctaagcaatctatttgaaagcagtagcatacctctctactcatgtactgaggcctaacagctattgaaattttgttctgtttattcatttattcattttttgagacagagtttcactctgttgcccaggctggagtgcagtggtgtgatctcacttagctcactgcaacctctgcctcccgacttcaagcaattctcctgcctcagcctcctgagtagctgggattacaggcacccacaaccacacccggccaatttttgtatttttactagagacagggtttcgccatgttggccaggctagtctcctgacctcaagtgattcacccgcctcagcctcccaaaatgctgctagtgagccaccgtgccctgcctcttttgtttatttttgagcctttctgtcctactttccactctttcacactcctacccacccacacattcaaaatcacgtcacattcttgaatctttgggtcttagggcaaactgcaatgcttaactttaatacagagtacattaatggagaaaaagatacagtgagggaagtgggagggatggagggcagtgtgatacatgtaacctcaaaaggtgctgtcacaaatatagtttctctgcaaactcttcttgtaacttaaatttgtgaatttttattttattttagaattatttttttaaaaatccaatgtttggatttacctctgaagatttttctcaagatgtgcatcatcatgcttacactgttttcaatgatctctgggtccagaagttaaggaactccaagaatgaaattgtgaaagggtgactactggcccctgctatgtactcaaaatcttatttgcagatctcctatcttgctctttgtaggttactttaaaaaaaattattcctattcttttattcttttacctggggtctcaaaaaaagattttgttagttttttttttcttttttggctcagaaaaaaaagattttggaatctgctatcttggaattagaccttctgattcatcttaagtgggataccttccatccttgtctgtgtataacctttcctcaggtaaagctaacttttttctctttcagatgggtttcagcccagcagaagcattatctttgccagttggagtgctggagactttggatcggttggtgccactgaatggctagaggtattctttatcatcccttcccatattggacacgagcttgtgggcttaggctgttgtccagaagtgatgtttttataggtttgattttaccacttttgcctttgcgtttagtctcagtagagtccagaattgaaaatgaatccctaatgctactgtatgtgataaataaacagatttatacttattagtgttttcccttctcttctagggatacctttcgtccctgcatttaaaggctttcacttatattaatctggataaagcggttcttggtaagtatccctttcattagctgtgtatgaattcaggtaaacttttttgagatggagttttgctcttgtcgcccaggctggagtgcaatggcacgatctcggctcactgcaacctctgtctcccagattcaagcgattctcctgccttagcctcctgagtagctgggattacaggtgctcactaccacacccagctaattttttgtatttttagtagagacagggcttcactatgttggccaggatggtctcgaactcctgacctcaggcgatctgcctgcctcggcctgggattacagatgtgggccactgtgcctggccagataaactactttgaagtggaagaaagcttttttttttttttgagacagggtctcactgtattgcccaggctagagtgcagtggcacaatcttggctcactgcagccttgacctcctgggctcaggtgatcctcccacttcagccacctggctaattttttttgtagagatggggttttgccatgttgcccaggctggtgtcaaactcctgagttcaagcattctatgtcagctgcccaaaatgctgcggttacaggcatgagccattgccctcagcctgtatcttaaccttcctttaaatagtctgtcaagttacacagtgagcacaattgcttgtctagaacagtgggtagttctcagtgtggcccccagatgagtagcattaggaactgttacgaatgcaaactgtcatgtctaccccagacctttgagtcagaaatgggagtgttggtctaaaaactgggctttttgggctgggcgcagtggtgcacgcctgtaatcccagcacttgggaggccaaggcaggcggatcacctgaggtcaggagttcgagaccagcctggccaacatggtgaaaccccgtctctactaaaaataccaaaattagccgggtgtggtggcgagtacctgtaatcccagctactcaggaggctgaggtaggagaatcacttgaacccgggaggcagaggttgcagtgagccaagatggcgccattgccctccagcctgggcgacagagcgagactccatctcaaaaaaacaaacaaaaaaactgggctttttttttggcaacccttggggaataaaaacctattattttcttaaggacaaagtatcctgaagcaaaaaaacccaaacaaagaaacaaaaaactttaacaagcactacaggtaattctgatggactaaagttttaggaccataagtctggactatattgaggtgagaagaaactaaactatgccatatagaatggtacttagagagtaattcacatcctgttacgttgtggcatcactgatagaaatattggataatgaaacttctagaagagtttgaatgttcactggcagcagaaaattgacaaaagggtttgaatgttatttaaagtgcagctgtacattcaacaggaatggggtaaaaaagaaagtgcagatgtagctgatgagctgagaatagtgaaatgtctacatgggggaaaaaaggaaagagttacaattaaacctctctaggttagttatttccctgttgtatgtttgccgcagaatgtgctgagtatagcaagcatactatgtatagctctaacctgggtgaaccagaaagttaaacatgaaattgctaatgggggaggctgcacatgtgtgggggcagtggatttatgggacctctaggtacctttctcttaattttgctgctgaacctaaaactggtctgatttttttttttttttttttttttttttttgagatggagtctcgctttgtcacccaggctggagtgcagtggcgccatcccagctcactgcaagctccgcctcccgggttcatgccattctcctgcctcagcctcccgagtagctgggactacaggtgcccgccaccacacccggctaattttttgtatttttagtagagacggggtttcactgtgccagccaagatggtctcgatctcctgaccttgtgatccacccgtctgggcctcccaaagtcctgggattacaggcgtgagccaccgtgcccggcctaactgctctgatatttttaaaaaaggtgacttggattaaagtatgcaaactcaaggagtagtacgagcccacttgagtgaagttagcttagttgctaaagagcttgataccaaaattacttttgtttacttgatgaatgggatagttgttgcacagggccactgatctagattactgtcttatttgtcaagtacttatagttgtagaagtagcagtgtgaaaattatcggaatggagaaggggcaatgataaaacaatttattttcaggtaccagcaacttcaaggtttctgccagcccactgttgtatacgcttattgagaaaacaatgcaaaatgtgagtatatacctcattacaaaaatgtatgacttaatttttgttgaatcaacctgagataaaaaacactgatatgtaaaccgtagtcagtaacaaaaaataggaattgagaataaattttatagcagcgttatttaagggatacttgcctattgaaccatatgagatgagggctccaatcttaaagaatatgttgtttatttaggaatatataacaaaatgccatgaggcctaagctgtagtgcaggggcccacaggggattgtctatagagtcacaatgctaaggaaggcttaaatcaacttgaactatactttgagaaggccggaggaaatattcattgaataaacaattaccatagttttgaatgagggagagcatgtgaaagaaaatatttgcctatgtggggtggggggaggggagagggatagcattgggagatatacctaacgctagatgacgagttagtgggtgcagtgcaccagcatggcacatgtatacatatgtaactaacctgcacaatgtgcacatgtaccctaaaatttaaagtataattaaaaaaaaaataaataaataaataaaaaagaaaatatttgcctaatgggattagaggctgtatattggagtgagtaaagttagaaacaggtcagatagcagacattggccttgatccaagagatactagggattataggatctcaagcaaggtgatcatgaatttgccagttaggttggtggcataagatgcactagaaggaagaaaccagaaacaagataggcatagtgtgaagcccagagagggcttttacaattgtgggtaagccaccatggttttgtttgtttgtttgtttgtttttgagatggagtcttcctctgtcttcctccagcactcaggctggagtgcaatggtgcgatcttggctcactgcagcctccacctcctgggttcaagcgattctcctgcctcagcctcctgaggagctgggactacaggtgcacaccaccacacctggctaatttttgtatttttagtagagacggggtttcaccatgttggccaggatggtctcaatcccttgacctcatgatctcttgaccttggcctcccaaaatgctgggattacaggtgtgagccaccgcgcccagcttttattcatttttttttccttttttttttttaagagataaagtcttgctgtgttgcccaggctagtctcaaacttctgggctcaagtgatcctcccagctcggcctcccaaagtgttgggattgcagttgtgaactaccccacccggcctaggcccacttttaaaatgttaattaagaagaaaacattttttcctcaccataactaaaggaactgacaacatgagcctagttagtaataacttaaagttgagattgttttaactatcataaataatttcttttcaagaagatataatacaagttttttatttaaaaattgttatagagtaacatgttagtgactagcctgaataaataagttccaaaaggttagttttaatgataatttcttatcttacaggtgaagcatccggttactgggcaatttctatatcaggacagcaactgggccagcaaagtgtaagttgagaaaagtgaatgaacaaactaatagaaaagcagagattctacctactacattaggtagaatctaaatctgtccttgcattgaacttacttacacctaaagatattcagctaaagaatttattttggatggggggactagcacgatagaacagtctattctttaaaacactttctaaagacacattctttgtctttgcagtgagaaactcactttagacaatgctgctttccctttccttgcatattctggaatcccagcagtttctttctgtttttgcgaggtaagtctgttcatttaaatgacaaatggagagaggctctctaaaaggaagtgatctgtatttgggaatagggcattgcaatgggaatgcctgtgctatagtcaactatgtacatattcagaggagtaaaggaaaacaagtttttaaggacaaatgacgaggattacaaaattactttgaggtaattattcttggctaccaagatcaataacaaggatgacaccagtccaaggttgacaggcagttgctaggcagattttctcacgagagaagttttttggtgcaaggttgcagtggcctttgtgtaaggttgtagtttttgtaaaaaggaaaaaaaaaaacccttaatccttgttatcagacatacaagggtgagacccttctcttcagggttgcatttttgttaacactagtgactccattttgattttgacaacttgcacatatcttagttgttgggttttttttgtttgttttttgttttgtttttttttttttttttgacaatggtgacttgctctgtcacccaggctggggtgcagtggcccgatcatggctcactgcagcctcaagcagtcctcccccttcagcctccaaactgtttggattataggcaagagctacttactacacctggccatggatcttcttgtgtcaactttgagaccaaatttactgcagtgcttaaaatgttttaagaagttatacacatgtgctggatgtggtagctcacgcctgtaatcctgtagcaggacaagccgcagacaaatcccctcagacaccgagttaaagaaggaagggctttatttggctgggagctttggcaagactcacgtctccaaaaactgagctccccgagtgagcaattcctgacctttttaagggcttacaactaagggagtctgcgtgagagggtcgtgatcaattgggcaagcagggggtacgtgactgggggttgcatgcaccggtaattagaacagaacagaacaggacgggattttcacagtgcttttctatacaatgtctggaatctatagataacataactggttaggtcagggctcgatctttaaccaggaccagggtgcggcagcgctgggctgtccacctctgccttttagtttttacttcttctttctttggaggcagaaattgggcataagacaatatgaggggtggtctcctcccttaatcccagcactttgggaggccaaggaaggcggattacgaagtcaggagtttgagactagcctgaccaaaatggtgaaaccccgtctctgctaaaaatacaaaaattagtcggacatagtggcgtgtgcctgtaaccccagctactcaggaggctgaggcaggagaatcgcttgaacctgggaggcagaggttgcagtgagctgagatggagccactgcactgcagcttgggtgacagagcaagaccctgtctcaaaaaaaaaagttatacacatgtaattattgcatgttccttcattattagttttaacatagacttgttaatctcaattagcttaattagcatttgagtttattgctaaaacttctttatgagttttaataatgaggcttggccgagtgtggtgggtcatacctgtaatcccagcatttgggaggccaaggcgggtagatcacttgaggtcaggagttcaagaccagcctggccaacatggttaaaccccatctctactaaaaatacaaaaaaattagctgggcatggtggcacatgcctataatcccagctgctcaggaggctgaggtggaagaatcgcttgaacccagggggcagaggttgcagtgagccgagatcgtgccattgcactctagcctgggcaacagagcaagatcgtctaacaacaacaaaaaaaaaaccaaggctgaatttcttgagtgattgagcagtggctatctattggacagtccagctgaacagtattttcctcaggctgggtgcagtaactcacacctataattccggcacattgggtggctgaggtgggcagatcacttgaggccaggagtgagaccagcctgggtaacgtgcctagactatatctctacaaaaaattttttaaattaagtggcccagtggccagctgtagtcccaactccttgggaggctgaggcaggggggtcacttgagctaggagcttaaggctgtggggagccatgattgcatcaccacgctccagcctgggtgacagagtgacctcgtctcaaggctgcagggagccatgattgcatcactgcactccagcctgggtgacagagagaggcctcgtctcaaggctgcggggagctgtgattgcatcactgcactctagcctgggtgacagagtgacctcgtctcaaggctagagggagccatgattgcatcactgcactccagcctgggtgacagagagagacctcgtctcaaggctgcagggagtcatgattgcatcgctgcactctagcctgggtgacagagaccttgtctcaaggctgcggggagtcatgattgcattgctgcactctagcctgggtgacagagagaccttgtctcaaggctgtggggagtcgtgattgcatcactgcactctagcctgggtgacagagagacctcgtctcaaggtatgtttcatgtatcttctcttttttcattgataaaggcccaaacttcccagagagaaaaacatacagccttaaggaatttggctagaagtctattcagggcatatgatacgatagaacagggattctgtagaacctggaagaaagtagtcactctaggagtaggttagcttgagagaagtagcaagaatgtacttaaagcagcagataatgagatagaattggggtaaattgcggtaggaatatgttagaagcaagggtggaactgtcgtcactgttacctcgatggcgaagccagaatgtgaggctcttgctcttagaactcacgtgagtaccatagcctcgcgttgtcttgcaggacacagattatccttatttgggtaccaccatggacacctataaggaactgattgagaggattcctgagttgaacaaagtggcacgagcagctgcagaggtcgctggtcagttcgtgattaaactaacccatgatgttgaattgaacctggactatgagaggtacaacagccaactgctttcatttgtgagggatctgaaccaatacagagcagacataaaggtgagcactgattccaattacgtttttattttgctgaatgtcaagtattttgaaatgtgatgtgttcctgtgtgttcctgttggaagggtgattgtagccatagtacattttaaagtgaactgaggtataattgtatgtagaattggtaacttgtttgagagaagtcgggaggctgtggattagagacctaggacagagctcagcaggtgtttcagaatccagagcagtgtcaggttttctgtcactcatgtctcccaggcagcccgtcagtaggacacggaatatgaagatctcagcaaggagttgggctgtgtgcctctcgggcgtgacccggatggaaagacagcacagctagcaggattccatctcgtagtgatctgcgcatctaaaagtcaaatattctattaaacgaaactgataagcagggtgaggtggtgcatacccgtagccccagctacttctgctgaggcaggaggattgctggagtccagcccaggcaacatagcaaaatcccatctctaaataaattaataaaactaatattaaagtagcttccagattgttttatggtactaggagttgatttttaacagatctcttaattgaagtaaatcactgacaaccgaatctttttatatcttttttatttttatttttattttattttttttgagagatgaagtctcgctcttgtcccccaggctggaatgcaatgacatgatctcggctcactgcaacctccacctcccggctttaagcgattctcctgcctcggctccccaggtagctgggattacaggcgtgtgccaccatgcccagatagtttttgtgtttttagtagaagccggggttttaccatgttggccaggctgaagtgcagtggcgagatctcggctcactgtaagatgcgcctcccgggttcacgccattctcctgcctaagcctcccgagtagctgggactacaggtgccggccaccacgcccggctaattttttgtatttttagtagagccggggttttaccatgttggccaggctggtcttgaactcctgacctcaggtgatccacccacctcggcctcccaaagtgctgggatcacaggcatgagccaccacgcccggcatcttatgtctttcttgaaactaattgtaactgttgaaaatggaacttaccaggtggaaataactaaatcctgaagtaccttgaaccaaaatgttttcccctatagggacattttcccccaaaaggagaattgaactggaaacaatatagtacataggattatataattatgttcaatttcttaatgagaatggttttcttacatgctgggctcaaatatgagtgtatatcacagtccatagagcttggaacccctgtgcaaggtgctttcggagtcttgagcttatctgcgagttccttttatcagaatcttacttaacgcacgttaaattagaaaggcatacaaaagaatgtccttagaaataaaacttctcatagcgaataatgtctgtttcaggaaatgggcctgagtttacagtggctgtattctgctcgtggagacttcttccgtgctacttccagactaacaacagatttcgggaatgctgagaaaacagacagatttgtcatgaagaaactcaatgatcgtgtcatgagagtaagtgaacttttgggaaaggaggaactaaagtatgtgtaaaataaccgataaatcttacacttctgcaaagtggacaaactctaggagtctagaattcctttaagaagggagcattaatggtttagctgtcattttctgtttctgctgtctaattcagaacttagtcaaacctagtctttttggaagagacttgctgtaaaacttccatgtatgctccaatggggaaaagaatctgaacacatttaaagttttcctttgtaaaatgaatcagtttcctttaaaaaaattttttttttttttgagacagagtttcactgttgttgcccaagctggagtgcaatggcacggtctcggctcactgcaccctccacctcccaggttcaagtgattctcctgccttagcctcccgagttgctgtgattacaggtgcccaacaccacgcccggctcattttttgtatttttagtagaaacggagtttcaccatgttagccaggccggtctcgaactcccaacctcaagtgatccacctgccttggcctcccaaagtgctggtattacaagcgtgagccgctgtgcctagcctcctttagaattttaaccttagaagattagcattagcctggttctcagcattcttttttccttactctgctatagaaagtctgatcagctggctgggtacagtggctcatgcctgtaattccagtactttgggaggccgaggcaagcggatcacctgaggtcaggagttcaagaccagcctgaccaacatggagaaaccccatctctactaaaaatacaaaaattagctgggcgtggtggtgcatgcctgtaattccagctgctcaggaggctgaggcaggagaattacttgaacccgggaggtggaggttgcagtgagctgagatcgcgccattgtactccagcctgggcaacaagagcgaaactctgtctcaacaacaacaaaaagccgggcacggtggctcacacctgtaatcccagcatgaattgcttgaactcgggaggtggagggtaccagtgagccgagatagcgctgttgcactccagtctgggcaacaagagcgaaactctgtgtcaaaaaaaaaaaaaaaaaaaaaaagtctgatcggcattcttaaatttgggacattttacatttgaagtgaactgttgttttactacaaaagtcacagggctgtgtaaattgccttgtgtgttgttttcgtaggtggagtatcacttcctctctccctacgtatctccaaaagagtctcctttccgacatgtcttctggggctccggctctcacacgctgccagctttactggagaacttgaaactgcgtaaacaaaataacggtgcttttaatgaaacgctgttcagaaaccagttggctctagctacttggactattcagggagctgcaaatgccctctctggtgacgtttgggacattgacaatgagttttaaatgtgatacccatagcttccatgagaacagcagggtagtctggtttctagacttgtgctgatcgtgctaaattttcagtagggctacaaaacctgatgttaaaattccatcccatcatcttggtactactagatgtctttaggcagcagcttttaatacagggtagataacctgtacttcaagttaaagtgaataaccacttaaaaaatgtccatgatggaatattcccctatctctagaattttaagtgctttgtaatgggaactgcctctttcctgttgttgttaatgaaaatgtcagaaaccagttatgtgaatgatctctctgaatcctaagggctggtctctgctgaaggttgtaagtggtcgcttactttgagtgatcctccaacttcatttgatgctaaataggagataccaggttgaaagaccttctccaaatgagatctaagcctttccataaggaatgtagctggtttcctcattcctgaaagaaacagttaactttcagaagagatgggcttgttttcttgccaatgaggtctgaaatggaggtccttctgctggataaaatgaggttcaactgttgattgcaggaataaggccttaatatgttaacctcagtgtcatttatgaaaagaggggaccagaagccaaagacttagtatattttcttttcctctgtcccttcccccataagcctccatttagttctttgttatttttgtttcttccaaagcacattgaaagagaaccagtttcaggtgtttagttgcagactcagtttgtcagactttaaagaataatatgctgccaaattttggccaaagtgttaatcttaggggagagctttctgtccttttggcactgagatatttattgtttatttatcagtgacagagttcactataaatggtgtttttttaatagaatataattatcggaagcagtgccttccataattatgacagttatactgtcggttttttttaaataaaagcagcatctgctaataaaacccaacagatactggaagttttgcatttatggtcaacacttaagggttttagaaaacagccgtcagccaaatgtaattgaataaagttgaagctaagatttagagatgaattaaatttaattaggggttgctaagaagcgagcactgaccagataagaatgctggttttcctaaatgcagtgaattgtgaccaagttataaatcaatgtcacttaaaggctgtggtagtactcctgcaaaattttatagctcagtttatccaaggtgtaactctaattcccattttgcaaaatttccagtacctttgtcacaatcctaacacattatcgggagcagtgtcttccataatgtataaagaacaaggtagtttttacctaccacagtgtctgtatcggagacagtgatctccatatgttacactaagggtgtaagtaattatcgggaacagtgtttcccataattttcttcatgcaatgacatcttcaaagcttgaagatcgttagtatctaacatgtatcccaactcctataattccctatcttttagttttagttgcagaaacattttgtggtcattaagcattgggtgggtaaattcaaccactgtaaaatgaaattactacaaaatttgaaatttagcttgggtttttgttacctttatggtttctccaggtcctctacttaatgagatagtagcatacatttataatgtttgctattgacaagtcattttaactttatcacattatttgcatgttacctcctataaacttagtgcggacaagttttaatccagaattgaccttttgacttaaagcagagggactttgtatagaaggtttgggggctgtggggaaggagagtcccctgaaggtctgacacgtctgcctacccattcgtggtgatcaattaaatgtaggtatgaataagttcgaagctccgtgagtgaaccatcattataaacgtgatgatcagctgtttgtcatagggcagttggaaacggcctcctagggaaaagttcatagggtctcttcaggttcttagtgtcacttacctagatttacagcctcacttgaatgtgtcactactcacagtctctttaatcttcagttttatctttaatctcctcttttatcttggactgacatttagcgtagctaagtgaaaaggtcatagctgagattcctggttcgggtgttacgcacacgtacttaaatgaaagcatgtggcatgttcatcgtataacacaatatgaatacagggcatgcattttgcagcagtgagtctcttcagaaaacccttttctacagttagggttgagttacttcctatcaagccagtacgtgctaacaggctcaatattcctgaatgaaatatcagactagtgacaagctcctggtcttgagatgtcttctcgttaaggagatgggccttttggaggtaaaggataaaatgaatgagttctgtcatgattcactattctagaacttgcatgacctttactgt

SEQ ID NO: 339 - DNA, 23688 bp, Homo sapiens
  source 1..23688: mol_type = other DNA
cgtttgaaactccggcgcgccggcggccatcaagggctagaagcgcgacggcggtagcagctaggcttggcccccggcgtggagcagacgcggacccctccttcctggcggcggcggcgcgggctcagagcccggcaacgggcgggcgggcaggtaggagagcggctacacggcgcggggaggctggggtcctgggggcgcgaggccgtcccgccccgccccgccctcggccctcgccctcccgccccggccgccgctttccccgggaagcgtcccccacggctcctcctggggccgccgccagaacctgtaccgcgccctgtcatgggacccggccctagaccgaccgccgggctgggccccctggatggtggccaggggcggctagagctgggccaagaccgacggcggagcgggcgccccgaggtgctttgctctcctcgaccctctcctgtctctcggtcgcccaccttggctctttgttggctcccagcacgcggaccctcctgttgttctttggtcccttccggcctccgtcctggggccaactccatctaggccgcctgcggcggacacctgggcccctaccgcttccccgcacctgctgcgccgctccaccttccccccgcaccgcatccctcttgtgcaccagagtagcaccaaagcaccagcctggggccggtcccttctctgcccagagcccctcccgggcctccatagtcagtaaaggcccctcctgactaaggctgggtctgctgctctcccgagctcctccaggccgccagaaggcttcctccgagtcactttctccctgagttcgaggcttgcgggtcccccagcgatccagcaccccttcccctgccctgtacccagttattcagggcgaaaacctaagcgtcgtccgtaagtcccatatgtgccagtggccaggcccgggtctggtctggcatctactccttgggctccagaagcctgtggtttccctgcttcccttctgctcttaacctccccacccacacacagcaccacagtgggcttctcaagctgcagcaccgacctgccggggctgccccctctctcttctccaggaccctccccaactttgctcttcttcaaatcaaagcctccccaggtccccctccaccaccaggtgcctgtggggttcctgccctggtcgacactcggttctctctggcagcctttttccctacgtcattccctagactgggaacgctgtagacagaaagggtggcaagtgtgtgggtgaccggcgtgaggacctgggcagccctggaacctgggactgactggaggctctgatgtggaagttccttggcacctgttgctcagctctgggcttcccttgtttgcgcatcgtctcccagctcctcctctgggccttcaccctctcagcctggtcttgtcccgctgcctagcccggtgggagagagcagaccagagccgctgtcctgcttttctgccctctactgcccggtcctgcctcacgtcacacgcagaggcctgtggggagaccagggcttcctctggctcatccgggtttcttattggcccgggcttttccgtctcttgacttctgcttgatatagtaatacagcagtagagattatgcaggcttgggttttctttctcaccatctcagcctgaaggccctttagctcttggtcccaggaagcagcagtgctgcccatggctccccctgccaggctggagagtgagtctctgaagcaagatggggactcagtctgaggctttctctgccaagagacacgtgtgggaggtgtgagttccagagcaatgagcacacctgtgtgggaagtggtcgtgccccttgcagcagctgtcacgtctgtgtctggacaatgtggtagtgttgccctcacactgacacaaacatgttctgcttttccagaatgagtctgcaggtcttaaacgacaaaaatgtcagcaatgaaaaaaatacagaaaattgcgacttcctgttttcgccaccagaagttaccggaagatcgtctgttcttcgtgtgtcacagaaagaaaatgtgccacccaagaacctggccaaagctatgaaggtaagtgtgacctgtacagtgtgtggctggccaggttgccctagggcctgctttcttggtgacctctgagctgcaggacactgctggtgtggctgtaacagcttgaactaatgaataggtgctctcctcctcactccgcaacaggtgacttttcagacacctctgcgggatccacagacgcacaggattctaagtcctagcatggccagcaaacttgaggctcctttcactcaggatgacacccttggactggaaaactcacacccggtctggacacagaaagagaagtaagtgttggtgctgctggacatgctggagcttcaccctctctgtccgatggttcttgcaggaaagtgctgtcttgttctatcaggccttggctggattttttgtttgtttgtttgagatggagtctcgctctgttgcccacgctggagtgcagtggcgcgatgtccgctcactgcaagctccgccccccaggttcatgccattctcctgcctcagccttccaagtagctgggactacaggcgcctgccaccacgcccggctaatttttttgtatttttagtaaagaaggggtttcaccgtgttagccaggatggtcttgatctcctcctgacctcatgatgcgcccgccttggcctcacaaagtgctgggattacaggtgtgagccaccacgcccggccggccttggctggatttctcctgaaatctgcactgagtgtatgcagcatatggccagttcactaacagaaaagtcgatcatcagatacttggataacttcatacttcacttttttttttttttttttttttttttctggagacagagtctggctctgtcacccaggctggagtgcagtggctcgatttcggctcactgcaaactccacctcccaggttcatgccattctcctgcctcagcctcccgagtagctggggctacaggcgcccgccgccaccactcccggctaattttttagccgacctgattcttaactgcaagtggatggcgaggcggtgtctgtctttgcctagaaagggaggatcctggtggcagctctttactctgcggctgaactaatctgtctgggcacccaggaacacctcatctgcatccagggtgggaagggaccccagaggcatgattttctgttggttttttgctgatgtaactgttgttgctgttgttttgagacagagtttcgctctgtcacccaggctggagtgccgtggtgccatcacagctcactgcagcctcaacctcctgggctcaagcagtcctccaccttggcctccttagtagctgggactacaactgtgagccaccatgcccggccaattttttttttttttttttttttacacggagtttcattcttgttgctcaggctggagtgcaatggtgcgatcttaactcaccacaacctccgcctcccaggttcaaacgattctcctgcctcagcctccgagtagctgggattacaggcatgcgccaccacacctggctaattttgtgtatttttagtaaatatggggtttatccgtgttggtcaggctggtcttgaactcccgacctcaggtgatctgccggcctcggcctcccaaagtgctgggattacaggcatgagccaccacgcccggctggcccaaaacttttaagcagattttagatgtgcagagaaaagcataaggaacagaataccactgatgcttctcaccccctgagataaaatgtcaccagtaagtgcaggcagcatttcctacatccttctctgggccctgggtccgtctcccctctacccctccagcctgaatttgcagttcttcccatgtctgcttgctacttttcaactttgttttttgccccttttgaaatttggtcaaacgaagcgagaatgaatcaaacattggtttacaacgaccccaagaaggaagggagacccagcagcagagaagtcgcctcccagctgccatgggtgtgatccgtcccagagccacagatcccctgcctctcccctatgcctccaggatcacccagcagcctccatagggcagagggtgtagaggagctgggaggggcttgagaggttggccctgaggggctccagccagagtgactctgagcttgtggcttggactcgtggctgtcatctcctttctggaactctgctgaggcccaggtggtggtcactgtggtgctcccacgtcagtgggatgagaccaagagcagccgctgcgtgcagctgcccacgtgtcattcagaggacagccgagtggccgcctgggaaggcagtgccgccccaaggtggcagctgggcagcagaggagttgtgagcagtctgacaggtccctcaccctcagtttctcagttttgacatcttcaaacttagagttggaagagaagggcaggtgacatgggccccttatctgaggcactggcacatgaccctgcgtcttctcagggacctgaaggctggggaacaggtgaaacagtgtttgtgccctctgtgttgtagtccagccccaaccatcccaacagccgcctcttctgtcaggggccctgcgccatgcagtcccacattgtgagcagcgagtgccccagagacaggtgggtccctgggaaggtgttctctgcacctgtgccactccactgtagcaggcgccatcccagggaggcgtcgcagaggccactcaggtccttctgtgcctgcaggtggcatcctgcacctcagccctgcccttcagtgaaggctttgactgtccctggccacagcactgccagtccccgacttgaaggggaaagcagattcatgcagaaaacctttgtttaccacgccccctgctggccatcctggggcctgcaagtccccaggactgatctgttgggcatgtcctcgggtgaggtttaagccacaggacaatgttgactgagctttcttgttttgcttgtagctgatgttttcacgcagattaaagtgttatcggaatgctgtcaggtcccttaatgttagaattcagggtcattaagtggtgcacacccttcagtgattaggagaaacacaggcggaaataatgattatatgacttacaggcccacagcaggctggaggccacacagaggactggggccaggccctggagcataggcaggggacagctgagagggtggcagccagccttgtctatcggggagtagggtggggtcactgtatgctggtgggcaggtgctcgaatggattttttacaggaaatggtggatgccgggtgcggtggctcctgcctgtaatcctagcactgggaggccgaggcgggtggatcacctaaggtcaggagtttgagaccaggctgaccaacatgatgaaaacctgtctctactaaaaatacaaaacaaaattagccagacatggtggcgggcacctgtaatcccagctacttgggaggctgaggcaggagaatcgcttgaaccccagaggtggaggttgcagtgagccgagatcatgccattacactccagccttggcaacagagcaaaaatccgtctcaaaaaaaaaaaacataaaaataaaggaagtggtgggaaattgaggagcccagtctaccaggtgggagagatgcctccaggcttctttctctggcatcagcttgaggcatttgggtgtgctgtcccacatctgaccccccaggcagcagcctgtgctgtgtgcatgctgtgggcctgggggcagacctcgtgcatgatgacgagtgctgtttgggtggcagaggctgctggaggagtctgggtccagcacctggcaaagcgcgtgatgagcacaattaaacaggcaagcagcccagaggcacccctgtaacttggaaccccaagaagcatgagggcggggtcagcgaggaagtcacgtggttgtgtccagccgttccaccgggagctggtccctgggaggacaggaaggaactacattgaggaactgaggtggggggtggagaacgggaagccgtgccaagggtgactcagccctgcttctggtgtgagaatgttaaacctatgttgagaatgaatgctgaggcccctaacctcaccaggtactcgctgcttcacgttgattaagtctcttttaaaagccaacagctcatcaaggaagtggatgccaaaactactcatggaattctacagaaaccagtggaggctgacaccgacctcctgggggatgcaagcccagcctttgggagtggcagctccagcgagtctggcccaggtgccctggctgacctggactgctcaagctcttcccagagcccaggaagttctgagaaccaaatggtgtctccaggaaaagtgtctggcagccctgagcaagccgtggaggaaaaccttagttcctattccttagacagaagagtgacacccgcctctgagaccctagaagacccttgcaggacagagtcccagcacaaagcggagactccgcacggagccgaggaagaatgcaaagcggagactccgcacggagccgaggaggaatgccggcacggtggggtctgtgctcccgcagcagtggccacttcgcctcctggtgcaatccctaaggaagcctgcggaggagcacccctgcagggtctgcctggcgaagccctgggctgccctgcgggtgtgggcacccccgtgccagcagatggcactcagacccttacctgtgcacacacctctgctcctgagagcacagccccaaccaaccacctggtggctggcagggccatgaccctgagtcctcaggaagaagtggctgcaggccaaatggccagctcctcgaggagcggacctgtaaaactagaatttgatgtatctgatggcgccaccagcaaaagggcacccccaccaaggagactgggagagaggtccggcctcaagcctcccttgaggaaagcagcagtgaggcagcaaaaggccccgcaggaggtggaggaggacgacggtaggagcggagcaggagaggacccccccatgccagcttctcggggctcttaccacctcgactgggacaaaatggatgacccaaacttcatcccgttcggaggtgacaccaagtctggttgcagtgaggcccagcccccagaaagccctgagaccaggctgggccagccagcggctgaacagttgcatgctgggcctgccacggaggagccaggtccctgtctgagccagtaagtgtgaggatgggatggggagcgtggcgtggggcagctgccctgcagtgtatgtggtccaggacccgaggccagaagtgtcatcagatactcctttgaggccgggtaggttctgcctgaggaggggcctctggataaaaacagggctcaggtggctcccagctgagggtgcttggccttgccttggctgccatgcatctctttagtgctcctggcctaaggagggatccaataagggcgggctcaggccagaagccaaatgcaaccaaccctgggcaggaccctgtcccccagtcatgttcctcctcaggtgaacttgacttgggtgtgtaactccaaaagccaggcaaagcctgttactgcctgggtggcgtccgctgcttgctggggtcttggccgtgggtctgctgcctcctggctgaatggtcttaggctacatctcctagagttgctcagtgggagattgtcctgcctgtagggtccagccctactgggtctgtgggttttttctcctcgtgtgcatagacaagagattgtacaaataaagacacaagaaaaagacagaagaaaagacagctgggcccgggggaccactaccaccaaggcacggagatcggtaatggccccgaatgtctggctgcgctgttacttattggatacaaggcaaggggacaggttaaggagtgtgagccatctccaatgataggtcaggtcacgcaagtcacgtgtccactgggcccttccctgtttggcagccaaggcggagagagaggacagctgacgccattattttttctatgtatttcaaagactttagcactttgactaattctgctactgctatctagaagacagagccaggtgtacagagcggatcatgaaagtggaccaggagcgtgactgctgaagcacagcatcacagggacacaggcctctggatggctgcgggcgggcctgactgattccacaagagatggtggagcagagtcttctctaactcccccagggaaagggagactccctttcccagtctaattaacgggtgccttcccaggcactggtgctaccgctagaccaagctaggtaacgggtgccttcccaagtgctggtgttaccgctagaccagggagccctccagtggccctgtccgggcgtgacagagggctcacacacctcttccggtcactttctcaccgtgtgccttcacctcctatctctatatggcctggtttttcctagggttatttgtttgtttgtttgttttttgagacagagtctcgctctgtcacccaggctggagcgcagtggcgtgatctcgcctcactgcgagttctgcctcccgggttcacaccattctcctgcctcagcctcccgagtagctgggactgcaggcacccgccaccatgcccggctaatttttttgtattttttagtagagacggggtttcaccgtgttagccaggatggtctagatatgacctcgtgatccgaccgcctcggcctcccaaagtgctgggattacatgcgtgagccaccgcacccggcgtttcctaggttattattgtagaacaaagattattataatattagaataaagagtaaagctacaaactaatgattaacgatattcatatataatcatatctataatctatttctagtataactattcttattctgtatatttatgatactggaacagcttgtgcccttggtgtcttgccttggcccctgggtggcttgctgcccacacctgccccagcctccacatttgaagccttttgtcagtttcacagtaaaagggatgtactcatccttgtgattccctttggctgcatcgtgctgactttagagctcccagcctgcttctcccagagctggcaggcaaggcgcgtgttttcctgctgggtgaggttggtgaggcagttttgtggccaggtcgcttgggacagccccatgcctggcacgctctagctgaatgttcacgtggccggcacagcagtgcagggaaaggcgatggcagctcagtgctggagcaggggacgccggggttatggggtggggggcatgggcctctgctgactctgtctccccaggcagctgcattcagcctcagcggaggacacgcctgtggtgcagttggcagccgagaccccaacagcagagagcaaggtaaggggtgcttgtgtgggtacctgtgctcctggcctggtcgtgtagaagagtagcaggcagtggaagcccccagcagccttgggtgacggggtgggatgtcccgctccctctcccccaagtctacttcaacaaggttgtggggaggcaaagccacaccccaagtaccttgactgcactgcacagggtgactctgccctttcctccaggagagagccttgaactctgccagcacctcgcttcccacaagctgtccaggcagtgagccagtgcccacccatcagcaggggcagcctgccttggagctgaaagaggagagcttcagagaccccgctgagggtacgttgcctggcacagacgtcacacacagtctgcccggaggggatcccgtgagcacttgggcagctcgagacacctgcatcatcggcaggtggtcatttcgcaggcagttgggtcccttgactttgaatgactcatgcacaaacttgtggtttgtcaaaacttagtcagtgttaggagagcagggctcatacctttaacataaaagacttctagaaatggaaactgtagactcaggaaaatgagcaggagaggtgaacaatgcagtgcgctaatgagatacaagtgtagagtcaacaactggatactcgatcatcagaaatactgcttgaaacgaccttcttttttttttctgagatagtctcgctctgtcacccagcctggaatgcagtggcacaatctgggttcaatgcaacctccacttcccaggttcaagagattctcctgctcagcctcccaagtagctgggattacaagcatgtaccaccacatccagctaatttttgtacttttagtggcaacggggtttcaccatgttggccaggctggtctcaaactctgacctcaagtgatccacctgcctcggcctcccaaagtgctgggattgcacgcgtgagcccccgcgcccggcccagaaccccttgataatgaaatgtgaagcctgaaccttagacaccagactgcagttaaatacggtttgtccgtaagactggaggctgcagttgaatacggtttgtccataagattggaggctgcacttgaatacggtttgtctgtaagattggaggctgcagttaaacatggtttgtccataagattggaggctgcacttgaatacggtttgtctgtaagattggaggctgcagttaaataaatacggcttgtccgtaagattggaggctgcagttaaataaatacggtttgtccgtaagattggaggctgcagttaaataaatacggtttgtccgtaagattggaggctgcagttaaataaatacggtttgtccgtaagattggaggctgcagttgaatacggtttgtccgtaagattggaggctgcagttgaatacggtttgtccgtaagattggaggctgcagttaaataaatacagtttgtccgtaagattggaggctgcagttaaataaatacggtttgtccgtaagattggaaggtggaacggtccttaaattaaagtgcatttggtaggaattgatggctgagttgttttaaaggacacacagccaggtgggtataagatctcaatttagagaactgaaaacccaggcacacagcagacacgaatggcatgtagggtttgtcgctgacaggatagttgtgggccgccaccatgtggggatatcagctcagctgggatgggcctgtcaccctcacgcaggatccctggaatcacacagcacggccttctgtgtccggcgtctccctcggggaggtgtgtttccgagtcctggccatgctggagcaggtgtgggtgctcctgtccttgccgtggcagcttggcttcacatcatcttatccattcattcatggatttgctggtttctgctttttagctgtcaggagtagtgctgcctcgaatgttcaggtgtaagttctatgtggatgtattcttccatttctcctggatacatagctaggagtggagtcgctggtcacagtaactctgctcaccttttagctaccaggtggccttccagagtggctgcagtgtttcacattcccactggcagttataagagagctccagtttctccacatcctcgccagcgctgcttgtctgtcttgttgatcctagacttccagcgggtgggaagcggatctggttgcggttttgatttgcagttcccaggtggctcatgaacgagcgtctttttatgtgctcgttggatatcttctttgggaaagtgtctgtcgagatcccttgtccattgagccacttatgtttttattactgagttttaagaggtaaatcccttttattcaagaagtgagggaaaggaaaaaatacaaagttaagtcccttatcagatgatgtttcaaagtattggcttttggccaggcataggggcccacacttgtaatctcagcattttgcggggccgaggcaggattgtttgagccctgtagtttgagactaacctgggcaacatggcaagacctcatctctaccaaaaaaaacctttttttttattacctggcatggtggcgtacacctatagtcccagctgctcgggaagctgagatgggaggctcgcttgagccaggaggtcaaggctgcagtgagccatgattgcactactgcactccagtctgggcgacagcgagaccctatctgaaggaaagaaaaaaaaggcagaaatgaaaactgacaacaaggctaggtgcggtggctcacgcccgtaatcctagcactttgggaggctgaggagggcgaatcacctgagatcaagagtttgagatcagcctggccaacatggtgaaacctcatctctactaaaaatacaaaaattagctgggtgtgttggcacatgcctgtaatcctagctacttgggaggctgaggcgggagaatcgcttgaacccaggaggcggaggttgcagtgagccgagatggcgccaccgcactccacctgagcaacagagcaagactctgtctcaaaaaaaaaaaaaagaaaagaaaactgacaaggccatagcagagaaggacctacaagtttttgctagactaaataattggcaaccgttttttagcttaattgagaaaaggagagaatgagcaaatactgctaggcatgaagaaagggacaaaactagagatgcctcagcctggatctcagccagatcaagaccctgtcttaaagtaccagtttggtttgtttttttcccgagacggagtcttgctctgtcgcccaggctggagtgcagtagcatgatctcagcttgttgcaacctccgcctcctgggttcaagcgattctcctgcctcagcctcccaagtagctgggattacaggctcatgccaccgtgcccaactaatttttgcatttttcgtagagacagggtttccccatgttggccaggctggcctcaaactcctgacctcaggtgatccacctgccttggcctcccaaagtgctgggattacagatgtgagctactgcgcccagccacagtttaagagttttatagttttagaggccgagaccggaggatcacttgaagtcaggagttcaagaccagccctggcaacgtagcaagactcctcctctaccaaaacaaaaagtaggatagttttaactctcacagttagggtgttgatccattctgagttaatctttgtatgtggtatgaggcaccttttctttttttttgcaacagttttccctccgctgcccaggttggagtgcagtggcataatctcagctcagtgcagcctccacctcccaggctcaaggagttctcctgcctcagcctccctgtaataggagtgcagcaccgcgcctagctaatttttgtattttttgtacagacaaggttttgccctgttgaactcctgggctcaagtgatccactcgcctcagcctccacccttagttttaatcaaaagttatattatcaaaaattaaaagacttgtctagggtaattttaaagactaatagttctcaaccagagcagttttgcccccgcctttccccagatgtttgtggttgtcacacctggaggtgctgctggcagggagtgggtagaggctggggatgccgctcagcaccctgcggtgcccaggaggcgcctgccgcagacagcagtcaggccccgaacatccacacctccaagggaggaaatactgctggctggaatgatcctgcctcactgagtgctgagggagacaccagcccgccgcccttagggccctggtgaggggcgatggcggcggcatgattcactcctctcagttctaggcacgggcgcggaggtggattacctggagcagtttggaacttcctcggtaggtaccaggcaattccgcgaagcctcacccacagggtgtccgagagcagccacggcaggtcttgcccccggagcgtcccttggtgcccacgtccccccagctgcacacaggcccaggcattgtggcgggctgtgaatccagggccccttctgcagcacctcctctaagtggtgtcctgtggcagggctctagggctctctacctggtgcctagcccaggatgaaactctgacacgctgtgctgctgggaatggtggtgtctcgggcagggttgtgggtgaccgggggtgggagtgtgcgggtgaccgggggtgggagtgtgcaggtgacctccctggcccttagcccccgtgtgtgttaggggatggcagtcagacctgatcacttgccctcttgtccccagtttaaggagtcggccttgaggaagcagtccttatacctcaagttcgaccccctcctgagggacagtcctggtagaccagtgcccgtggccaccgagaccagcaggtatgtgcgccggccctccctcatgcatgaagccttgagtgtgggaagactggaggctgttcctaggtgtgctgtctgcacagaggcttctagaccggggggagatgatcagaactggaaaggagctgtgctaggggtgggctgggcagcaaggccagagcagcccttgtgtgtctggcaggagcaacggcagcctaccctccagccacagggctgctgccttgctggttacagccaccgttctaggtatattaaagatctaaacttaaatcttttaagagtacttcctctaaaacagaggtcggcaggccaggcgcggtggcttacgcctgtaatcccagcactttgggaggccgaggtggatggatagcctcagctcaggagtttgccaccagcctgggcaacatgttgaaaccccgtctctactaaaatacaaaaattagccgggtgtgacggcatgcacctgtagtctcagctacttgggaagccgaggcaggagaattgcttgaacccaggaggcggaggttgcagtgagctgagattgcgccactgcactccagcctgggcaacagagtgagactccatctcaaaaaaaaaaaaaaaaaaaaaaaccaaaaaatagaggtcagcaaactatcacctgtgggccagacttggccactgcctgtttgtgtaaagttttatcgtcacagagccatgcccgttcctttgcaaattgtggcaactttcacactacaaggccagaactgagtagtgtgacagaggctgtgtggccttcaaatcctaacacatggccgggcgcagtggctcacacctggaatcccagccctttgggaggctgaggcgggtggatcgcctgaggtcaggagtttgagaccagcctggccaacatagtgaacccccatctctactaaaaataacaaaaattagccgggtgaggcggcaggcgcctgtaatcccagctacttgggttgctgaagcaggagaatcgggtgagcctgggaggcaggggttgcagggagccgagatcatgccactgcactccaatctgggtgacagagtgagaccctgtctcggaaaaagaaaaaaaaaaaggctctgagctgtgaacagccccctgatgaggcagcactggctccgctcagcctgcagtgggtaatgaagcgtcaccgtgctctcccggaaggacaagcagccacgtgggatgggcaggtgagggaggggggcacggagcagcagagaggccgggcatgctggatgcgggtctgcgttttctaccactaccctgacttgagtggttttaaactaaaaagcaaagagcccggttagcttgtccacatggtcctctgtgtcctactcaacactgggagggcctagtgactgaggctgcctctgcttggtggcagcatgcacggtgcaaatgagactccctcaggacgtccgcgggaagccaagcttgtggagttcgatttcttgggagcactggacattcctgtaagtccttgagtccctcttgaactgtcttgtgtgtggtctgagggaacgagttgttttaagggcctatattttctattcctgggggtctgagcctttggttttgttgggggcatggggccgctgtgctgttccctcgccgcactgtctcgggtccctcatgcactgtctgaggctcttggcctgtgtgggcctttcctccctcacactaggtcagaggtaagaggcaagggcgaaatgggttcctgtttcatccccatctcccgcaggtgccaggcccacccccaggtgttcccgcgcctgggggcccacccctgtccaccggacctatagtggacctgctccagtacagccagaaggacctggatgcagtggtaaggacgcaggtagtagctattccacagaacctgcaggccgctctggggcttggccaacagtgggcaggggtccaacagcctgacccgccatccctgccatccctgcccctgctggttggggtggaattgcagagagctgccggcccctggcctgtcactactgcccaggtcgctgagggtccaggcttccacccagtgtccccgcagtcagctgcccaccagcagcctccccgggactctccggcctgggcatggcgttggcctctggtggccttgcagcagtgagtgtggttcttgctgccgtgagcccgagtgtcgcccctttcctcccgccctcccacgagtccagacgcatctcctggcagcttaggaagctccatcttcacccaccccacatctgagggtcccgtgccttgtctccctccatcctcactgtacatgccaggcttcagcctgttctaactccgggcctaaattgtccctaagagagctgtaggcacacaaaggggctgggtgtctgcaggcaccactgtgagctaccgtcgccagatggtccccagggaggtgcagacagggtggttccggaggccggctggcagggctgggttcaagccccaacatccacaccagtgttgttcacagtggccccaggtgtcatctccgcagaggcctgtgatgtggccctgaccccgtaccccaacaacctccttccctgtgtcagagcccgtgtgagtaacccaatagcaggcctggggaccacagtgtggctggccccctcctctgcaggcctgggctccgggggcaggtggcccctgcatgtaacttatgttagaaatgcacaatgcttgttctctggtgccacaaagaaatagtgctcgaacattaattttctcagcaaggcagtttttactttctgcagaaagggtgcccctcgcagatggagcaatggcaagagcacacctgaacaagggaggggaaggggttcttattcctgacacaggtagccctactgctgtgttgttcccctgttggctaaggttggaccacacagtctaagccaattccaattggctattttaaagagggcagggtaagagtcagagtggtggggtgagtagtttgacgggaaggacggttaggaacaggtaactcaaggtgacttaggtcagagcaggtgaccgggatgagtcaggatggagcaggtgaccagggaacagatgtgaactactgattaggactggcgggaaaattgtttactgaaactagaagcaaggggcgaagagaaccaggaattttaaatggagaatcaaagaagagatctggccgggtgcagtgggtcacgcctgtaatcccagtactttgggaggccgaggtgggcggatcacgaggtcaagagatggagaccatcctggctaacacggtgaaaccctgtctctactaaaaaatacaaaaattagccgggcgtggtggtgggcacctgtagtcccacctactcgggaggccgaagcaagacaatggcttgaacccgggaggcggagcttgcagcaagcagagatcacgtgactgcactccagcctgggcgacagagtgagactcttgtctcaaaaaaaaaaaaagagatctgaacatactgacttactgattctttgaagacaaacttggagttcactatatttaacacttaggacccctagtatctgccactgggctgcgggggcagctgcagggacacacacctgttgggtgcctgctggttccacccaggagcacagccagcagcctcatgcctcctgccccctggcagtcgggtgcacgtggagcaggtggccttggcctcgacagggttcccagggtcccactggaagccccacatggaactgtgcctctgggacattgctccagggacctcgggtgcgggctggccccatcctgtggggaggtcctgggagggtcagtctggcccgcctgcctgctgacttgggtgtggcctgagcaggtaaaggcgacacaggaggagaaccgggagctgaggagcaggtgtgaggagctccacgggaagaacctggaactggggtaaggaggccccgtctcctgtcctccccgtccccatccccctcgccatccttgtccccatccccctcgccatccttgtccccatccccctcgccatccctgtccccgtccccatccccacctggcctgggaccgctgggcacccgaggcaatggctgtgtgtctgttctcctcccacaggaagatcatggacaggttcgaagaggttgtgtaccaggccatgggtgagtgcccgggccaccgaggccacgtgcctccacgaggggctgcctatgccccaccctggccctgccctgcaccctgcctaggaccccaccctcctgaggccccttttcctaacacacgagtcccttcaacatgggcccggccgtggaagcactgaggcgagttgcggggaagctggtggtagtgaggctggtggctcccacggagccagggcttggcaggccccacagttgtgcagatgctgagctagcagtggggctgtggtgggagcagagtctgtcccgccgtggcctaccccactccaccctgccctcgccgtgcggctatgtctagcagcagcctctgtaggtgtctggcaggacgggaacaccaggcctcatctggcctcccaaaagcttgggctcctggaggtgctactgtggggatctgtcttaggctgagtgtcagccggcggcaggtgaccgcctggcccttgcagtccctccaggaccaccacgaagcacgacgcacatcctggagctcgccataccggctcccaggcctcaccctaggctctagggtgttgggcgccgcctcttcagggacctctggcccaggctccagttccctgcggatctgatgtggaggaaacagctgtttcctgggctttgcatccggcctagaagatcctgggtggagggacccatcaccctccgaggctcacacccactgcccacctctcctcctggcgctcgagtcccttgcctcattccttgggctgtctctggcacccatcgtttcggttgcctcctcatcctgaacgtttgcttttcttttctcaagaggaagttcagaagcagaaggaactttccaaagctgaaatccagaaagttctaaaagaaaaagaccaacttaccacagatctgaactccatggagaagtccttctccgacctcttcaagcgttttgagaaacagaaagaggtgatcgagggctaccgcaaggtatgtctccgccaccctggtgtcctcacctcggaggctgatggactcatggtccaagccagcggggctacaagctgctgtctttgcaccttggtccttggccaagcctccccttgccacgggggcatgggatgacctgtgaacgagacagggtgcaggagtcacagcatagctggtttgcgaggcagctgagggcggcaggaggcagagtgagcagggaggccatctgagccgtccgctgttgtgtgacagacgactcggctatgatcaggcatctgtgagatttgagacagcgctggtgcaccggggcctggggcacctcggaaaggtgtctgggctgtccgagcgcttgggtcccaagggttggggacccagggcatgcagtatccaaggcgggaggcccactgaaaggtggtcacggctgtgcaaggccaccctggtgtcctcctggccacgggactctgagcgccccccaccttctgtgctgggcaaggcccacatgcttgctggaaggagggatgtctgggccatccatctgcccagagcaggcctggaaggtgcctgcgaggccgccagagggttctgcccacagcagcaatgttggagcggaggtgctcaacgcctcctgtggaggagctggacctgcaggtgcagctggaagaggggctgtcactgttggtgcaagggggttggggacaccagatgggtcccctgggagtcagactaaactggaaaagcggcccttgcagggcctgctgagccacacctcatctgagtcctgaagtcaggtgggtgtcagtggctggggcccagctgcctaacagaagcaagcctgaatactctagggaagaaggtatcttatgctttaaattgctgctgcagttttaaattagtgtctggcacagaataaccaagtgtgaaaggaacaggaaacatgagtgaaaatcagacccgttattagagtgaggcatggtgatgtacacctgtggtcccagctactagggaggctgaggtgggaggatcatttgagcccgggaggtcgaagctgcagtgagccatgattgtatcactgcacccccagcctgggcaatagaccaagacccccatctctaaaattaaaaaacaaaaacaaaaactgttgatagacccacaggagccccagacgctggagttggcaccggcaggtggtgcctcaggtctgcagggagcagatgggaagggccctgtggcagcagagtgcccaccggcagcagagtacagcagtctggcccagcacagacgcttggagaggcaggactcttcacacggtgctgctggcttgaggacacagcggctttgctgaccttccctcaggttgggctgtggtgtgagcagctgccttggcctcgcctctccccggggcaggcctgtgcctcagctcccactggccacctccctacttcctcatggaggctcctttgcacatctaatcccatcttggacgacccagtgcagactttaaagtaattgtcttctgtattcagaagagtattgcttcaatagagaccttgaaactagaaaagaatccccttcgggagaccgagacgggtggatcacttgaggtcaggagttcgagaccagcctgggttacatgatgaaactccgtctcctaaaaatacaaaaattagctgggcagggtggcatttgcctgtagtcccagctactcaggaggctgaggtaggagaatcacttgaacccaggaagtagaggttgcagtgagccaagatcgtgccactgcactccagcctgggcgacagagtgagactccatctcaaaaaaaaaaaatacaaaaattagttaggcatggtggtgtgcacctatagtcccagctactcaggaaactgagacagaaaatcatttgaacctgggagacagaggttgcagtgagccgatatggcaccattgcactccagcctgggcgacagagcgagactctctcagaaaacaaaaaatacagaaaaactaggccggcttatgcctgtaatcccagcactttgggaggccaaggcgggaggatcatgaggtcaggagttcaagaccattctggccaacatggtgaaaccctttctgtactaaaaatacaaaaattagctgggcatggtggcaggcacctgtagtcccagctacttgggaggctgaggcaggagaatcaatcaggaggtggaggttgcaatgagccaagatcgcgccatcacactatggcctggcgatagagcgagactccgtctcaaaaaaaaaaaaaaaaaagcctgggcacagtggctcacgcctgtaatcccagcactttgggaggccgaggcgggtggatcacgagatcaggagtttgagaccagcctgaccaacatggtgaaaccctgtctcttctaaagatacaaaaattagccgggcatggtggcacgcacctgtagtcccagctacttgtgaggctgaggcaggagaatcgcttgaatccgggaggcggaggttgcagtgagccgagatcatgccacttcactccagcctgagtgacagagtgagtctccgtctaaaaaaaaaaaacagaaactagaaaagaaccaaatggaaatttctaacaggtacacagttaacaacattaacaattcaaagggtacaggtcagatgagggaagcagaggctgagttgggaaccagtgtgtggacggcagcccccagagccagagggagagacgccgctgtggcgggaggcttgacctgtgcacacgtgagagcttccggatgccgcctcccggacagacgctgttgggaattttccacagcagagaaacacagtgctgtgggtttaagggaggcgtgacctccgcaggacatcaggggctgcatgctgggtaggggctcagggagaggctgcagtgctgagggtgcttctgggatacagggctgcgacagaggagtgaggatggctgggctgtgaggccgctgggggcactgcaggaagaaggcaggtaggctgagccttcccaagcagaggccactcggggacccaggaacccctcagttagggcttctcagtcactgagcggaaggtgcccccagagggggcagcagcctgtgaggagcaggcgtgtctgggtaaccatgtggctcctgctggcctcccctgcctgtccccaaagcacagggctcagctccagagggagacgggctgggctgtcagtggtcccaggtgcatcccactttccagcagcacttggtgccagcagaggctgcaggtgtggcaggagggggcccagccgtgagggcaccaggttcaggcccggcatctcagggtggagagccagggctgtcctgaacctccagagggggtgagctgggaacttgtgtgaaggggctttttccaaaaggaaaacgggagctactggctcacggctgatgccccagacagcctcgaggatctgcaggtccccagacaccaagcctgggtgctctccagcagacggcgtggtacccacagctaatgcctgccccttcctagaacgaagagtcactgaagaagtgcgtggaggattacctggcaaggatcacccaggagggccagaggtaccaagccctgaaggcccacgcggaggagaagctgcagctgtgagtgctgggcgaggccccaccctggagggagaatctgagcacctgggccccagctcagcctctgccccgcccctacccctccagggcaaacgaggagatcgcccaggtccggagcaaggcccaggcggaagcgttggccctccaggccagcctgaggaaggagcagatgcgcatccagtcgctggagaagacagtggagcagaaggtgggtgcgggaagcccagctcaaggggccgtctggcagcaccttctagaaggcccttgggcctgctgctccctccaagcagggagaagccccgcaactcatcttcctcctccagactaaagagaacgaggagctgaccaggatctgcgacgacctcatctccaagatggagaagatctgacctccacggagccgctgtccccgcccccctgctcccgtctgtctgtcctgtctgattctcttaggtgtcatgttcttttttctgtcttgtcttcaacttttttaaaaactagattgctttgaaaacatgactcaataaaagtttcctttcaatttaaacactgaa

SEQ ID NO: 340 - DNA, 7562 bp, Homo sapiens
  source 1..7562: mol_type = other DNA
ccttgaccccacctgccttggccgctctgctcccgcctcccactgcccctcaggccagctcaggagccatggggcgctgggcctgggtccccagcccctggcccccaccggggctgggccccttcctcctcctcctcctgctgctgctgctgctgccacgggggttccagccccagcctggcggggtgagcactgaccttgtcgcagtgcgaccagaggttcccagtggctacttggggtccttgggaggaggccagagggagggtcgccacagagcgtggggatttgagggggcgggggtccgagcagggggcttacgttgaaagctggccctcacagggcaggtgggtgctggactggccttggaggctggggcctgggctcacggagccccacctgggggctgtcatccctgtgcggcctggcctgggcccctatgggtctgggggctgccccctctctctggacctctgttgggtctggatgcgtgaggttgggggaacctcccagggcctcctagctgctcccatcaccaaaaactgacgtcagggtttaagcttggtgggtagcagtgcctgggcctgggcagtgaccctgagcaggtgttaactaggggccgagggcggggaaggtgtcagggcctggctgaggcctcaggaatgtcgtgtgtcctcctggaacctgctccgagatctgggggccccagtatggaaacaggctcagggctgtgacctcctgcccggcaggacctgagtgtgagggtctgtcccacactgacaccctttctgctcctcctagaaccgtacggagtccccagaacctaatgccacagcgacccctgcgatccccactatcctggtgacctctgtgacctctgagaccccagcaacaagtgctccagaggcagagggaccccaaagtggggggctcccgcccccgcccagggcagttccctcgagcagtagcccccaggcccaaggtgggtcaggtgggcctgggaggaggtgtcgtgcttcaccttagggctgggtgggaggagcatggctgcggctggaggtcctgaggggctcgggtgcccctcgagggagccctgaccctgccaccccctccccacagcactcaccgaggacgggaggccctgcaggttccccttccgctacgggggccgcatgctgcatgcctgcacttcggagggcagtgcacacaggaagtggtgggtccgggcagccggggcacccgagctggggtcacctgccccacgctgcctgcttttctgggagccgggcacacagtaggcgctcaccacgcagcaggcggacccagtgaacccagagaccctccagggtggtggggtggggtggggggcctctgcctgggacccccatgcacgcaggtgtcgccccccaggtgtgccacaactcacaactacgaccgggacagggcctggggctactgtgtggaggccaccccgcctccagggggcccaggtgggtgctgggttgggtagcctggggcgggcagggggcactgggccaggccagaagggccaaggggaggatggggcggacccgggcaggggtcctggctggaggggagcagaagaggagctctgggattaaccccggtgggtgccacttagggccagagcctctcccaggtgggacctgcgtctcatggtggctgcgcggccatcgctggggccaaggcgccgcctggtggtgaggccgggccctgcagccacacaggcgtgccccaggcaggggacaggtgggcagggtctgtggggtgcggtgccagccgccctgctcacatgggtcctgggacacatgggaggggtctgctgcctgacagtgtgggtgtcaggcttccaggaagccacgtgcacagctgggccagtggcccaggtgttgagtgggggacgctgggaggaaggggaggtctgtgcccctcccagggaccttgcaccccgaggggcgtagagagggcccctttgctctcagagcccctcactggggcctgatggacgccttagcaagcagagaatgtcacagagggaccctgagcctcccagtccgcccctcacaccccctcccgcatgtccccagctgccctggatccctgtgcctccggcccctgcctcaatggaggctcctgctccaatacccaggacccccagtcctatcactgcagctgcccccgggccttcaccggcaaggactgcggcacaggtgagctgggcctcggaggtccgcaggggtccaggggccggagcaagtccccggaggatgggagaacaggtggctcccgagtgcagggcaggggccctgcacggggacagcaggtggcagggtgtgagggcttactgtgcacccctcagagaaatgctttgatgagacccgctacgagtacctggaggggggcgaccgctgggcccgcgtgcgccagggccacgtggaacagtgcgagtgcttcgggggccggacctggtgcgaaggcacccgacatacaggtgcgccacggggtgtgagccgtgccactgacccctgacgggtgtccctgtccacacccgagtgggaggaatggcctgaggtcacccagaaacaagggacaaggggtggaccccggccccgactccgctgtcgtggggcactgcgcggcccctggcccagctcctcggccctgcccccagcttgtctgagcagcccttgcctgaacgggggcacctgccacctgatcgtggccaccgggaccaccgtgtgtgcctgcccaccaggcttcgctggacggctctgcaacatcggtgagtgggtcagccccccggggtgccctggggcagtgccgggtggacccaccgtgggccggcctcactgcccctctgcccgcagagcctgatgagcgctgcttcttggggaacggcactgggtaccgtggcgtggccagcacctcagcctcgggcctcagctgcctggcctggaactccgatctgctctaccaggagctgcacgtggactccgtgggcgccgcggccctgctgggcctgggcccccatgcctactgccggtcagcaccacgccgctccaggccgccgcatgcggggcaggcaggatttgtcctggggagaggccccccggctccctaggacccaggcggggccagctccgtccagacaggccccggaacctctgcctgggaggctgcccgagggagggccactctcttcccactgctccaggtgcggggaaccgccctgctgggggttccgatgccccctccccatgccctcttcgaggggcagtgtgactccctgccagcccccacttatgcaccgcaggaatccggacaatgacgagaggccctggtgctacgtggtgaaggacagcgcgctctcctgggagtactgccgcctggaggcctgcggtgcgcggctggcggggggtgctgccttgggccccaccgaggtcacagcagttttccccgtgatcctcctagcccctccgcacacctggctactgcatctctgacaaatggggaaactggagctcacgggatcaggctggtccaaggtcacgcagtgggtcggtactggggtcacagtggggaagcagcccgctgcagggggctggtcaccaggcgacggcctcggggtggcacctgcccagcctggaccatgcccaggatggccgcagaagcctttcagggaggtgcagggagggcagcgtgcaggccccccagaggccacctgcttcctgccctggggagaggccccccggctccctaggaccccggcggggccagcccggggctctcatgtgggggtctctgactgtgctggggctggctgtggggttccgggctgctgagggggccacaaaggcctccgtgtgtccagcccctctggccctcacagagcctcgggatcgggcatcaaaccccattctacagatttggaaactgagggcagaggtgagtgggcgccagggcctgagcagcgtggacagggggtccggccatggccctctgcagcgcctcctgccgggtagggcctgtgtgtggaagggggctggccctgtgaaccccaggggtgtgacccggtgacctttgctcccagaatccctcaccagagtccaactgtcaccggatctcctggcgaccctgcctgagccagcctccccggggcgccaggcctgcggcaggaggcacaagaagaggacgttcctgcggccacgtatcatcggcggctcctcctcgctgcccggctcgcacccctggctggccgccatctacatcggggacagcttctgcgccgggagcctggtccacacctgctgggtggtgtcggccgcccactgcttctcccacaggtgcacctcctctgggccccagtcacctgccctgaggccccacacaccatccagcgtcactatgcgcctgtccccacccgcttgcggaccccatcccggtgcctctgctgaccccttcccggggtccccggtaaccctctctgacccctctgggtcttggggctcagtcctgagctgggcatgcatggacactccagaaaccctgtccctattgagggaggccaggggtcagtggcatttccacagaggacccagcgcctgcggagagtgcagtgggccaggtcctgtcctccccgcaggccccgcccctcccagagtcctggctctcagtagggagccagggagcgcagtgacaatgcgtcagagccctaggagcccaagcacagccagggaaactgaggcccagcccactcagccggctcccctcagtgggggcgcacagccacccaggcccacactctgggaggcgggcctcgagtggggagaccctgagacggagcagcctgggccagacgcccttccaccttcgatgggcaccccagtgattaggggcaggggtccggccagccgagggtctggcggcctttcgaggaccacagctcccagggtggggtcctgcgtggccctgcagaacctgcagccggcggctcctgggcctgcaaatggggccagagccttcctcagtgtggagaaatggggttccccacatggagcccagggcaggaggccgaggcagggtggagcgacctccacacagcagatgggagccaggctcaggggcccaggctctgtgcccagcaggagtgagggctgcatctggggaccccacaatgtggatggaagctggggcagggcctgagcaggccaggtctccacccactcgggtcggccttgcagccgatcctgcctgggcttggcctgagactccccccagggcttgtgaccagtgttgtcaggagggatggcaccgcacttcagctcccatgcctggatctgggggtgactggcaatagcccctgcttggtggtccctgtctccccagtatcaacagcccacacccaggcacctgctcagacccctccccgggaccagggtcccacaccattggcctccgtgggcctgacagggggtggggagaggtgagcccggtggctgggggagggctggtccatgcagcctccagccccccttgcacagcccccccagggacagcgtctccgtggtgctgggccagcacttcttcaaccgcacgacggacgtgacgcagaccttcggcatcgagaagtacatcccgtacaccctgtactcggtgttcaaccccagcgaccacgacctcggtgagctccggcgtgtcgtggctgcactctgggcaggtgggccctgtgctccccaggccaggcccagacaggggcaggagctgggcagacatgtggtgcgggggaagctgggggcagggcagggaggacagggcaccgctcccttctggatctcccaggctgccctgtggaccccactggctaccctccctccaccacgggccccgacagcctcccgttcagcccgcacaccacaggctgaccctggccactcttctgatcagtcctgatccggctgaagaagaaaggggaccgctgtgccacacgctcgcagttcgtgcagcccatctgcctgcccgagcccggcagcaccttccccgcaggacacaagtgccagattgcgggctggggccacttggatgagagtgagttgggaggggggcgcccagcgccccgccagggtggacagtggccagccacagtgtgggtgtcacgctgagggcattgtgtcccacagacgtgagcggctactccagctccctgcgggaggccctggtccccctggtcgccgaccacaagtgcagcagccctgaggtctacggcgccgacatcagccccaacatgctctgtgccggctacttcgactgcaagtccgacgcctgccaggtgagctggtgcccgccccaccaggacccgactggtgggggctcagctggtcctgagtctccgagatgcttgcccctggggagcccagagcctggcggcaccccaacctggcagggccagccagggacccctgggcagggagcacacttactgtcggtggccagcaccccagggccacccagagccctgccggaagggcatcctcctcacacagaaggggagacccaggctctgagaggggcctggggtcccacagagcccggacagttcctggctgtccagcccaaggcagtgctttccgtgtgacactaggcaccaaaggcccctttgccccgagttctctcaagccagctcttcaaccttcaataagttcttcaaccttcaataagcccaacagcccaaccacgtcctgggctctgcaggcctgtgtgctcaggcggcacggcaaccctggcatgcgacggctctcttatgccccattttatagctggggagactgagccccaggcagtcaattcactcttccaaggccacaaagcccaggagtggtagagtgggtagggcttgtcactggacctcgataagggaagtcaggatggtttcctggaggagggagtgtttgcactggtcctgagtgatgcgtaggagttttccagggagtgaagaagtcatttcaggaggtgctgggacacagggtggctgtgtggtccacacagggttcatgctggtggggagagggggaccgtggcttcaggaaggggaataacgtggttggatgccctggcccagccagtgctgcccccagggaatgagacaccttttcatgaggttcaggagagtggatcagctcccttgctcagaaatgcctttgtcctctgtccccaagctgccacttgggggagaggggggtccctgaaccaggcccctgggagggtggctctgaccaacgtctctgcccagggggactcaggggggcccctggcctgcgagaagaacggcgtggcttacctctacggcatcatcagctggggtgacggctgcgggcggctccacaagccgggggtctacacccgcgtggccaactatgtggactggatcaacgaccggatacggcctcccaggcggcttgtggctccctcctgaccctccagcgggacaccctggttcccaccattccctgccttgctgacaataaagatatttccaagaacccggccca

SEQ ID NO: 341 - DNA, 32744 bp, Homo sapiens
  source 1..32744: mol_type = other DNA
ggacaaggttgaacctagacgcatgcgcccaaagcgcggggtgcgaggtgggtggacccatcgcttcccgctctcttctcccaaagcgcttacggcagtctcgcgggatttccccctctcgcgggaattatttgaacgttcgagcggtaaatactccctggggctgtcatagaagactactcggagagcgctgcctctgggttggcgggctggcaggctgtagccgagcgcgggcaggactcgtcccggcagggttccagagccatgggagcggaaaggaggctgctgtcgattaaggaggcctttcggctggcgcagcagccgcaccagaaccaggcgaagctggtggtggcgctgagccgcacctaccgcacggtaagcgctcccggccccggccgccgcctctcgcccgccccggcccaccctccctcaggggccctccgtggccctcgggctcggcgcaccgtgactccagccttgttcaccttcgcgactcacttcatagggatctgaggttcggagaagtcagggacttacccgaggtcgcctgggcccaggccagaaagcctccgaagcctgggcgtcgttcacacgggccccgccttggcttttctgagccgacacccccagcttctgggcggcgtggaccgttattccttagtccgatcgtgaacgtggagagaaacatttacgaccaccgaggcgatcagacatcaaatattgaaccgcagagtggatcctgaatgcgggggttcagtggtcgttgcccctggggtcatcgctccccgccgaacatcaaatgattctacccttgtcctacggttacgttgaatccaatcaccaaataccaaattatttttagggcctggccattcttatttatgtacatactatttgtttgttttgagtggaaccttgagaagaatagaacaattaatttggggaagatgaattatcttgaggtccaagaaaaattgtgagtaaacatcacagggctttgaggatatgagataggatgtgcaagttatctcataaagaaactgctggtgataggaaggcctgaatatgagaaatataaaagccagtattgattttgggttgttgaagaagcgtatttgtaacgtactggtactaaaggcttattgagaatcaaagatattgaaaaaaatatatcaaaggaatcttttcactgtcaaaagtcaagcttgtgtactcccattatagcctggagagaaattcatgcaaattgattgccctttggctggtttggataattaagagtttactaaataaatattttaatttgtctgcattattatggctagtgctttcatcagtcttagggtgatgttgggaataaaggatttttatcggtgcagtttatgaagggtttcttttgtctttcagatggatgataagacagtttttcatgaggagttcattcattaccttaaatatgttatggtggtctataaacgtgaaccagctgtggagagggtaatagaatttgcagcaaagtttgttacctcatttcaccaatcagatatggaagatgatgaggaagaggaagatggtggccttttaaattatttgtttacttttctcttaaaggtactatgaaaatgatagctttggggagggattttagaaaattttgccactttaaaagagtcgtgggagtttgtatgtttttgacaatgaaatatctagtgattgaaaaaacctgaatgagtctacctttcataggaaatattagaattatcattatgattaaaaagtggactttaactccagcattaaatttttaatgacctctttaaaccagttctcctttgtttattttaaatgagttctgtattttagaagcctctacaaagaggactatgtaacttagcaaagacttctttcagactgttcattttgagactgtataaaatatatatatttgctatacatatggaccaaggtagcattataggttctcttcaggaaatgaattgttgttgtaacttcttgcattccgaatgtatagagttcagataatattgattatttgggagtggtatgtgactatgaataaattttgatttgtttctgttttagtctcatgaagcaaacagcaatgcagtgagatttagagtgtgcctgctcataaacaagcttttgggaagtatgccagaaaatgctcagattgatgatgatgtgtttgataaaattaataaagccatgcttattagattgaaagataagattccaaatgtgagaatacaggcagttctggcgctttcacgacttcaggatcccaaggatgatgaatgcccagtggttaatggtgtgtgtagtttcctaaatcttttttcagatttgttgattttgttaaattctcagtatttgaaattttttattatggtctatacatttgaagagtataggtaattaatatatgattccgattaaacaaaaaaaacctaagtagcaaccacccagcttaaaaaaaaaagtcagtacttgcatcctatcccagttgcatccctgtccctcagaagtaactattaaatcctcagtttggggttaattagtctcttgcttaaattaaaaaaaatttttttgcataaatcacatatgtctatcttaatgttttcctgtcattttgtgtaaatcatgctgtatgtatatatttagcagccaattatatttctatataatacctgttactgtgttttgcccattttttcattgggtttttaatttaaaatactattttaaaaaattcatttgcattctttatatattttgaaaagaaatccttgggttatatgaattgtagatctcttcctgttttaggtggctcattggggtatcattgtttcactccctttggggtatcttttttttgaacagaaattcttatgtcaaaaatataaatctctgccattatgattcgtattttttaatctcttttttaaggaactttttcttacctatggggtcataaaggtagttgtatttcatttttccatatatgcctaggtatgttttaggcactcttctgtcctttttgtccctattaccagttttataatcactggtatatttatcactatagtagttggtattttttttggtgttaaaagatacccataataatattgtgtaaaacataggtatttgatagtcaacctgtacttaataattgaggtaggaaagatgtgagaagtacagataaatatatttaaatataagaaatgggtttgtttcaatgaataaaaccaaaaaatatttccttttaggtctcattaaaaaccaaaataatgggcccttataaagccatatcagtttaaaataaactgtctgctatagtaagctttctcttaaatattgaggagtagcacagacataatcttaatgatgaattttctgtgacttttagggctatttgttttcacttttggcctaagagccagtccgttgactaattcccccttgtgtctttagaagggaagttggtggcctgcgcagcagtgactcaggcctgtaatctcagcactttggctccaacctgggcaacatagtgagaccttgtctccaaaaaaaagaaaaagaaggaagttggtgggaaaaaaacttcaactaaaatatgtgagactaaaaaaatgacattactttctattacagatgggttctcactcgggctggattgcagaggtgtggcctcaaactcctgggcttaagtgatccttccacctcagcctcctaagtaactggaagcgccactaccatgcctagctaattttttattttaaaattattttgtagagacaggggtctttctatattgctcaggctggtcttgaactcttggcttcaagctctccacctaccttggcctcccaaagtgctggttataggcagtagccatcatgcccagcctatctttatcacattaaaggcattttaaaatatcaaaatgtgtgttattttatgactgtagttaaataaataatttcatcagtactaaaatgtattgctttatttttagcatatgctactttgattgaaaatgattcaaatccagaagttagacgggcagtgttatcatgtattgcaccatcagcaaagactttgccaaaaattgtagggcgcaccaaggatgtgaaagaggctgtcagaaagctggcttatcaggtaaataagttcaatgtcttgtgttggcatattcttaaaggacaaggagccattttcttaaagtgcctttgaaaaatacttggcatgtaataatttcttcagttgaggttttatggagaacacaggtaatttaggtagaatcttactgtattaagtatgttaccaggtattaatttcttttggagattctgggtaattttctaagatggtgatattcttatgaaatctataaattgtgttgaggttaatgaccatctttataaattatttttaaggttttagctgaaaaggttcatatgagagctatgtccattgctcagagagtaatgctccttcaacaaggtcttaatgacagatcaggtaagataaacaactttatatatacaaaactttagtagattttgaggtcagacttaacaaggtttaagaaacgagtgtcaaatcaggtcaagtaagcctgccagtcccatgaacctggtgaaatttatcttgatgtattatatagaaaacacagggctaaagattttgatatatatatatttttgagacagagtctcactctatcacccagactggagtgctgtggtgcaatcttggctcactgcaacctctgccttctagtttcaagcgattctcctgcctcagcctcctgagcagctgggattacaggtgaacatcaccatgtctggttaatttttatatttttatagagacggggtttcaccatgttggccagactggtctcgaactcctgacctcaagtgatgcacctacttcagcctcccaaagtgttgggattacaggtgtgagccaccgcgtctggccaagatcttggtattttgaaggagcagagcttatttctttcaccctttctgtattttacagatggagaaacaatacttaagtctgtagagctaattcatgtcagaagtaggaaaagatctatttgccctctctctctgacttaaaaaaaaaatgctgttccttatgtgtatactttggtatgaatgtgttctgtgtatcagaaacaacaaataggaatggtcagaccagtataattttcttatttttttttttttctgttagagtagagttccccaacatttttgacaccaaggatcgatttcatggaagacagtttttccacagagggcgggctggatggtttccagatgaaactgttccacctcagatcatcaggcattacttagattctcataaggagcgtgcaacctggatacctcatgtgcgcagttcacaatagagttcctgcgcctgagagaatctaatgcatctgctgatctgacagtaggaagagctcaggtggtaatgctcgttagaccacggcttacctcctcctgtgcggcccggttcctaacaggccacagactggtactagtccgtggcccaggggttggggagcctgagagaatctgcttataggaatgatattttttgaagtttttaactctcatgagaaggccaagatggctctattgcgctgtagtgagaaaaccgacttgcgtttgaaaacattgtcagaggactaattagtaggatgaccttaaaagctaagactaaggtttgttcagtgacgtgtgcttgtatagttcactactgcaaatagcaatcgtgtaatagataaaatcagataacaagtgagataatagctattacatattctgggctaacacctgaagcccattgaacccaggggagaaggaatgtaaagatatttttgtaggctgtggtatttggtgctgaaccttttccatttttatttgtaagtgaccattacagtgacttttgcagtatcatggtacttctttttttttacctttaatatgcttagttggctgggcgctatggctcacacctgtaatctcagcacttttggaggccgaggcaggcggatcacgaggtcaagagattgagaccatcctggccaacatggtgaaacaaaaattagctgggcgtggtggcgcatgcctgtagtcccagctactcgggaggctgaggcaggagaatcgcttgaatctggtaggtggaggttgcagtgaaccaagatcgtgccactgcactccagcctggtgacagagcgagactctgtctcaaaaaatatatatatacatgcttagttgtgcctcttaacctctactatttctattgtaaatactgactttgttaattaaaacagacaaaatacaagagatggaagctagagggagcctttgttcacctatgtttcaaatgactcaatagatgctgtgaaacaagctatgcagaagcatcttcttcaaggctggttacggttctctgaaggaaatatcttagagttgctccatcggttggatgtagaaaattcttctgaagtggcagtctctgttctcaatgccttgttttcaataactcctctcagtgaactggtgggactctgtaaaaacaatgatggcaggtacataaaggattcattctttgaaatgtagtactgattaacttgtgcaattaatttgttttttttcctccccatagcttaagattatattaatacctttaatcttaactctcttttgttttcttttagtctgatgaatatccttttatccttcctttttcccctcctggtgtaagaactcataactttatcatagactatctactttagctatgcttttccccccttcagtttcttactttgatttttgaattagcctaccatgagaaaatccagcaacatgcacccctagtatatgtttgcttatttggttcttttttgttctaagtttcttcattcctttttgtgtggatacattaatgactctaattaaaaggatagtgtagtggttttaaagcaaatcttattattctcatttttgtactcttcaattcttaatgataaaaagatcatgctttctctcacactctttcttttaaatgaaggaaattgattccagtggaaacattaactcctgaaattgctttgtattggtgtgccctttgtgaatatttgaaatcaaaaggagatgaaggtgaagaatttttagagcagattttgccagagcctgtagtatatgcagactatttattgaggtaaattttttttcttttagtttggagagtgattgtgttgctgcatgtgtcaatctcccagtccccttcctcaaagtcatgtttgattgtgaatatgttaaaaatcctttttttgtacatgtagggatagttatatacatcgagtctttttgaatatcttgtgctggtctgtatactgaaagagcaagtcactatgtttaggatcatttcttcaaaactgttaagatatgattatgaccatttctgcataaagttgatgatgatgatatattatttctgaaattggttggcacattttctgttaagtgtcagataataaatatcttagggtcctgtgggccataccgtctgtcacaatgactcaactctgccatggtattgtaaaagcagccaaagacaatgtaagtaactgtttttcaataaaacttttattgacttttatggccactaaatagttgaactttaatattcatgtgttaacaaaataagaaattttaaaaaatgatcagttaaaaatttaaaatagtcttagcttgcaagctatataacaggtaataggctggatttgatgcacggaacattgttttccaattcacagcgtggatctttgtggccagttttatttattaaaaacttactatctagcttcatgttttaaagttttttcaaaatatgcctttttaaaaaacaatttggattaccataattatacctcttaagaaattatttggattactttatttcactttaaaattatacaagaaaaacatgaatgcattcttgtcaaaattcaaatacagaggtataaggaataaaaatgtggaattccctcttttatttcctacttcctcaatcccattgattagcaactaagtgtatattctagcaacccttagaattagcaactaaacaatatagggtgtatattcaaacctctttctctgcatttatatacattttttgagtacaggtttctttaaaaatataacactgtgtatatactttttttttcaactgataactgagatcattatatattggtgcatatataatgtaatagatactgttacagtcttaacagcatatcattccgtagtatggtggtaacatttaatttattcctctgttgatggacatttaggatgtttccatttttcactgataaaagcaaaagtatgttaaatttcctttacatttttgggtacctttgggatttttgggggttaattccaagaaataagttgctacaccaaaggataatatatgtatattttgatagatattggtatgtaggtttttaacttcaactttatggtttatttttttttttttgagacggagtcttgctctgtcgccaggctggagtgcaatagtgcaatctcggctcactgcatcctccgcctcccgggttcaagcgattctcttgcctcagcctcctgagtagctgggactacaggcacgcgcctccatgcccagctaatttttgtatttttagtagagatggggtttcaccatgttggccaggatggtctcaatctcttgacctcgtgatctgcctgccttggcctcccaaagtgctgggattacaggcgtgagccacagcgcccagcctgatgtatttttttaaaaaagcttccatataatatgaattatggacctgaattatctgtatgaagtacagttctctgcttttgtttaaaatgatctcacataaaagttaggcagcaaagctgtgcatgcctctaaatttcccctcaaaaatcctaaatctaggataagtatctcaaatgtgagccagtagggaaactatagctcaagcccatgttaacatcatgaagaacctgtgtgaatctaatgagcattttaatgttaattatttcagactttgacatttaagtagggaattcattataatgctgtttgggccatgttgaaatgtttccaaaaggaatgagtttgtggcaaagtttaataatatatataaatataaaagatgtttatagaaggtagtgaaaatataagaaaatatgaggaaatgttaaatatttaaatggcataaagggggaggagttttcctcaaggacagcatcagaaggtgacttgtaaaaagcttgattcctcccttctgaaaggtcagggattaacatttcctttgtcactctcttagttttgaaataagtaactttaacctcttcgacttattttcttcacctttaaagaggaaaattttcggctgggtgcggtggctcatgcctgtaatcccagcactttaggaggctgaggccggtggatcacgaggtcaggagatcgagaccatcctagccaacatagtgaaaccccgtctctactaaaaatacaaaaaaattagctgggcgtggtggcaggcgcctgtagtcctagctactcgggaggctgaggtaggagaatagcgtgaacctgggaggtggagcttgcaatgagccgagatcgcgccactgcactccagcctgggcaacagagcaagactccgtctcaaaaaaaacaaaaaaaagaaaactttcagaaatttattttagtgattgttgaaagaatacctaaaaaatagaatgagtgtctttttggaggaacatgactagatgggattagtatacttgagtacagaaacaaaattaaattgaaaaattgtttcctgataatctcaggaatatgttttcaggcatactgtatattttaggcagtagattcaatgactaagaactctgatgtgaaacaattttggttaaccaaggtgctcacttaaagagcaaacgaggaaatgaggattatcaaattagagtaagtaaaagggacaacaataaaatttgttgaaagccatcttaaatataaattcttagactttaaaatactttcttgagtggtctcttcattataataaatgtctttataaatggttaggatttcatggtaactaaaattggtgggtcagttttaagttgtatttatgcagttgaggatttttaatctattaattaaacaactgtttgaatttacttaaaaaaaaaaactcagtcaagatgctgtgcattttgctaaagctgggctggagaagtggggagagatacaaagatgagtataaatgaaggttttcttttagcctgtcagaaaagagtaactctactgattggttgattttgatagttatcggtagtgtagttttccttagtttcctactagaacccaaagggtggctgatgtcttaaaagtcctaatcttgtggccagaaatttatgagcttttatttactcttggtcatcactttgtaatacatgagagtatactcattatacattataccacaatttctgtaacttggtttttgtcacccccgccttttttttttttttttttttttaagagacgtagtcttgctttgttgcccaggctggagtgcagtagcgtgatcttggcttactgcagcctctgcctcccaggttcaagcaattctcctgcctcagcctcctgagtagctgggattataggtgcctgccaccacatttggctggtttttatatttttagtagagatggggttttaccatgttggttaggctcttcttgaactcctgatgtcaagtgatcctcccgcctcaaccccccgaagtggttgggattacaggtgtgagccactgtgcccggcgacatttttgacattttttaaatgacatttttgatcaggattgtttttcatgttacttccatcttaaaggcacttcgctgtctaagcttcaattcttagttctgcttttaagtagctttttttattccacacaaaaagcagaggctactgaatatacagccttcttggtgaggattataaagggctttagtttgggtggtgatgtctgtagtaagaataaaaagttaaaataaaaggtagctgatggtggtggtgtatacagagattagtagggtttctaagaaagaataataaaaatttgtgaaattgtttctatttttctgatttttttcaaaaaagataattgtattcatggattacttgtgtaactattgttacaatttttaaaaataaaagaatgataattaggcatgatgaagattaaatctttttttttttttttttttttgagatggagtttttctctgtcacccaggctagagtgcagtggtgcgatctcggctcactgcaacccctgcctcctggattcaagcaattcttctgcctcagcctcctgagtagctgggattacagtagccaccatgcctggctaatttttttgtacttttagtagagacaggttttcaccatcttggccaggctggtctcgaactcctgaccttgtggtgcacctgcctcggcctcccaaagtgttgggattacaggtgtgagccactgtgcccggctgaagattagatctttatgactaattggatttttgggtaagggattcagaacttgatagatgcttcttgacttaaagtggggctatgtcataagtcaaatgagtttaattctcagataaactcatcctaaagttgaaaaattgtaagttgggccacctgtaattggggaccatctgtaattgggagaatgctagtgacattgaaataattagttatcagttagacataaatatgtaccttttgaaaatttcccatagaaaatttgagtcattattgaaaatacattttcaaattcttttgattcatcaataagtttgtttgcaaaagttaatgacagtggcatagaattgagtttgtagaccaaattacatggcatagatatgtatttagacgaatatgacctgaaaatggcccttttctgacctaatggtgggaatcaactcttgtttgatgtttcttaaaagattctactttattaattctgcttgttttagttacatccagagcattccagttgttaatgaagaacacagaggtgatttttcctatattggaaatttgatgacaaaagaattcataggtcaacaattgattctaattattaagtctttggataccagtgaagaaggaggaaggtatgtctaaatgttaacactcattctaatttgcccttctaatttcttatattgaaatatagtccttttacaatataactaaacatatttaccctagctctctaaagtggtataaaaagttttcttttcccttctacatatttccatatatacacatacatttatatttctagttcaatttcctcagaataaatcaatgaaattgcagtttttggttaaaagtttctgtttagatttattaaggctagtagcattttctaaaaggtttaatcatttctggtattttgtcattttatcatgttgatttattaaaaatcatagggtgttttataaaaatttttttttgtgtggaataagaatatttgacctaaagtctgtacatacagatttttgtacctattatagtgataaacctaagtgaaagaactgaggcaaatgtaattaagtttgcagagtaggtgaatgttagagataaaacatgttttgtcataataatatttaaattagttctttttgactgcagaaaaaaactgctggctgttttacaggagattcttattttacccacaatcccaatatccctggtttcttttcttgttgaaagactactccacatcattatagatgataataagagaacacaaattgtaagtaattttcctcattgttgataaagaggttttggtcaatgacattgaatactgtcttattttctgtttagaactttttgttttgtctgttttgttttaggttcgtctctttaatgagttttaaaatttcttaaaaccattatctatctcttacatacacagaatatttgaaaaatgtcaccttcttcctcttagtgtacctgttattgttgaatcagtttgaaatggagcaggtttggtaggaagttacaagtggggatatggttttgtccatgaggcactgggtgctagtgtttttgagagcttactcaaattgtacatactagggtttagaatctcatctgacactttctggctttgtggctttggacaagttattctgctgttttacttgtctgcaaataagaatagcaatgaaatctacctttcatttttcaatgaggtattgttcataaaggtattgttctgtattgcttgataaatacagaaataattgtttactataatactatttcagtgttatttttttctggcatagccaaaaaagacagatctgtatcatttatttcataaaaatcacataatttcagttgcaggttaattcacagatcatctcttccatcctctccttatatatacaccccttctacaacatgcttagttgttattcagcatctgcttaaatactttcatttgggaggcagccttttcctgatcagccaattccaatatacaagtggttctgaaaggaaagtccttccttatgctattattatttatgcattgtctacccaaaggaagaataaaaggatattccatttttctgtgtttaactcctacagagctgaacaagagaagggttgaggattttaggcagagaatttaagtgtctcatcttaagcaccataattcatatttctgtttttcaaacattatatgagggataatttactttcactgtctgtgtgcctatttcccttccattcaaataatttcattttgtagtcagatatattgttttgttttgtttttttctaaaattgtctagcaaacagaatgtgtgctatttctaccagtatgtttttgctccattattcaatatatggtggatactacttggagttttatatagaattttgatactatttgctgatatatcaaacatatattaaagcatgtactctgaacttacaggttacagaaattatctcagagattcgggcgcccattgttactgttggtgttaataacgatccagctgatgtaagaaagaaagaactcaaggtaagtctcttttaaatgaaagaagtgcttgagtgtaatgtagctgggcaagtctattctttcctcttgctgtgcagttctgaaatgtttctcacataatcaaattattgtttaattgttaaactataagaatatttaaaatgttaccacatatgtcagtctcagagatatgcagatctctgtgtcaggaaaactacaagtttgcatatgcctgactcattaaattctgggcagttgagatattaaataatactcctgagttgctacagatattcatattaacagtttttgttcagtgttgaaacaatttatatcttcccttagatggctgaaataaaagttaagcttatcgaagccaaagaagctttggaaaattgcattaccttacaggattttaatcgggcatcagaattaaaagaagaaataaaagcattagaagatgccagaataaaccttttgaaagagacagagcaacttgaaattaaagaagtccacatagagaaggtacaggtaacttttttcatactaaatctcaggtgttattaatcatctcaactaaatcttattttctctaacttctagaattgccaaaatatatttactttgagcactttgtaatagtgacatgaattaaaatgaaaaaagtttttccctgtttctatttttggactttgaaaggccttaattaactttaattattggaggtaggactttatttgcttccttgtcatgctaatctctagaatccgaagtctttcttaccagggaagctagctttccagtggttcacatctgagttttctgttttttgtcttgaatggtttaaaaaaggaaaatacatccattttcctcttatttgtggaggatcaatgacctttcttttttattgctagcaaaataatttctatggtaacgtgcatttttttaaagctaaattacttttgtgtttttagaaaaagctacgcagctttgttatttttaatgaaatactgaaatatgtctagtaacatttaaagcttgcttttcagtagttcgttttttaaaaaattagtttgttaaagtactctcttaaatggagtatgtctttccttctgaaagaaattttttgttaatggtatcgataccattctgtcttacaacaaatgataaatatgtaaacataagataggtatcaattaatatttgatattaactttaatttcttttgggatcttgccttttgtaatgaacatcatttattgttgtacttttgggatgtgctgattattctcataaaaagaatgctaaataggagactcttttatataggagagtttcatgagttatgtttctgatctctttagccatagacatcccaactccaacacccaccttcccagagtgtatgcctgaattttattttgatagctggtggcttcttttatttgacgaagtctgtgggccattataggctattaaatttggaaagcaaatttaaagcaaaaactgaaaatatcatctgaaaaatgacaaactttaggtcaaaattataaaattagcaaaagtagtctatcatggttaatatcgtctgtttaacttgacttgctttgaccatttatgtgtctatttgtcctgttcgagggctacaaatctgttaaaatgcaactacaacagagcataataaatgctatggtcagggaagtatagaggttttatggagaggtttctagtgctggtagagtattgttggcttccccagaggaagacatgttttatcctgagattagaataaaaataacaatataatctaacagtcagaggatactttttctgtggtagtcacagcattaattacttcacaaatgtgaattcattcttttcttcctataggcctatgaggttggtactattattatcttcattttacaaagggcaagtaacttgcccaaaatcacacagatagtaaatggtggaggcaggatttaaacccaagaagtggctctagacttgtgcttttaactcactctgtgctgtctctcctcaatgaattatggaaggaatgttgtagacagatggagcaacatctgtgatggtccagaagttaaagaatgcctattatgttttaaaacttcaggtccatgtgactagagaattgatggggagaagcaggagaaaaatctggggaaaaattaagggctaggtcatgtaaggctttgcgtaagcaatattaaaaattttgtattctaaggattgtggtgaaccactagtattttaagtggttaggtaagtcttatgtctcagatcactgttgtttaggaaatggattggagagtagtaaaagcttagacaggcataatagttgggagacttacagtagggttgggagacttacagatgatggtagtctgaacaagataatgacagtggatttggaaagtagtgatgaacttgagaggtatttagaaattagtaacggagaaaagggagtcaggaatgtatcttaagtcttttggtttagacaactgggtagatggtgatgacagtatgaagatagagaacaaggaagaggagagatttgtgtaatgatgagttcccttttggacatgttgagtttgaggaaactgtggaacatcaagaggaaatgtcttttagcagttatatatatgaatctgaaacttagaaaatagctgggctagctcatagatgataaacgaggttgtcaggtttttttttttttgaggtgataattaggcaagatgaagattagacttttttttttttttttttgagacaacgtctccctctgttgcccaggctggagtgcagtggcatgatctcagctcactgcaacctccacctcccgtgttcaagccattctcgtgcctcggcctcccaagtagctgggaccacaggtgtgcaccaccacactaatttttgtgtttttagtagagatgaagttttgccatgttgaccaggctggtcctaaattcctgaccttaagtgatttacctgccttggccccccaaagtgctaggattacaggcgtgagtcgttgcgcctggctgaagttgccaattttaaaatcctgcctctaccatttactatctgtgtgatagctgtaagatcacctacagagtctatatagagtgacagtatgccctacacaaagccctgagaaagcaaacatttaaaggatggggagaagatattactaatgctgaatattttgtcttcattttagaatgatgctgaaacattgcagaaatgtcttattttatgctatgaactgttgaagcagatgtccatttcaacaggcttaagtgcaaccatgaatggaatcatcgaatctttggtatgttgatggcctcttgggctttattttagtccactcctttcttattttgtaagtgatatgttctttagaaatcaaaataatgaaaagattactgtcttaaatatctgataagtataaatgataaaatatatatatatagcagctacttcatattgtgaggattaaataagatgtctgtaaaggacctgatatgtaaattacagtcttttacatattttaaaaaatgattttatactggaaagagatacagaatatcttcattttttgaatagtaagagaggagatactgaaacataccaagaatatttaagtactggaattgtgctacgtaatgagactgagacaatcacattttatgccctgggaaaggaatttatttattatatttaaagggcttttaaaataaccctttgtaggtaattcccatagggacacaagtactgtaagactctagaacattactttctgataaggaatatagtgcaaaccatatgtaactttacattttttagtagccacattaaaaaaagtggcttttttttaaagccactgttttaaaaaaaaaaaagaggataattttagtatattgaatatatccaactgtattatttggatatgtccaatatatccaaaatattaatcatttcattatttactcactattaaaactgttgcaatgttttacattctgttttgcatactaagtcttatagcgcatcttaaactggactagtcacatttcaggtgttcagtagccacatgaggctaatggctacagtattagtgcgctgttttgttgttgttgttgtttttgatagtactactcattcaaagcaaattctgtatgtagccaggttcttacagaagtctctcaaaactgtatttacttggtattagtgagaaatagccaatgaatgtaatctgaagtctaattccttgggttgtcatgagttcctgaatgtagtaaagaaaaccaattttaatagtttagagcttctggagaaatactgttttgtactcaaccattagaatttagctttatttttggaaaagcagttatctttagtgaaaagtgatgcttaatttgtgcttgggcattttatgtctggtcctacaaaattgaagtagtaaatacgaagactgtatatatgtgggaaaggatatacagtgttatgtgaagaataaacacaaaattgaatgatcataatgattttaaatgtataaaaatctggttaaagattgaaagagattagtagaggaatataaaagatgtttggataaaagttatatttttatgaagttactgtgttttaaataaaagatttaattattcattgggaaaatacaaattattcattgagcaaatatttactgaacatctattacatactaagtgctgggatggtacatggtatacaaaatagatatagattgcccacgttgatctggtcaagtgagaggagcatcgattaagtaaagaaataagtgaaactttgtgctattagtgcttgctatgaagaagagctatatggccgtatgtgaacttataatagcaggatttgaactattcatggaaggtgaccctggtctgatatttgagtagacattacatgtatgaaaaagtgagagaagattgtttaatatggtagctgtcagccacacatggcttttaaaaactagaccaaaatgagatatgctgtaaggattaaaaacatgttgggggttgggcgtggtggctcacacctgtaatcctagtacattgggaggccaaggcgggatggcttgagctcaggagtttgagaccagcctgggcaacatggtgaaaccccatctctgcaaaaaaatagaaaaattagccaagggtggtgactcgggcctgtgctgtcagctacttgggaggctgaggtaggaggatcacttaagcttaggaggctgaggttgcagtgagccgagattgcgccactgcactccagcctgggtgacagcgtgagactctgtctcaaaaaaaaaagaaaagaaaaaagaaaaaaccatgttgggtttcaaagactagtacaaagaacagaaggtaacttatcttgttaatagtatttatattgattaaatactacagatacgatgttttggttatattgagttaaatatattaagactagtttcacttttttttttttttttacttcaatgtggtggctactagaaaatttaacatgacatatgtggtacccatttgtgacttctattatatttctgttggatagcattgaatccaagccagactagttgaacaaactgagcaagaggtagcatggtataagaagattgggaaagaaactacacaatagggaatagtatatatcatgttaaggagttttatcttgttctgtgagcattgggaaaccattgagtcccttttagcaggtggaggggaggtatcatggtcagaccctatttcaggaaggtcactctggctatattgttctgttttagcaatttaatacttaccttttctttaaaagtgaaaaatgacacctttgaggtaatagacaatagggaaatgaagtagatctatgaaatcatatggaaaatttctgattcattttagattcttcctggaataataagtattcatcctgttgtaagaaacctggctgttttatgcttgggatgctgtggactacagaatcaggattttgcaaggaaacacttcgtattactattgcaggtaggatttatcttgtgataaatctcaactgtatttcctgaaatactctgtggcgataatgctaatactctgaatttatctattctgattcttattgatgatgattattatggataatctttggagacacaatacttttatcttttgatttcttattaaaatgtctttgtagaaaaagatgaaacgccaattatgtaagatattcttttaattattcacatagcaaatacttattgagtgcgtattatgtgccagcaactgttctagacttagaagaaataaagtaggtaggtagtgaataaaacaagataaaatgtgttgtcttaatggagcttacattctagaaggggaaacacacagtgaaaaataagtatacaatgtatcagatagagaaaaataaagcagagaaggggattaagcagtgggaaggaggagagggaactgtttggttgagaaagacctcactaataagttgacatttgagcaaataccagaaggaagtacaagagcgaaccacgtggttatttgggtttccaaggagaggcaagaataagggaataggcactggggtgtaggactttgggtgtgttcaaggaataagagaacacatggctaggaaagattgagcaaagggaagaataataggaaaaagggtttgctggcagcaggatgtccatgtcttctaggaccttatagactgtaaagatgtcagttttcactataaatgagatggaaaggaattcgagggctttgagtagaagattgttatgatctgactgggcataaagtggtgtagaccagggagggtttggcaaaccttttgtgtacagggccagagagtaaatatttttagatttttgtgggccatatgatctgtctgaactcctcagctttgcttttgtagtgtgaagacagctgtagataatacataaatgaattagtatggctgtagtccagtaaaactttatggacactgaaatttgaatttcatgtaattttcacatgtaatacatttttttaaaccatttgaaaatgcaaaacttcctaacttgcaggctatgcaaaaacaggtggttgaatggatttgagctgtttgcagatccctagtattaagtaggggtacaagtatggaagcagggatactaataaggagggtatttgataatctaggaaagcgatggcgatggtttggacgagggttgtggttactgaggttgtgagcaggatggtaatctaagtttgaaaataaagtctaagatttgctaatgaatctgacatggtatgtgagagaaaggtggaggataatttaaagatttgcgccagaataactggatggatgaatttgcgttttcctatgatggggaaagcagaggagcaggttttgtagcagataggatgaaataaggagttcaatattgggcatgataagtttacagtttaaggtacaagtggatatattgaataggcatttatatatgagtttggagtataggggagaggtccaagatggtgagatggaagtctttattcttttggtagtatctgatagtatgcaacgcttagagataggatgttgcctgaggaatgagtatagactgaatgagtgtagggtcaactttataggaccctaagcctcagataaaggtaggggagatgaagaggaaccagtaggggctaaggtgaattggacagtaaaagaggaatggtgtgatttcctggaaagcaagtgaagataatattttaaagatgatagaatgacccagctgtcccgtgttgcttcataatggaccattctggatttataatggaccatttctggcaatcaggaactgctcttgaaatttctttaaaagttttgaaaaattgagccatttttctcaattcattatttacaggtgatatttatttgttctaaaagccaagttatagagccaagttattttaccaattacctaaatttaattacattaaagaatatagtaaattggcacacacccgtaatcccagcactttgggaggctgaggcaggttgatcatgagatcaggagtttgagaccaggttgaccaatgtggtgaaacccccatctctactaaaaatacaaaaattagccaggcatggtggtatgtgcctgtaatcccagctactcaggaggctgaggcaggagaaacccccatctactaaaaatacaaaaattaaccaggcgtggtggtatgtgcctgtaatcccagctgctcaggaggctgaggcaggagaatcgcttgaacccgggaggtggaggttgcagtgagctgagattgcgctattatgctccaggctgggcaacagagtgacactccatctcaaaaaaaaaaaatatatatatatatttttgttgttgttgttgttgttgttgttatatatatcttatttttcctactggattttaaatttggatagacatttttattttacttttttaatatcttaattaaatcctaactttcactatcatacttaatttctcactatatatatatattttttgtaatataaatactgagctctgtatttttttcatggctttgaaatttggtgggcatttttaaacttaagatagactcatacaaagtgctgtgtttcgtgatttacgtcttttcataaaggagtctagttgaaaactgagtttactgttaaggaattctaaattcattgagctaatgagagaaaaatgaaacttgataacctagaagaatactgttctaatgaatgcctttcattgcttagaatgtaatgtttttctcttgacagatgggctagaacactttcaacataattgaacagtttttctggatcttaaaaaaataaaatcatagttgaaggcattgttgattcttttttaaataaaaggaacaaataatataattcagcctgactccaactccagaaatttttattgactgtgaagattaactttgtcttaaagtatatagctctattatatgttatggttcaaataaataaaaataacatttttttaaattgaaattttaactgtatttttgaaaagtgatgttttctttagactagacactgtcattaaaatttgactaagaaaaaaacaagatacatattaattttatgtaaacagaaacaaaacagtttactgaatttactttttttggtggggaatatcttgatttaggttttgcaaattgatgatgtcacaataaaaataagtgctttaaaggcaatctttgaccaactgatgacgttcgggattgaaccatttaaaactaaaaaaatcaaaacacttcattgtgaaggtacagaaataaacagtgatgatgagcaagaatcaaaagaagttgaagagactgctacagctaagaatgttctgaaactcctttctgatttcttagatagtgaggtaagaaataatccagtcctgtgattatgaaatgtcattttcagcatgtatttgtttattattattattttttaaatttattatagtttaagtcctgtgatacatgtgcagaacatacaggtttgttacataggtatacatgtgccatggtggtttgctgcacccatcaacccatctacattaggtatttctcctaacgctatccctcccctacccccctatcccctgataggtcccagtgtgtgatgttcctctcccctatgctctttatatcttatttttcctactggattttaaatttggatagacattttttattttactttttaaatatcttaattaaatcctaactttcactatcatacctaatttctcactatcaaattgtatatgcaaagaaatgaagtataaacaaaaatgaagtgattaaagtgggttgttattttttatttctttatgttgtatttgtgatatagagactctaagatttatccccaagacttttaagaaatagtttagaataattttatattgggtgggtagaagatgtaagatagggtatgggattggatctcttttaagtactcttgaactactatttttgtagcacacatgtaaaccaactgattaaaaattttttatactgattgtagtttttcattgagttagaagtgatataacaaaacttaattttatttttttgagatagggtcttgctctgtcatcaggctggagtgcagtggcgtgatcatagtccactgacccctcacctgctgggttcaagcaatcctcctgaatagctggaatgacaggcatgtgccaccatgcccgctgatttttaaattttttgtagagacagggtctcgctctgttgcccaggctggtcttgaactcctggcctcaagtgatcctcctgcctcagcctcccagagtgctgggattacaagtgtgagccctcgtgcctggcccaaactaatactgttaatgtgaacaattcattggcatttagtacattcaaaatgaaaggcaactaccacctttatcatctaatttaaaacattgtcatcatcccaaaaggaaactactcattaagcagttgctcctcattcccccttctgccagccctgacagcaaccaatccgcagtctgtttctatggatttaactgttctggatattttgtgtaagtggaatcatacagtatgtgacctctgtttagctttttaaatttagcataacattttcgagattcatccacatggtatcttgtatcagtactccgttcctttttgtagccgaatactccattttatgtatatatggtgatttgtttatgcattcatccattgaaggacagttgggctgtttctaccttttggctattgtgaatagtgctgcttactatgaacatggcatgtatatgtatttgtttgagtagctgtttcaattcttttgggtatctgtatacctaggaattgtgttgctcagtcatttaactttttgggaacttgacaaactgttttccacagtgattgaaccattttaaatttccatcttcagtgtagaaggttttccatttctccacatccttattgacacttaggttccattttttaaaacattatagctatcctagtatatatgaagtgctacttcattgtggttttgatttgcatttccttaatgactagtgatgttgagtatcttttcatctgcttcttggccatttgtatattttgtttggataaatgtctgttcaagtcctttgcccatttttaagttgggttggttgtctttatagagttctttatatagtttgggtagtagatccttatcaggtataatttgtaacttttattttacaggttgtctttttactttcttgttaatatacttagatgtattaaacatttttaattttggagatacactcatttttttcttttgttgcttctgcttttggtgtcctatctaagaatccagtgctaagtctaagtcatgaagatttatccctgttttcttctgagagttttctggctttagcttttatatttaggctgttgatgcattttcagttaatatttgtatatggtctaaggtccagcttcattgttttgcctgtgtacatccagttgtcttttcctttgtcttctctagacttttgtttactttttctaggaatgccttctgcttcaacaccttctgttcacattctatccattattcagacaaattgcactcctacatatggagcttttgcttatagataggcaccttcctctaataccaggggccagggttttctatgtcttagaaaccctaagcatttaaatatatgttttgctctttttttccaacagttataaaaggccttttggttcttctaaaaagttttaagataattgaatttttcatggctagactaagcatttgtctagtctcctagtcttttagatttgtctaaaattgttattctagctttgaagaaacagtctttttatttgcctttaaagaatttgtaataactcgaatggtttttggatggttcgtgtaaaaatactgtaggacaggctacattgagaggcttaaaaaggagatacaaataaatttcttctaatgaatgtcatctttgttaggtatctgaacttaggactggagctgcagaaggactagccaagctgatgttctctgggcttttggtcagcagcaggattctttctcgtcttattttgttatggtacaatcctgtgactgaagaggatgttcaacttcgacattgcctaggcgtgttcttccccgtgtttgcttatgcaagcaggtattgagtcatactgataaatcaaaaatctgacttgacatcaaattcaagtcccccatgaattatatctataatgatattttgttgttgatactttttctgtctttagtagataaatgatgaaatgacaagaacgatacagattttatctatctgaatttttggctctttcctagatgaaaatgcacttaatgagtgaatttcctacatagtagttttgaatttcatactttttctctcatcaaataatgttctgccaacatactttgaatttgtttctcaataggactaatcaggaatgctttgaagaagcttttcttccaaccctgcaaacactggccaatgcccctgcatcttctcctttagctgaaattgatatcacaaatgttgctgagttacttgtagatttgacaagaccaagtggattaaatcctcaggccaagacttcccaagattatcaggtgagtgactgtggtaactgcatgcagatcactgttttggtaaaataatctctctcaaagatcccttgaaatactgaggaactgcattttggtctttagacttctgtctcaagcatataccacaaagcacgaaagaaacatgaccttgggaaatgtggagaaatcatatgaaaacagaagtaatcaatgctaacatttttgctactgaaaagaaattactaaaaatccaccacccacaccatgcccacctagtactgactgttaatctgaagtaataacctatgttatctaggactcacagagtcttcaaatgttggcttacctgctatgcttctggcacaagaaaggagaattcaaagactagaactcacctcaagcttttttggcttttaattcaaagaagataaatcaattgcacactgactcacagactgaacttaagctgggttgttttaatcctttaatggcatttggtcaaacttgttaccatttttgaaatttaatgtattagtgatttcagatgctaacagattaagttgaaagtattactctattttatttgatatttagtgataagctactctgttcaattcatatgttgtatattattggaaagataagattacaaaggatattaggcaaaattaggtaagggtcagtaatagagctattaagcacttcatgacttgagacaagggcaagagtcatgtggtaggaatgatgagtacagcattagttttaaaactcattgaccaaaattcagttaggccttgttggtatttggggagtggtttgggtagaggaaggatgttttagtaaaggtgatatatgtagatggttatgcaaatattggggaactgtagaaagatgactttggctaaggatcctgaataggactgttagggcacaacactgggggtagattatagattgctttaaaggccaatgtagggaatttggagttggccttatgtgcaatggataattatgcagggcttatgatgaaagggttaatgtcatgaaaaccacttattggaaagattaatttggtggtcagtggtggttatatgagatgaattggtgagcagaaagaaaagaatattaataaagaaagcagctgaaaatctgtataattcgcttgtagaaaaagtactagaaagtaatagtagaaagaatagaaattgacctaataaagaattatgggtacaagaatctaaaagaaagagcttgagaggcaagggagatggaggagtccaggaaaactctaagtatgtgtaacagcagacttcaaaggagctgttgacatagtttaattggggagtactctcatgatcagtgtcttggaagagtaagggaaaagtagattggggcatagccctaagttcaactactgctatgcaaacaaaggccccagccaatcccatagggagttccggaactgggatgttcctttgagttgtccagaatggagacaagctgaaacactgtacttgtgcacgggccagtcattggatttggacaaatctttgggagaagaggtatgatcttggacaaggtccaccaaagtccaccattgtcagcctggatcagtactgcagctgggaacttttaccctccaaaacatgcagcaactgggggatgagtgcatctttcctaaagggagtggaactgggccctatatcacaacatccacaacaagaagtcaagaaggggagcttattttgggggtagggaggatgttaaatttggttttagacattttatatttgggattatggcaagaaaattagttggaaatatttgttagatgtgtaagactatataataatcataatcatcttcaatttacagagaattttctcttaattttttaggccttaacagtacatgacaatttggctatgaaaatttgcaatgagatcttaacaagtccgtgctcgccagaaattcgagtctatacaaaagccttgagttctttagaactcagtagccatcttgcaaaagatcttctggttctattgaatgagattctggaggtaaagtagtttctcattactctaaattagtttgtgtttatatttatacatgtagaatttacatggttgtattagattatacatatgttagcatattgtgacttatttgaagtattttcttcataaatttcatataatttagtgtttttaaacaacttgatatgtattggtactattttcaaagattagggaatgcggtgtttacaaaatgttaataatgttttcttttatagcaagtaaaagataggacatgtctgagagctttggagaaaatcaagattcagttagaaaaaggaaataaagaatttggtgaccaagctgaagcagcacaggatgccaccttgactacaactactttccaaaatgaagatggtaatcacatactgaacagaatatttataaggttctgtttttttttttccatctttactgagacatatttttttctactctaacatgtttggttggacatcagaaatgaatgaaattttttttctaattaatcctcttgggaaagagcattactgataaatgtttattctgcttttcaagtgttttttggcatgcatttctcaacatatgaccatctttttaagagttttgcttctttttccaatattcaaattttcgaaagggtgatttataacttttcactagctgctagaaggactttgtcatttcagttttataaaaactggtcttaaaaagacaatttaaaatatttcatgaggttatcttatttatattgttgtattattccctttaatagaaaagaataaagaagtatatatgactccactcaggggtgtaaaagcaacccaagcatcaaagtctactcagctaaagactaacagaggtagtgtgtggattgaccatctttatgataaaagttttaaattttatcttccaatgaaaaatacttgttttgcaagttttcttatctttgtttccttagggataaagattttttttaaaatgtctttggtatcctttctttttaattctttctgtggatgtcagtttttgccttgtgtctaaagattataaaatcagtgttgctcttggtgctttagattgaaagaagtatgatgcaaaagatattacaaaagacaatttgggttaaattaagatttggttaaatgatggttttatattagttatttgtgttctatccttcctgtaactaagcatttttaaaaaatccctgtagtatttttctgggctttgttttccttctattcccatcttatttcatattttcccaacttatttcccaagggctatccaacaataggggatctgttggcaaagtaaatgctgactattagggggtcacttggaaaaaaatctgaaattcaagatctttttattgttttattatttcctcattacaaaagcaatgcatgcttattacagaagaatcagaaagtacatccagacaaactactataaggaacactaataatcccacccatgagccaaccatgattttgattttagaaatctattttttaaggcccttttcgatgcagatttaattttttctaaaatggagtctggtcataatattgttttgtaaccagtaaattatttaaataccaattgctggatattgttccaaattagtcccatattgttggatgttttcttggggataaatgcattagtaaaagcaggtaaggagtagaaaaaagtgtaacatgaatgaagtagagtatataattttcagactgtcacattgaacagtttggttttgatcagattttttttgtggtatatcacaccatgagaacaccatcctttttaatagaccaaacttcatatattcatattgttttattccttataaatgagaaacatcacaagccaaactttgtcttactccttaaccttgtaaatttctagtaagtagaatcttataatccccagtatataaaggttctagtttttacattgaaatatattttagaacacatttgaattggtcatgtatgttattttacaagaagccattattaccttactatgttttatcaccttccaagaaaaaaaaaagttgtttctttagcacctgtttatgcacctaacctacctttctaacccttaattttcatgagtctccacagactttgtgctatagcaataatagaggtacttcattataacacatttttcatatactgtcctcaaatacattgaactaaaatttgccttcttttaacttgcttgaaatttccttattttcccttactcattattagtgcttacaaaataaattaagttttaatcttgcttgggttcctttttctgtggcagtgataactggtaccaagatggctagaacaagtaggagatacatgtgttgaaaggattgttgtgttgaagacaaaggatttagttagcctagaaactagattaaaaacaaaaagcaactgataataaatcctgataatgaattatactatcttcaaggacagagaaaagtgacagtttcagctaggacgaacaggaggtgtcagactgctgaagccgactctgaaaggtatgtcatgcatgtctagaatatatggaggcctatcttcactttttatttctacaagtagaaaaaaactaattttcttgcgaatgagagagaatatataacaagatagtgaaaactataaatagctgtcttaggtatatagtctaaaattccatcatcaagagcatttgacttcttacggcgtgtttgcttttgcctattagctggcatggtctttagtactatctttaatatgttgtttcaatttttaattacatgatgtgactcctctttgatcttcagttagcaaactcttgattttgataatatttgggttctctacacttacatactgatagaataattctgtctataatttgggtatattgtgtggtagagtgttttatttttggcttctgtcagtcaagccactgttagagctgaaagttggtagctgtcttgtattcatttgcaaaattgtattgtgtgtattttcagtacatagttttacactgttgattaaatttgtcttttttggggggaaacttgttttttactatgtttttggaatttattgcttaaatcaagagagagaacttaatttttttgtcacttcttgagtttcaaagaaatctcttttggacagttatggtcctcgtttaattacaagcttcattacaagtttgtggctttttttcctgtataacaccaggttctgttatagtatataaaatcattagctagattttccctgattcactttgctagatagccaagtcagtgtttttttgacattgagattttagttttaagctaagtcaatggaatcaggctatcaattaaacactgatagaatgtgagtcagaaacaaaaaagttttatttataaataaactggttttaaagcttgtatctaaattcgtgtattttcaacatctatttagtgatcatgaagttccagaaccagaatcagaaatgaagatgagactaccaagacgagccaaaaccgcagcactagaaaaaagtaaacttaaccttgcccaatttctcaatgaagatctaagttaggaaagacgatggaggtggaatcctttaagattatgtccagttatttgctttaataaagaagaagttacccttgtcaaaatcagaacaaacctgatgtctttctgaagattttctgctgtgcgcttccacgtt

SEQ ID NO: 342 - DNA, 32744 bp, Homo sapiens
  source 1..32744: mol_type = other DNA
tttttcctgcttcttgaatggtagagagcagtctatagccagagactcgtccctaggtaagtaactgaattggggtttgtcttggttaaagttaagattaacgaccaactggtcttaatttctccttaccattagagcactcagttatcatataaattgtgccattgtttgttttgcctaactgttttttgttgttgttgtctgttttttattgttgttttggtctttttcccattgggtttgatcaactctatccaacttgatcagggtttgatcaactctatccaacttgatcaaatccaaaggaaagttccaaattatggggaagaaggcctgagaagtggctaaattctaaaaaaaaaaaaaaaaaaaaaaaaaaaaaaaaagatggtgtggtggggaggaaaatggccagcaaaaggaaaaagaggaaggatttttgattttgactactaaaggggctttgtttacataacaccaccctttttgttaggccaaactgaaagcaatggctgtcctcccacactgctaaggtcccacccgatagctaaggttgtgcctttgttttttttcctaccaaaacagccctgggtttggttcctaaatcaagccctttctggtttgatacttggtacttctgaaatagcagcaatttgtcctagctgaaatatagtaaggactaaactgatttttttatcttgcccaaattcctatctaaggtgtctggggagtcatgccctacaaatcataaattctcatcagaagggttttatttaagccaatatatcatgagttattttccaacttgactctgacatagcattatgagacaaggaagaaaagcaaaattattttaccctaaaacatgtttctttgccatatcttgaagtggccctgcaaagctgttctttgtaggggagaatttgcatctttaaagaatctctgttaacatagctagatctttttcttccagatcctcccaatcctaaagcgattaactaagatctgaataggaaacattttcatctattgtctttaagggccgccactattaagacttcaaaagaactttggtctccacaatctttatcttaatccgaacattccctttctatgaatcccgtgtctttaggcaaactcaaccaattgtcaaccagaaaatgtttaaatttgcctacagcctggaagccccccacacccacctggttttaaattgtcccacctttctggaccaaaccaatatatttcttaaatgtatttaattgatgtcttgtgcctctctaaaacgtgtaaaaccaagcctcaccctgaccaccttgggcacacgttctcaggacctcctgagggctgtgtcatgcgccatgatcagtcatatttggctcagaataaagctcttcaaatattttagagttcaactcttttcactgacaatagtaatgagattttaaaagatttttttaaaaaaggaactcaatggttaaaagtcagcttaattaaaagctaacatccaagatgtgtgtgtgtgtgtgtgtatgtgtgcatgtgtgtgcatgtgtgcatgtgtgtatttaaaagaccttcatgttttgttttgttttttttctctcccaggaccttgtcttttttttttttagtaattttttttcttcttagttgactgaattctgtgttcttcattaatatctattgcaactgagagacacgactagctggatttcctaggccgactaaggaatccccaagcctagctgggaaagtgaccgcttccacctttaaacatgggacttgcaacttagctcacacccgaccaatcagatagtaaggagagctcactaaaatgctaattaggcaaaaacaggaggtaaagaaatagccatctgctgcctgagagcacagcaggagggacaatgatcaggatataaacccaggcattcgagccagcaatggcaaccccctttgggtcccctccctttgtacgggagctctgttttcactgtgtttcactctattaaatcttgcaactgcactcttctggtccatgtttgttacagctcgagctgagctttcgcttgccgtccaccactgcccaccactgtcgtttgctgccatcgcagacctgctgctgacttccatccctctggatccggcaaggtgtgtgctgtgctcctgatccagcaaggtgcccattgccagtcccgattgggctaaaggcttgccattgttcctgcacggctaagtgcctgggttcatcctaatcgagctgaacactagtcactgggttctacggttctcttccatgacccacggcttctaatagagctataacactcaccacatggcctaagattccattccttggaatccgtgaggccaagaaccccaggtcagagaacacgaggcttgccaccatcttggaagcgacccaccaccatcttggaagtggctcgccaccatcttgggagctctgtgagcaaggacccctggtaacacaaccgaggcttctctggggtttttaaggaagagtatagtttaggcacttagaaatgtctttgtttttaaagtgcactgtaaaagcatcatgtggtctaaccttaaaataattctctttttgaagacccaggattcagtgtgggctctgcccagagcttagagatccagttaaaaaataaatagtccctatctaaataaaattggtctccttatacaatcctatgatagatttctataattttatgtttgatttggcatccatcatcaatctccctctagcagtaccagactttttctttatataccttatgatgtaaattttgctatttgattttcacctgtgttgtttcatttaatatctaaatttatggctatttagctgacaactgcctagtgttgtgaaacaggttatcaaatatctgaaagtctaagatagaaaaaaaaaggtctttatgaatctataagatgtacttctatcggcatgcctaatatgtctatgtatttgtgtgttgagtacataatgtttcactactgaaaatatataaaagagctctaattaattggcttaaagaaaaatagaagcacttaaatcaaataccttcttaaaaaaaagggaagactagtcgaatgctttttctttttctttttttgagatggagcttcgctcctgtcgcccaggctggagtgcaatggcatgatcttggctgaatacaacctctgtctcttgggtttaagcaattctcctgcctcagcctcccatgtagttggcattacaggcaagcaccaccacacatggctaatttttgtatttttagtagagatggggttttgccatgttggtcagggtggtcttgaattcctgacctcaggtgatctgcccaccttggcctcccaaagtgctgagactatagcatgagccactgtgcgtggctgtccaatgctttttcaagtttacatgatttaagtaaagtcctttttttttttttttttgagacagactctggctctgttgcccaggctggagtgcagtggcatgatatcagctcactgcaacctctgcttcccgggttcaagtgattctcctgcctcagcttcggagtagctgggattacaggtgcacagcaccaccctcggctaatttttcgtatttctggtagagatggggtttcaccatgttagccaggctggtctcgatctcctgacctcatgatccacccacctaggcctcccaaagtgctgggattacaggtgtgagccactgtgcccagctgtaaaatctttactaaataagctagctttaaaattactgataaagtaatattagaaatgtcttaagcattgccagcatacatttttgtttgcatttattaatcaagcaatttcatacttatccctgccaaatactataaggtgtcaaaatttggcataggggttacaaacctataaacccagcccaagattgctttcataatctttaataaataagacattgctattggtttaatgaaaacagctatattttgaattatttagtaaaattaccataacttctgatattgtggcattaggcagtgtaatccacaggcagcaaggaagtttgtttgggggaaaggactattactgtctttgtttcaaagctaaaatataaattaaattccttctaaagtttgggaataagcaaggacagcttggaggttagaagcaagatggagtcagttaggtcctgtctttttcactgtctcagaattttgcaaaggtgagtttcataactttaattgatgactatcacagttttcataaataatgtaggtaaatgaataaaataaaatagacagatgtaatgggataaatacttgtaggcaaacttgtcataatttagaatctaaagttatactaaaatatttcattatttaggtattttccaataaaaatatattgtaggaaaacattctttctagaaaaaagtgtccttttaaaaaaggtggacaatttttttctaattcaaagcttaaaggttgtgtacaaaacaaggtaagaggagccaggaaataagagagatgtaaagaaacttatagaaataaagaggtatattttggtaagaaagcttaaagagaaataattttatatgagaaagaatattacatggtaaatttagacctagaataaaatgactggttgtttaagaaagggatgttcaggacaaaccagaaagtccaagcatgtcatgaatggtctgggtaagtcacaatgaaagaatttatttaaaaaaaaccccaaaacttatatgatcaagttgtctgtagttaaagggaaattacaatggtctttccagagacttggtttgatgtaaaaaaacccaaaaacatttatatagtaaagaattgattagaacaataaaagttccttagggtattgatttactcttaataaattataagagattttatttatatcttaacccaaagttaaacttctattgcatcttgctgtttttggttttctctccccttttaaaaggagtgaaataataatggtttccttcaactcatataagtttttgtttcctcaacttctgtttgttgtggcctgatgctaacaatattcttaaagatctgaaggaaatgttttcttccaacataatgttctgtacactgcagaagggtttttcttttgccttttggtaactggcctaacagattttaggttttataaaaataattcctatgccattattattaagttttgatttgcttaggaaaaaaactgagattaaatttttttttttaagttaaggttattacatccatgtatctttctgtatgtgattttaaagtacttgtgacattaagttacagggctttgactcctgggtctaaaaaggacaccaagtcctgctaagtcttaaaacaccgacagcaattaaaacctcatcttcaggccctcttgattggcatcagaatatgccaatcaaaataaactgcattcctgagacacaaggtcagaagttaaagccattcaacgcctcaaattccagggactattgtggaagcggtgggcatgtgggattgtaagggctgattttaagagataaaataagttcaatttctctataaattaaccagtaatgtcaaagacactcttattcaagaccagcatatggaccgctgtgtcagattaacaagattttcttgaagcattaaccaactccttaataaaggttataaaggttataaaaggcttatggaagttaaattttatgaccaatattaagattttatagattatttataaaattttgaaaaacaaatttatttggcttcatgctgtttttattagagctaattgtttagaaagttaagtgtcctctcttaaagaattaaggttttcactttttttttttcaaacccttgagttatcactctggttaaatgaatgacttattttacaataacctgtaatcctattttgtgatatcaagtgtaaacctttgatatttgacaaactttccaaaatcaaaattataaattatgtcttttttttggctgggcacatacctgtaattcaagcattttgggaggccaaggagggaggatcgtttgaggtcaagagtttgagaccagcctggccaacatggtgaaactctgtctctaccaaaaaatacaaaaattagctgggcatggtggcacacacctgtaatcacaactactggggaggctgaggcaggagaatcacttgaacccaggagatggaggttgcagtgagctgagatcatgccactgcactccagcctgggtgacagagcgagactctgtctcaaaaaaaaattatgtctttttttgaactaattaatcctttaagatattattaataggttccctaatgtcaaaaaatgacatatttggttatttggtataaaaattatacaggaaacaccatcaaataagaaatggtgtttggttttctttgggctgtatttgtataaaaatgttattggtatgtattctaaaattatgggaaacttctataattctgatacgacttagtgtacattatcagtaataattataattgttatgttaaattattgtgtgcaacagaggtaacaaatttcctcatcaattgtgtctttgactatggctgccctaaaactttttgtcatccacagacaattattgtctttttttggttctctttagaaggtagttttataaaactctaacaggtgctcttgaacacaggtttctgataacattggagattgtgacatcagaatagatgaaaaactttcaggactcatggagagataaaatattcatgaatatcaagcagaataggaattaacttcatggattaaactaatagaagtctgaagtaatctgtttaactttttgcctaaaatggtgctgattcttttgtttttcaaagtcaagaaaatgtttaagctatttacagattctaacaattgagtaagtatactcctatgaataaaatttggagcatatttctttctctgtacctgatttctacagaatttggaaactatttgtgagtattcttaacttacgacaatacagttatttgcataaatgcaataagaatctgttttcatttgtaacaggacacaattggagaaactagttactttaccgaggctctttactgggatggtgtgctttgctttaaggaatcaaacttggcttatggaatcaatacaagccccttgggaaaactggcctcatacttttgtctatacagtccctgtacagggttcctgacctgtggtaagtaaagaatgtcactttctgacaggtccaggagccccaggtttatcttggaacctcaacaggaaaggaatttacccaactcataggtatttgatggtacaaatccatggctgggtttgactttaaaaaagtcttatgtgagatttcttctatggaataaagtaccatcaaagccaatttaaaagcctatgtaaaaaaattatttttgttgcactgtaaacaaataatcaggccaagtataataaagcaagtcagggccgggcgtggtggctcacacctgtaatcccagcactttggaagtccaaggtggatggatcatgagttcaggagttcgagaccagcctggccaagatggagaaaccccatctctactaaaaatacaaaaattagccaggcgtggtggcacatgcctgtaatcccagctactcaggaggccgaggcaggataattgcttgaacctcggaggcggaggttgcagtgagctgagatcacacctctgcactccatcctggcaacaagagcaagactccatctcaaataaataaataaataaataaataaataataaaaaagcaaatcagtccaaccacgatttgtctttagtaaaaatgggaaactggagaggaaaaattatgtttcaaaaactatagtacacctgttcttagattccagtcttgcctaatgtttttcaacttttattattttctacagtttggactgagttctaatttttcttggctacaagccttcaaaatattgctttcagtttcttttccttctttacccccacccccactcccccatttatcctaatttggagtcactgaaaactaagctgtgcattcataaagccctgtgaacagaagctagacaacttaaacttcagaagaaaataacaacaacctatttacatacataagccacttactgcctgtctattgatatgtggacttcagagtagtgtggcctatatgcattttccaggattgttcctttgtttgttcttgtttttctcccttcctcctcctattttctctttataggacatgagactttacagcctgctaaaagtgagccttcctaaataacttgggacctacccatctaggaataaaccatcctagccatgagagatcggacaaaacctcagactagagacgcattttcttctaaaatgctttctccaaaggattttttaaaagaaaagtgtagggtccagccccacagggtcggtgggttttctcctcgtgtgcagagatgagagagtgtagaaataaaggcacaagacaaagagattaaaaaaagacagctgggcctgggggaccactaccacaaagacgcggagaccggtagtggccctgaatgccaggctgcgctgatatttattggatacaagacaaaggggcagggtaaggagtgtgagccatctccaatgataggtaaggccacatgggtcacgtgtccactggacagggggccctttcctgcctggcagctgaggcagagagagagaggagaaagagagaaacagcttacattattatttctgcttctcagagacttagtactttcactaatttgctactgctaactaaacggcagagccaggtgtacaagatggaacatgaaggcggactagaagcatgaccactgaagcacagcatcacagagagatggttaggcctctggataactgcgggcgggcctgactaatgtcaggccttccacaagaggtggaggatagagtcttttctaaactcccctggggaaagggagactccctttcctggtctgctaagtagcaggtgtttttccttgacactaatgctaccactagaccacggtccacttggcaaagggcatcttcccagatgctggcattactgctagaccaaggagccctctggtggccctgtctgggcataacagaaggttcacactcttgtcttctggtcacttctcccaatgtctcctcagctcctatctctgtatggcctggtttttcctaggttatgattatagagcgagggttgttataatattggaataaagagtaattgctacaaactaatgattaataatattcatatataatcatatctaagatctatatctggtataactattcttattttatattttattatactggaacagctcgtgtccttggtctcttgcctcggcacctgggtgacttgctgcccacagaaaaggggggaaaatgtgaaaggaaaatatatcttggggctcctaagtcactaagctaaagaaaaaagttaagttggtaactgcttagggccaaactgcctcccattctattcaaagtcagccctctgctcactgggataaatgcatatctgattgcctcctttggagaggttaatcagaaactcaaaataatgcaactatttgtctcttatctacctatgacctgaaagccccctccctgcttccaatcttcctgcttttgctttgagttatcctgcctttccagacagaaccagtgttcaccttacatatgttgattgatgtctcatgtgtccctagaatgtataaaacccagtgatgctctgaccaccttgggcacatgtcatcaggacctcctgaggctgtgtcatggggttgtgttctcaaccttggcaaaataaattttgtaaattaactgagacatgtctcagattttcagggttcacaggaccaagctaactttgaaagatatttaggctatggtttaaatgataataagtcttatcctaaaactcattcacttttataaagctaatgggaggccatcaggctgtggggaggaggggagcctgagtcctgctaaggtgcagacataaaccattgccagccattattccggaggttataagatatgagcttccccaattactcctgcaaataacatcaatattgtagaacctaacactggccttttgagatatcttttcagggttttttgtttttgttttttttttttttttgcatgtctgacacccacggctccacctggaccagccaacccagctcctatggtcccacccagaagcaattcagcccacagaagggcagctttgacgcctatttcatctccaccccagtcaatcaacagcaagcacctattacctggccaccccctcccttcccccaaactgcctttgaaaaacccctgacctaagacctttggaggagatcatttgagtacaaactccatttcccatgtggcatgactagtcttgtatctattaaactttctctactacagtgttgtggtctgtctttacagagtggggcttgaggctttttgcaaaaatgttgctgtccagcctagtactgtacctagcttatacttggtaatctttttctcaatcagtctagttaggaggttttcaattttatgaatctttataagaactagctcttacctttattgattttccttacctatttttaaattttaattgatatctactcttatttttattacctccttccttctacttggagtttaatttgctatcctttttccagtttctaaggtgaaagtttagactttgattttaaacctttattctctttcactacaaatgtttaaagctaacatttgcctccaaatactgctttagctccatcccacaaattttgatatattgtgtttattaataatgtttattatcatttagttcaaaatattttaaagttttctttgcaatttcttctttgacccatgggttatgaaggaatgtgttccttgatttccagataactgcagcttttccagatatccttctgttattggttatcagtttaatcctcttttggacacagagcatattctgaacaataatagttctttgaaatgtgttgagatttggtttatggcccagcatatgatctgtcttggtggatgttccaagttaaatagaaaagaatgtgtattctgcagttgctgggtgtagtgttttagaaatgtcaattgggttaagttgcttgctctaaatgtagtttattgccaatttttaaatttgtttaacttggtcattagatacaaacacaagtaggattattatgtctccttaattaatagacaattttatcattattaaatgtccctgtttattctggtaatactttctgatttggaatttactttgtctgatattaatatagctaaatcagctgtgttattagcatttttttaaacagagtcttgctctgtcacccaggctggagtgcagtggtgcaattttggctcactgcaacctccacctcccagattcaagtgattctcttacctcagcctcccaagtagctgggattacaggtgcatgccaccacacctggctaatttttgtatgtttagtagagatggggtttcaacatgttggtgaacaggctggtctcgaactcctgacctcaagagatccacctgctttggcctttcaaagtgctgggattacaggcctgagccaccgtgcccagcctattaacatttattattatgacatgccttttttttccctttacatctaacctatctgtgtctttttatttaaagcttatttctcataaatgacatttagttgcattttacttttgtaaccaatctgaaaatctttgcttttaattagccttttagtctgagtacatattttataaaaattgatgtggttagattcaaggctaaagattggtacctttgatatttcctataatgtagatttgctggcaataagttctcccagtttttgtttgtttgaaaaagatgtattttgcctttattttcaaaagctattttccctaggtacaaaagtataaattaacagtatttctttactttcagcacattaaaaatactactttgttatattctaagcttacattgtttctcatttacaagtctgtgattatccttcccacccccccgcttcccccactgtatgtaatgtgcctactttctccctctggctgtttaatttttttaaaaaatcacttattgttgctgggcacggtggctcacacctgtgttcacagcactttgggaggctgaggtgggcagatcacctgaggtcgggagttcaagaccagcctaaccaatctggagaagccccgtatctactaaaaatacaaaattagctggggtggtggcacatgcctgtaatcccacctacttgggaggctgaggcatgagaatcgcttgaaactgggaggcggaggttgcggtgagccgagatcatgccattgcactccagcctgggcaacaagagcgaaactctgtctcaaaaaaaaaaaacacttattgttagtaattgggcttttatttgctttgaagtgattttatttgtttttattctgcttggggttcattgaaattcttgaatatgtaattttatacttttcatcaaatttggaaaattattggacattatttcttcaaatatttgtttttacctccttgcttctagggtaccaattacacatgttgatccaattaatatggttccatgagttactaagattccaatgttttatctctttttgctttattttggcagcttcaattgctatgtcttcacattcactgattttatcatctacattttctattctactgaacagacatctaataaatttttaatttcagatattttaatttctagaagttctgttattttttcctgtgttttaaatttgtttgttgattatataaatgatttattttgaattcttgagcatatttataatacatattttaatgtccttgtttgctaatccattattattattattagttttgaaatgaaatctctctctgtcaccaggctggagagtgcaggagcatgatcttggctcactacaacctctgcctcctgggttcaagtgattctcctacctcagcctcctgggtagccgggactacaggcgagtgccaccacacctggctaatttttgaagttttagtagagacgggatttcaccattttggccaggctggtttcaaactcctgacctcaggtgatccacctgcctcggcctcccaaagtgctgtgattacaggtgtgagctactgttcccagacatatgccatgatttctgtcacttctgggtatgcagctattgactgatttttttcctgattatgggtcacattttcctgcttctttatgtgtctagtaatttctgattgaatgccagacattattagtccatattgtgaagtgtttggattttattgcctccttaaaagaggggaaggaatttgaattatttgcaaattagtttgatcctttatgagcttcttttaagacttatatggcagattgaaagtatcatagctctcttttatctgcagggaatatgttccaagacccccagggggtgcctgaaaccatggacagtaccaaattttatatacactatgtatttttgcctatgataaaattcaatttataaattaggcatggaaagagattaacacctgataataaaattgaacaattataacaatatactttaagaaaagttatgtgaatgtggtctctctctctttctctcaaaacatcttatactatattcaccttttttgtgatgatatgagatgatacaatgcctatgtgatgagacgaaggaggtgaatgacttggcattgtgaaatagcatcaggctactattgaccttctgataatatgtcaaacttatgaattgtttatttttggaattttgcattaaatattttaagaccatgctcaaccacaagtaaataaagttgttgaaagtaaaaccacaaataagggggtactgtatcctttaacctagagttaggttagccctgctattgaagtgtggcttttcatgtaagcatttaaattttttatttatttatttatttttgagatggagtctcgctctgttgcccaactggagtgcagcagtgtgatctctgctcactgcaacttccacctctgaggttcaagcgattctcttgcctcagcctcctgagtagctgggactgcaggcatgtgccaccttgcccagctaattttttttgtatttttagtagagacgggttttcaccatgttggtcaggctggtctcgaactcttgacctcaaatgatctgcccatctcagcctaccaaagtgctgggattaaaggcatgagccactgtgccaagtccatgtaagcattattaatgcctgaggtcttcactgaatctctccagtctacaggtagtaacttgaatatctccaaggtctgtgtgagttttgggattatttaactgttaataccttggaagttattctttgtccagtctgtggaattttcatttatgcatgtccagattagcattccacaaagactggaaaagacctctctgcagatttctggttctttctctacattgcttcctcttctctagtactttgctctgaaaattctggctacttcaatctccaaggtcatatttctgactccttagctaaacaagactgctgggctgtgcttggtttatttttctcatgtcacagattaaaaatggtctttggacagggttcaactcatttttcccccatttctctaatgccatacttctgttgttgttttgtgcattttgtccagtttgaagtcaagctactttttcatgagcaaaaacttagactacagtatacagatgttcctttacttatgatggttcatcttatgatttttctactttatggtgggtgtattggggtattaaatgccttttcaacttatgattatttcaatttatgataggtttattgggacataatcacattttaagtcaagaagcatctattgttgatttgtgggagcccactgcaatgtttgaatataatatttaaaattcatgatttatttgtgaagctgtctcattttataaattgtgttgagacaatgcaaagtttgtacaagtaggaatttataaaaattactacaatctgtaatgactcaaagcgttgtgaaacagcactaccaccaaataatgtaaaatcttgattatcacaatatatttagtatttttctgagaaggcagaaaagtaaattatatataatacataataacttacatttatgtatatctctattttattactaatatgagtacccctgacccatcaacagacctaaccagacatgtacaataataattaaatccagttgtctttgacattttgctaggttttaatcatattaaaatcattgctttatagatttttaatattttggttatgaaggtttgtttttcaaggtgaggacaaaaactcattttaacagctcattagtttgattttaaatatttagtaatgtagtacatagatatccatttgttttcttgccccagttctgttaatgttaggggtaggcctgtggaagaagtggcagcagcaacaaaagttaggaggcttatatcacatagataatttgtcatgtctgagaaagctaaattgaaagccagttttggggaagggtaataagcaacaatatttccactatggactctgcaaaagtcttcaggtatatttaaggcacaacattatataggttagcgtgatttcatatttacctaagtttttgttttttttcagacagaatctcactctgttgcccaggctggagtcaagtggcacaatcttggctcactgcaacctccacctcctgggttcaagtgattctcctgcctcagcctcctgagtagctgggggactacagatgtgtgccaagcccagctaattttttaaattttcgtagggatgcaggtttcaccatgttggccaggctgatctcaaactcctgacctcaggtgatccactcacctcggcctcccaaagtgctaggattacaggcatgagtcactgtgcccagcccctaaaagacttaaaatcttaaaattttcaggtacaaccatactctcttccccaataattttttttccttactctggatttctttgagccctttgtatttgattatgttatttaaccagaaacttaatacaattacaatgaattatttaataataagctccaggaactatctcacaggaaaataataataatcttaatatttactgtaattaaggactcaatttgtgccaggcctggtgtgaagagttttatgtcaatcatttctatttaccataccttgattagaagaatctattcccattatgctaataaaaaatggcaacaacaaggttcagggcagttaaataattttcccaaggctacagtgctgtcagaaattagcaaaccaggatgcaaatctaaattagcaaaccaggatgcaaaatctaaaccaggatgcaaatctcaagtccactaaatttccaatattccaaggagctatcaacatcagttgcaagtctctgaggccaccccaatcatgctgagggctggaggacttactccctaagaggagggatcatggtggatgggaggcaggactagattgcagctctgactcagatagacagagcagtgtgtggaggctcgtgtcatgaatttttgcaccagaatgactgtaggaataaatcaggaaacctgggagtacccagagacctctctgaaggaagtggattgctccttcaggacccaggaaacactccaaatactgtactggtatccccagatgagagacccacagatggtttatgtaacaggactctgtgcagacaacccctagtaccagcccagagcctggtagacttgctgggtggctagatccagaagagagataataatcactacagcttggctctcaggaagctacatccataggaaaagggtgagagtactacatcaagggaacaccctgtggggcaaaagaatctgaacaacagccttcagccctagacctttcctttgatagagccaacccaaatgagaaggaaccagaaaaccaactctggtaatataaaaaaacaatgttctttaacaccccccaaaaatcacactagctcaccagcaatggatccaagctgagaagaacccctgatttacctgaaaatgaattcagggggttagttattaagctaatcagggagacaccacagaaagatgaagcccaatttaaggaaataaaaaaaaatgatacaagaagtgaagggagaaataatgaaatagatagcaagaataaaaagcaatcaaaacttcaggaaacaatggacacacttagagcaatgcaaaatgctctggaaaatctcagcaacataattaaacaagtagaagaaagaaatttagagcttgaagacagggtctttgcattaatccaatccaacaaagacaaaaaagaataagaaaatatgaacaaagcctccaacaagtctggcattatgttaaccaaccaaatctaagaattctaaaagtttggaaaacatatttgggagaagaatctaggaaaatttccatggccttgctagagacctagacatccaaatacaagaagcacaaagaacacctaggaaattcatcacaaaaagatcatcacctaggcacattgtcatcaggttatctaaaattaagacaaaggaaagaatcttaagagctgtgagacaaaagcaccaggtagcctataaaggaaagcctatcagattaatagcagatttctcagcagaaactgtacaagctagaagggattctatctatcttcagcctcctcaaacaaaacaattatcagccaacaattgtgtatccagtgaagccaagcttcatatatgaaggaaagatacagtctttttcagataaacaaaagctgaaagaattcaccactaccaagtcaccactacaagaactgctaaaaagagctctaaatattgaaacaaatcctgggaacacatcaaacagaacctctttaaagcatatatctcacagaacctataaaacaaaaatacaatttaaaaaacaaaaaaccaaagtatatgggcaacaagtagtacaatgaatggaatggcacctcacatctcaatactaacattgaatgtaaatggccaaaatgctccacttaaaagataaagaattacagaatggataagaattcaccaaccaactgtctgttgccttcaggagactcacctaacacataaggactcacataaacttaagataaaggggtggaaaaagacgtttcatgcaaaatgacaccaaaagcaggcaggattcttacatcagataaaacaaactttaaagcaacagcagttaaaaagacaaagaggaacattatataatgataaaaggccttgtccaacaggaaactatcacaatcctaaacatatatgcgcctaacactggagctcccaaatttataaagcaattactaatagacttaagaaatgagatagacagcaacaccatagtagtgggagacttcagtactccactgacagcactagacaggtcatcaagacagaaagtcaacaaagaaacaatggatttaaactataccctggcacaaatggacttaacagatatatacagaacattccttccaacaactgcagaatatacattctatttgacagtgcatggaactttctccaagatagacaatatgataggccacaaaatgagcctcaataaatttaagaaaattgaaattatatcaggcactctcagaccacagtgaaacaaaaccggaaatcaactccaaaagaaaccttcaaaaccatgcaaatcatggaaattaaataacctgctcctgaatgatcactgggtcaaaagtgaaatcaagatggaaatttgaaaattctttgaactgaacgacaatagtgacacaatctatcaaaacatctgggatacagcaaaggtggtgctaacaggaaattcaaagccccaaacacatcagaaagtctgaaagagcacaaacagacaatctaaggtcacacctcaaggaactagagaaacaagaaaaaaaccaaacccaaaaccagcagaagtaaggaaataagcaagatcagagcataaataaatgaaattgaacccccaatacaaaagataaatgaaacaaaaaactgattctttgaaaaaataaataaaattgatagaccatgagcaagattaaccaagaaaagaagagagaaaatccaaaaaagctcaataagaaatgaaatgagagatattacaactgacatcacagaaatacaaaagattattcgaggctactatgaacgcctttacacacataaaccaggatacctagaagagatggataaattcctggaaagacagaaccctgctagcttaaatcaggaagaattagataacctgaacagaccaataacaagcagtgagattgaaatggtaacttaaaaattaccaacaacaaaaaagtccagaaccagacagattcacagaagattcctaccaaacattcaaagaattggtaccaattctactgacactattccacaagatagagaatgagggaaccctccctaaatcattctatgtagccagcatcaacctaataccaaaaccaggaaaggatataaccaaaaaagaaaactacagaccaatatccctgatgaacgtagatgctaaaattaacaaaatactagctaaccgaatccaacaacatatgaaaaagataatccaccctgatcaagttggtttcataccagggatgtagggatggtttaacatatgcaagtcaataaatgtgatacaccacataaagagaattaagaacaaaaatcacatgatcatcttaatagatgcagaaaaagcattcaacaaaatccaacatccttttatgattaaaactctcagcaaaatcagcatacaagggaaatacctcaatgtaataaaagccatctatgacaaacccacagccaacataatactgaatggggaaaagttgaaagtattccctctgagaactggaacaagacaaggatgcccactctcaccactcctcttcaacatagcactggaactcctagccagagcaatcagactaaataaataaataaataaataaataaataaataataaatggcatccaaatcagtaaagatgaagtcaaactgtcactgtttgctgatggtatgattgtttacctagaaaatcctaaagactcctccagaaaactcatagaactgataaaagaattcagcaaaattgccggatacaaaattaatgtacacaaatcagtagctctgctatgcaccaacagcaaccaagctgagaatcaaatcaagaactcaaacttttttttacaatagctgcaaaaaaaccaaaatacttaggaatatacctaaccaaagagttgaaagaactctacaaggaaaactacaaaacactgttgaaagaaatcatagatgacacaaacaaatggaaacacatcccatgctcatggatgggtagaatcaatattgtgaaaatgaccacactatcaaaagcaagctacaaatttaatgcaattcccatcaaaataccaccatcattcttcatagaactataaaaaaattctaaaattcatatggaaccaaaaaagagcccttatagccaaagcaagactaagcaaaaagagcaagtctagaggcatcacattacctgatttcaaactatactataaggccatagtcaccaaaacagcatgatactggcataaaaataggcacatagaccaatggaacagaatagaaaacccagaaataagcctaaatacttgcagccaactgatcttcaacaaagcaaacaaaaacataaagtggggaaagggcatccttttcaacaaatggtgcttggataattggctagccacatgtaggagaataaaagttcatcctcatctcccaccttatataaaaatcaactcaagatggattaaagacttaaacctaagacctgaaactatacaaattctagaagataacattgaaaaaatccttctagacattggcttaggcagagttttcatgaccaagaacttaaaagcaaatgcaataaaaacaaagataaatagttgggacttaattaaactaaagtgcttttacctggcaaaaggaacagtcagcagagtaaacagacaacccacagagtgggaggaaatcttcacaatctatacatctgacaaaggactaatatccagaatctacaatgaagtcaaacaaatcagcaagaaaaaaacaaacaattccatcaaaaagtgggctaagaacatgaatagacaattctcaaaagaagatatacaaatggcaaacaaacatatgaaaaaatgctcaacatcacgaatgatcagggaaatgcaaatcaaaaccacaatgcgaaatgcaataccatcttactcctgcaagaatggccataatcaaaatatcagaaaatagtagatgtttgcatggatgcggtgaagagggaacatttctacactgctggtgggaatgtaaattagtgcaatcactatggaagacagtgtggagattccttaaagaaataaaagtagaactgccatttgatccagcaatcccagtactcggtatctacccaggggaaaagaagttgttatacaaaaaggatacttgcacactcatgcttatagcagcacaatttgcaattgcaaaaaacatagaatcagtccaaatgcccatgaatcaatgagtggataaagagatcatggtgtatatacatgtatatatatataatggaatactactcaaccataaaaaggaatgaattaatgacattcatggctacctagatgagattagtgactattattctaagtgaagtaactcaggaatgggaaaccaaatattgtatattctcgctcgtaagtgggagctaagctatgaggatgcaaaagcataagaatgttttgggggaaccagcccccatatttcaacgtaggttctttctattttccctaagtgttggctggtctgagaaataaagaaaaagagtacaaagagagaaattttacagctgggcctccgggagtgccatcacatattagtaggaccatgatggtgacgccgagccgcaaaatcagcaagtttttattagggattttagaaagggagggggtgtacaaacagggagtaggtcacaaggattacatgcttcaacgggcaataaagatcacaaggcaaggcaaaattagaaatactgatggaggtctatgtcccactgtgcatgcattgtcttgataaacatcttaacaggaaacagggttcgaaagcagagaactggtctgactagaatttaccaggctggaattttccaatcccagtaagcctgagggtactgcaagagaccagggcgtatttcagcccttatctcaaccgcataagacagacactcccagagtggccatctatagacctccccccaagaatgcattccttccccaggtttattccttgctgagaaaagaattcagtgatatttctcctactcgctttctgcagaaagaaaaatatggctgtattctgcctgaccccacaggcagtcagacctttatcctccctcgttccctgaaaatcactgttattctgttctttttcagggtgcactgatttcatattgttcaaacacccatgttttacaatcagtttcatattgttcaaacacatatgttttacacacaatttgtaccgttaatgcaatcatcacagggtcctgaggcaacacacatcctcagcttatgaagatgatgggattaagagattaaagtaagacaggcataagaaattataaaagtattaattctgggaactaataaatgtccatgaaatcttcacaatttatgttcttctgctgcagcttcagctggtccctccgtttggggttcttgacttcccgcaataagaatgacacaatggacttggggaatcagggggaaagggtgggaagggggtgagggagcaaagactacaaatagggttcagtgtatactgcttgggcaatgggtgcaatgaaatctcacaaatcaccacaaaagaacttactcatgtaaccaaacaccaccagcttccccaataacctacggaaacaaaaaaaatttttttttaaatcaggtgctaaattttgattatttaacttttcttagatctttaagactgaccaaaattttatcagttttcaaggtcatttaaattcagacacaataataaataatttacttattttataatggttagtaatttatgagggggcttgaaatttcagttaccgtagaatgatggtaccctggtaagtgtacaactcccagaggtagaattgtgtgtgatcaaaattttattttatttacttgttcagtgattaagggattctggacagatttcatataaaattaactttcaagggtctggttttacagattggatgctcatgttctgtaactaatgagtttccctgtaaacaaatctacctgagaagttaaattataaccaaagatagtttgctcattagcaggaatctaaccatagatggagcacctcatttttggcagtttacacattagattgatcatttaattaagaaatcatgaaggacgtaacttgacctaagtaacacagctaagcaagtagaaaatttgaaattttaaccaaagtttgtctaatgtcccaaggtgatactcttgactaggcaaattgcttttcacagtaggggatctaatgaacactcccttgcccagtgtctagcatgtaatatcctttttttttttaaaactaagaacaatagcattttcttaatcctgtacattctatttaaagttgacccttgaacaacttgggcttgaactacatgggtccgcttatatgtggatttttttcaaccaaaccgatcaccacgtatacctagggatgactgtactgtggactcaaattgaggtcttttaatgaggaagagttaataggtactaaataaatgtacactgaatgaatgaatatattgactcacattagctattttgaggaggcaatttgatgaattgtctcagaaaagaacacacttgtatatatttactaaattatgatattatactaaattacaatattatactaaatataatatcattgagtcctggacccccagactttgccagtgaaatctgtatgagaacttttgcactcaaagagctgtggaaggcagtgttgtttatttcattattattattttttcctcaacccatttaaggtggagtttatctcattattaatgttgctactctgagagctgtatagcctccatttcctcttgtttggaatcctaagtaaaaaaaatacagaagtgtttaattcattcattccaatgaatattactgaggcactgacgtgtacaatgccttattttcctttttctttattttcctgttttttgtgagagaaaaaagcctacaatgccttatttttcaaatagaactcctaattcccctctaccccaagcttgcttttccttatgtccttcctgtctcatcaaattgcaacctcttttttagtagctttaagtaagaaaatctacagtcatccttgacttcactgtttcacacacaccccacaaacaatcaatcaccaaatcttattgcctctgtcttaaaaatatatcaagaatctgacccgttctcaccgcttccacctgtaccaacctggtctgaaccatgctcacctctcactgaatgaattactacagttgcctcctgactgttctccacctgatctatcttctaagaccttaactctttaaatccctcttccccttgcttcctctaacttagccacagtggcttctctgcttttcattaaacacaccaacacagttctgtctttgcacatgttgttttcttgctgggcaaactcttcccttggaagtgggcatggctacctctgtgtctatattcaggtctctgctaaatgaggcctttcctgaaaaccccatctaagatagtcctgccccaccccatatcattttctatttctttcccttgttttcttctttatcatatcaataatcaacatctgagtgcttatatatttattactttatttattgtctttcccatcttattagagtgtatgctccacaagggcagaaattagttttgttacctattgactctgcaatgcttagaagagagcctgtcatttaatatttacatatttgttgaatgaatgactatgcatagtatcaaactgaatgctagagatacggtaatggacaagtaatgggcaacatagacacggttcctgatctcatgacatttacagttcctacaggggaaatagatataaacaattaattacataacgtttaattattatggttataaacatgaaggcatcattgaccactctggctgaaggtcttggtgtgtaggaagacagactatcaaatatttaataacttaggatcaagagccagaatccctcaaatcatataatttttgaataaaaatacagagaatcagtgtcatgcaaatgagcatctatagttagaggtaggttaaataggattatgaagatttagagggagctgacaaagcaagacagggaacaagattaaaagtagcctactaaatagataatccaatgcagctatgttctatcagtcaaggttactgcaggtacccggaaaagaaatccagtgataggtatacagggtcaagctaatcatgctttggaggggaaaacacaacacaacacaactcaacacaacacaacacaacacaacacaatactcttatccttttaaacttggataaatcagaaaaatattgtagtatgtaagttttatatatgcacatgaaattccaacttaccttcaatttcagcaaaaagataatcttcccaaagccttccagttcagttcctttcctccccaaatttttgggctccttgtatgtaatctctcagccctttatcacactgttttgtaatcatctctctttctctctctcttttttttatttttttgtttgcctgtgtcctgcctctgtggagtctctgaggaaggaacttttctttgtgcctcgtagaaaagtgcccagcacaccgtagatactcaagaattatatgtgaaatgaatgtacaaacatttgagcaaattttatgcctttatgaaggattattattttgcattgttaaacactctacacacatgaaaacacagattctcattaaaaatgaaaatattgaatgaaaattgaaaataaattgaaattacttcacctggttatattttgctagaattatataataaattacttagaaacaaggtataaaaatggctttgtgtcttttttttttttgaaatagagtctcactctgtcacccaggctggcagtggtgcaatctcggcttactgcaactccgcctcctgggtttaagtcattctcctgcctcagcctcccaaatagctgggattatgggcatgcaccatcatgccttgctcatttttgtattttagtagagatggggtttcaccatagtgaccaggctggtctcgaactcctgacctcaagtgatccgcccacctctgcctcccaaagtgattacaagtgtgagccactgcacctggcacaagttaattacttagcagccacagatatctgcttatgaaaactcccattgcagcataatgggtacagttaagccctcagcaatatgctgcaaagctccagtttaggtgctccacactttagaaggaaggaaaaggaagagagagcacaattatgaagtgtcctctttatatactgacagtgtgtgaaatgctaaatccatttaagtctcagaaaaacctaatgaggtaggtgttatttccattttacaaataaggaaattgaaccttgaaaaagctaagtaattttctcaagaccacacaactaatccacatgatcccaggaatccgtaatatttagttcattcttaaatatggttttttttgggggggtgggggaagatagacgaaggaagtgtgagagctagtaaagaaagcaataatttgctttatttttgagataaatcaaatcagttatttggaatatggagagagagagtgtgtgtgtatgtgagattcattgtggaagagctgttttataatgacaagttctatgaagtttcatgatattgaccaagatttaagttggctgaaggaagaaaggtttactataatcattaccctgttttatttaattcattaaaatcatttaagaaagtttcaagtaacaagcaaaccatgaagaaaataaacattcatggctacctatgggagcgaattctggatcttgtcattttgatttctttttagatatgtttattataatcacatcatctgtgtatgaggtaggtaggactgcaagaagattgctctaattaaccctggtatattttctaaccagaaaatatatcttccacttttaaaaagaaaccatgtaaatttattgcaatgcaattattgtaaaacaaagtttaactttgatatttgtctttttaaaattgatagcctcttctcaagtatttacaatgctttaggaacagtaataaatgcttcatattactatgtctcatttaatcctcacaataaacctactagatattattatgctcatttcatgaaaactgcaactgagacccagcagttcattatcatgctccaaatcccagagctagtgaacagcagagctgagattcaaactcagtcctgggactacaaaacccatatatttaagctcagtgtgatatcgtagaaaactcccccaaagtggataacaacagttggcattagagaggctaaagtaaagtgaacactgaatgtaaaaacaaaaaggtcttccacattcaacaacaggcagtcattttctgaagatcttaactccccaagaagcaatattaagttgaaaatattaaggagacccacagaggtctggtctgagtactttcatgaatgctagatccaaattgggtaattaaaaaacatttcttagatgtgagggacaattatatatattatatatatatgtgtgtgtgtgtgtgtgtgtgtgtgtgtgtatatatatatatatattttttttatttgtttgtttgtttttttgagatggagtctcaatgccttgcccaggctggagtactgcagtagcactatcttggctcactgcaacctctgcctcctgggttcaagcaattctcctgcctcagcctcctgagtagctgggattacaggcgtgcaccaccatgcctgcctaatttttgtatttttagtaaagacggggtttcaccatgttggccaggctggtctcaaaattctgaccttgtgtgatccacctgcctccacctcccaaagtgccgtgattacaggtgtgagccaccacaccgggcctcaagggacaagaatattataaaaagtaatagtgggcattatcaaattttgcatttgtatgcaggtaaagtgctaaggggtttacaggtgcattcaatgtaaagatgaggaaattgaataacagttgatgaaaaacgtttttctgtagaagaattctttgctatcactgttagaggcaatttgctgaaataggcgacttgactaattttccatgtttttaccttccagatgtcaaaagtagtgtggtgctctgaagtcagataggcctagacatagaggtatcagataaaacacagactacccagttaaatttgaatttcagatttaaaaaacccaatttttaaaataagtttgtctcatgcaatatttgatatatacttatactgtacttttagttgccaaatctagtaaccctctctgggtgtgaatcacagctaactctgatatggtagcagccattgtgactctggacaaatgacctcatctcccagccttcattttcttcttcaaaagatgaagtagataccttttctacttcacagaattgttttaggatttgaagaaagttaagttcattctcttgataatttctttgtgtgtctgttgattacttcatgggtttccaaatatttaccattaatttcatagagatagacttaagacactgccatggtattcaaggcaaggggcttattctctttttctttttctttttcttttactttttttttgttgttgttgtttttgagacaaagtctcgctctgtcgcccaggctggagtgcagtggtgtgatctcggctcactgcaacctctgcctcctgggttcaagtgattctccgacctcagcctcctgagtagctgggattacaggcactgtaccaccacgcccagctagtttttgtatttttagtagagacagggtttcctcatgttggtcaggctggtctcaaactcctgactttgtgatctacccgcctcagcctcccaaagtgctgggattacaggcgtgagccacgacgccccgccaaggggcttattttcttaagcagattaggtagtctagagagaagcatgatataaaaggatggacacaataacattttagcataaagctaaattgtggcacaagagaccacatgtgttaatacacttttttagatccagtgatctaatttctaagtaaacactaatcacagaggtacataatgaagagtaagaatattcattttgaggctgggctcagtggctcacgcctgtaatcctagcactttgggaggcccaggtgggcggatcatttgaggccaggagtttgagaccagcctggccaacatggcgaaaccccatctctactaaaaatacaaaaatttctgggcttggtagcacacatctgtaatcccagctacttgggaggctgaggcaggagaattgcttgaacctgggagatggaggctgcagtgagccgcgatggcaccactgcactccagcctgggcgaaagagcgagactccatcttaaaaaaaagaatgttcattttgaaatgttttagaccagaggaaaaaatatccaataataggaaaatgaatcaatgaattatggtataatgaaatacaatagaagattatgtaatcttaaaaagaacgcattagatagatatttagcgatataaatattatcataatataatattacataaaatcagaataattttaatttaagaatataatggtaggtataaggaaaatgttaatattggttatgccaaaatagtaagactatgtttccattttcttttctttctttctgtaatatctttttatgaagcatgttttatattagaaatatgaatttaatttttacaattctggaactcagaagtcaatcttcctaaggtacacagtactcctctaattttctctgctaggcatcttgaggtgcctcctctcttgagagcctcctacgctactggagctgaaaccattcaactgaggcaataagtgttactcggttgttcattgttcagcaagaaaaatattgcaaatactggagaatgcatgatgtatttttggagctaatagatggaaataaaggcagttttgctaaatggaaacagtatttatttcatgtcattctgattttcagccataagcaaaagttttgtgagtatgtagcctgtcatatattgcataaaagagttcttagggaaatttacttttaggttattagagtaacactgagacactaactgaaatattgtgatgatttttatacatctaaagcatgaatttttctttcaggcaagctcagctttatcctattttatttcttgactaggtatctgtcaaatatgcaattcctccataaaatagacaattaaaagatcaatgactaatgaagtgcatcctactaatattttaaataacttttaatatcatggcactgtatttgaaaatgtaattatactttgtaaaaaacctagacgctattttcaagatgataaccctgggtgaagttggaggtataattttaataaaattcatcaggcaatagtacatgtggtttactttcaaatttgttgagagatgtagctttgagaacccctcttttatttctaactctcattcatattaataggctcagactcaagcaaaggataatgatgttgctgttattttcatccatgtgtaaatccgcaaatccaatgccgagtcatgaaaatcctactttgacaatgcgacgaactgtttatttccctgggaataattttgaaaactagccatttgtgtatctttgaggaaagggaaaaaatcagcatgtttattatttttaaaaaattagggcctggattttgacaatgtcaagatttaccgtatatccctgtttgtttggatacaccagtgacgtccacttctagaagacaaagttatattacttaaacaaccaaaggtaagaacccagtgataacgataattagagttatatttttcacaaatgcttatacttctgttttgactctttaaagtttcagcttttgctttgcttttcatgtgatgtgctctctagatacagctatgattgtatttttattaacttctctgtctttttgacagataagtgaatactctacctggcaatatgattctgctaatctgaatatcacaaaatagtaaatgctacctgcttttcacaaattttagttttatttttagaagtcaaaaacaatacctttgacaggtatgtttttccccaaaggaagtgtcatatactgatttttctttctaaaatttggagataggacactatcaaactcatgtaaatcttaaagaattcactcctaaaaataagagctccaactcactggaaacttaagtatcagatactttatcaacattattataacaacctgcatatcccctttcagagatgaataagtggtctgaagagattaagtgcctcgcccgaggatacaatactactctatgaaggagctagaatttaaatcaccttgccttcttttaaataactgtgataagcgtgtatattttaatcagaaaaaacagttattggctgggcctggtagctcacacctgtaatcccagcactctgggaggctggagtaggtagatccttgagcccaacagttggagaccagcctgggcaatatggcaaaaccttgtctctaaaaaaatgcaaaaattagcccaggtgtggtggcatgtgtttgtagtcccagctactcaggaggctgaggtgggaggatcacttgagcccaggaggttgaggttgcagtgagccgagatcacaccactgcactccagcctgagtgaaagagagagacgctgtatcaaaaaaaaaaaaaaaaaaaagaaagaaagaaaaataaaaaactgttatcaattactgtcatgtttttctttaattaaaaaatgcgtactgcattcatcatgtaataagattacatgtttcaaaatatcagtgatttcattctatattggaaagttgaacagtcttaaaacaagattttaaaatgtttctatcaataaagatacctcttaaaacgggctttttacattttgactttttgtttatatatcctttaatcagtttgttcaattacactcattctttcacttggcta

SEQ ID NO: 343 - DNA, 1684 bp, Homo sapiens
  source 1..1684: mol_type = other DNA
ccgccccgcgccgcctctctggtttgtgcgcccgtcgcaggtcgcaggcctctttgtcagctggagttgcgcggtgagtgcatctccagtcttcggctttcggtctcccgcggggagggcgcccggccggcccgtgggtccgatcaggggctgggctcgcccggtgtccccacgagctttgcccgcctcgagctcctctgctcccggcggccagaacggaggggtagagcagccctcggcggcccggggggcgggcggcggtgcccgtcccggggctgcgcgaggcacaggcgccgcgcccagcggaacagccggaggttcccggcgcaggtctgggcaccgtaacaattttgcgctttgcttccccagggctgacgcgccactatgtagcgggtttcgggcgggccacgcgtgcgggacaggaacccaaccccagccgaccttgagctccaggagttcgtctcttacgtctgcggaagtgcagctgcctcagttcttagcgcaggtatgttcctagccttgagcggggtgggggaaggaatgagtcagcctggagcacgtggccagtgggaccggagggttccccggcgtctgtttgtcgccaaggtccgaatccggctccccttaactggaaggaaacatccatgtaggggctcaccaaacaaaacagctgtgtttctagtgtggtttcagacttagagaagcagagatccacgaggtattgagagcaacgcggaaaatagtagtgaaccctgtaaaaatcaaagaaaaaaaatcacaaagcaccctttcctgtgcccttttaaggttgacccagtgctttaagaggctaacacagaagggtaaagtaagtctccataaaacccagagaagagactggaaagctcctctttggatcctgtctggagtcacaactgaaccagaaaaagtttcgttacaacttgagcgcctttgtgattttctttacagtttatagaacaagcaatacatttcagttttctttggttaaaacgtcattttaaaacttttctttctataggttgacaactacaggcacaagccattgaagctggaatgtcctgttgctggtatttcaattgacttaagccaactatcccttcagttacaataggaaagtgcctctaataaggccaaatatgcgtactaacttgtagcaaccacgtgtccgtgcagtgccacaggagctagagcagtgacaatgctggtggcaacagggcagtgtagcaggtgcttcatgttcaccttttcaaccttttcatttaattgtcacaactcggaggtggattctgttagggacaggctgccccaggaccactccgcccccgctaactcaatgcagctgacccttaccctgaatactctgcagctgcattcctgaaccgttatctaggcgctatagcaaggtcaccagacttgctacaccgaagccctctgggtggcacgggggaggtcatgagaaacgtggattacacccccttgtaaattcctattttcacaagataatatattgtaagccggtcatgagattatatgtggtaaagttaattgactaacaaccccagggtctctctcccccatataaacccctcattttgtaagctcagggctgccacctccgactggtggagaagcctggcaggttaataaacttacttggcctgac

SEQ ID NO: 344 - DNA, 32744 bp, Homo sapiens
  source 1..32744: mol_type = other DNA
cggagcgcgcacgcgggaacccgcgctggaggcgggcgagggccgaggggcagctagggagcgcggcttgaggagggcggggccgccccgcaggcccgccagtgtcctcagctgcctccgcgcgccaaagtcaaaccccgacacccgccggcgggccggtgagctcactagctgacccggcaggtcaggatctggcttagcggcgccgcgagctccagtgcgcgcacccgtggccgcctcccagccctctttgccggacgagctctgggccgccacaagactaaggaatggccaccccgcccaagagaagctgcccgtctttctcagccagctctgaggggacccgcatcaagaaaatctccatcgaagggaacatcggtaaggagcctccggaaatgtgggacgcaaggctggggtgtcgcggcagtggctgaagcttcccttcgccgcatctctctgcagcaactcggtgagggctttccctccagcctggcggtgtggacgcggcctcggcttcctttcccacccagagcatccttcccttacctcccgctccacggggtgactgcggtccccggggtcagactgggcgccaggcctgcggtctctgtgaggcgcgctttgaacctctgctccctctttgttgggaactcgcaaagggaagcgggggaagggtattagatttcttgaggtgtaacttacattaaattcaccctttttaggtgtactcttctatgaggtttgacaaacattatgccttttgctatcaccatgatcgagatacagaacattttcatcaccttagaaagttcctacctgctcctttgtattcagccccctccacccttcctattccctggcacccactgatttgatttctatccctgcaagtgttgccttttccagaatgccatataaatggaatcataggctatatcgccttttgtgtctggcgtctttcatttagcataatgcttttgaaattcattcatgttacttgtgtctgtagtttgtttctttttattgctgagtagtattccattgcatggatgtaccatcgtttatccattttctagttgtggacctcagggttgtttacagttttttagctatattattagcgaagcattgttttagctatattattaacgaaactcgaaacattcgagtacaagcaaagaggtctttaatgatcttaatagcatggagttcctcaccccttactccacatccaagtaaacattggattatgattcaaagaccactaacgtttctgttaactcagatggggggcagactaggccatgcctgtcactttgcaagatacacaccaacgtccgattcttctgtatctccaaccacaggaaacctacccctgaaacttcctgttttgatagatttaaaaaaaaatttttttagctccaggttgggtgctggtcattcatgcatacagcaaattttttaaaattcttaccacattcaaagcactgtaccttcttgaaaaaggccaggcaagcagatgctttaagcattcaaatgaatagaaaaactgcattctcaaagaggacttcttatttcattgctccagaattaaagcaccagtagaaagaccatatgatataattagcaatgtaagttatttgagggtgcatgtttactagtatggaatctctgacagctgcttactgaataaagaagaccatatataaagacaggagaaagtggctgaacaaagccatctgaaaagtaaatttgaggcagggcatggaggctcatacttgtaatcccaggatttggggaggcttaggcaagaggatcacttgagtccaggagttccagatcagcctgggcaacatagtgagaactcatctccacaaaaaaattaaaaaattagttgcatgtgttggtgtgcctccagctactcaggaggctgaggcaggaggattgcttgagcccaaagatcaaggccacagtgagccatgatcacactactgcactctagcctgggtgacagagcaagactctgttaaaaacacagaaacaaaacagtaaagttgaatgaataacccctcggatcaataccacaatacattcatcccctttccctctctccaatccagttaggtagcatcatatttagaaatatttcctcaaagcatctttaatcttttcagcagctgaaataatttcctaatatatcatcccatctccagtttctcttaactacttctgcaacggtctttttgtatgcaaatgtcatgtgttatcccctgcttaaaattcttcactgattttgcctttacctacactgaaagtagttgtgaactgatagcctgcaattgcacaatattggcctgcacaggttgaaaaaaaattttactggccagtggctcaagcttgtaatcccagtgctttgggaggctgaggcaggaggattgcttgaggccaggagtttgagactagcatggcaacatagtgagaactagtctctaagaaaaataaaaataaaattaggccaggcacagtggatcacgcctgtagctccaactactcaggcggctgatgctgatgtgggaggatcacttgaatgtgggaggcagaagttgcagtgagctgagatggcaccactgcaccccagcctgggtgacagagtctcaaaaaaaaaaaaaaagccagttgtgttagcatgcacgtttagtcctagctactcaggaggctgaggtggagatctttgagacctatagtttgaggctgccgtgagctgtggttgtgccactgccctacagcctgggctacagagtgagaccctgtgtctaaagaaaaaaaaattaaatttgttgctaactcgaaaacgttttgagatttcccataaacaattagattcttggcttcttttgaaaaatctgaagatctgttaacaccgggcctgcatttctgtatgacaacaattggtgtttagatggagcatgttccttgccatttttcgtctccctgacactgagactttgttagttactgttcattattggtcttgcacttttgttcatgtctccttcaccttatttgccagatccaaataagctgtaaatgcacaaattgttaagctgtgcgtaaactattttgcaattcctctatttttcctagaatttgaactttacttggtcgttttagttttatatttatataacccatcttcttatgttctgtgttactcaaatgttcccttatgttagattgatggaggacttacctgcttctcatcttaatagtctgttcagaatgactttcagcattataatgcctgcttggcattaggaattctgttagtttccatgactttttaaagtattaacatcagtgtctttggttcttgttctcctttgccttcatagaaaattaatttattaattagcttattttctagctcccactttgccccaataagttaaggaactagatgtgttagtgtgattgggaactctagctgttattactctgcttgaactaaatgtaactgttattactcttagactttttaagtatgaccatatgaatttttctgcttgtaagcagtgtcagaagaaagttgaatgctgtagccttaagtgctttcagactctggtggatgcctaatttttttatttgttccttgggtgctatttctgaacatcatgttctcctttccctcttccatctagctcagtgaatgtggggtgttctttctatatgctttcacttccacttaacattcttctaaatgctgtacagtccctaagcttacactctccatactaaattttggtggccagtgtttttaccatgattaaatctcactgttatccagtttatcgttaaaagtttttctcctctcctctggatacagtttactttgtgtttttcttctaaactgtctacctgtgtcaccttctttactgcctcgctcctgttttttctctgtgtgtaattctttaaagttcttccaggtttttcttcttttctattgccctgtctaatgtcctagatttaaatatagttctgcaagtcaaaggtaagttctttctactccccatggatctaatttataaggaagaggaagctttgcttgtaagtatattgaagttatttatatgttcatctgtgtgtgtgtgcacgcacacacagggaaagagagagaacattatgctaaccagagatgtctaatacaaccacatttggtgacttcagatataaagggtgtggtggccattaggagtattacttctaggtcaagactgtccctactattaaatataatatattgttaaactaaacgtaataaaaaacaaatgtgcttaatgaaattgggcagggagccttttcattttcttctaaagaaatatgaagagaaagtttagaaagttgaatgttttgggctttttatgttgcttgctattgtaaatcttgcaaaagctaatgactacttgacatctttttttcctgacaacttttcttcctcaattttatctttcctcacaacagctgcagggaagtcaacatttgtgaatatccttaaacaattgtgtgaagattgggaagtggttcctgaacctgttgccagatggtgcaatgttcaaagtactcaagatgaatttgaggtatgaaaataaaatttaagtagataaaagcctcttggtttagaggagcagtagtacttaatctctttttctttttctttttcaataaaactttcaaatctcgctttaggtatatatcttcatctaggtggtggttacatggatatatatacagttggctctccatatcaatgggtttcagattgatatggattcaaccaatcatgaatagaaaatattcagaaagaaataatacaaaaaaatacaaataataaaggattactgttcatatagcatttacattgtattaagtattataagtaatctagagatgatttatactatttgggaggatatatgcagatactacaccattttacataaaggacttgagtatatgtggatgttggtatctgtgtggaacctggaatcaattcttgaggttactgaggggtgactatatgtttaaacatgcattgaggccggggttggtggctcacgcttgtaatcccagcactttgggaggctgaggcgggcggatcacttgaggtgaggagttcaagaccagcctcgttaacatggtgaaatgccgtctctactaaaaatacaaaacttagctgaacgtggtggtgggcacctgaattccacctgcttgtaaagccgaggtaggagaatttcttgaacccaggcagcggaggttgcagtgagctgagatggcgccactgtgctccagcctgggtgacagaatgagacactgtctcaacaaaaaaaaaaaaaggaaagtaaaatttatcaaactatgcattcaagatttatgcactttaagtaaagtataaaagttttctttttcataaaaatttctttttttgttgttatcctttaagttctgggatacatgtgcagaacgtgcaggtttgttatgtagatatacacatgccatggtggtttgctgcacccgtcaacccgtcatctacattaggtatttctcctaatgctaacccttcccttgcctcctaccccaccgacaggccctggtgtgtgatgttcccctccctgtgcccatgtgttctcattgttcaactcccacttacaagttagaacatgcggtgtttggtttcctgttcctgtgttagcttgctgagattgatggtttccagcttcatccatgtccctgcaaaggttatgaactcattcttttattatggctgcatagtattctttggtgtatatgtgccacattttgtttatccagtctatcattgatgggcatttgggttggttccaagtctttgctattgtgaatagcgctggagtaaacatacatatgcatgtgtctttatggtagaataatttataatcctttgggtatatacccagtaatgggatggctgggtcaaatggtatttctggttctagatccttgaggaatcgccacactatcttccacagtggttgaactaatttacactcccactaacagtgtaaaagcattcctatttctccacatcctctccagcatctgttgtttcctgactttttaatgatcaccattctaactggtgtgagatggtatctcattgtgggtttggtttgcatttctctaatgactggtgatgatgagctttttttcatgtttgttggctgcataaatgtcttcttttgaaaagtgtctgttcatatcatttgcccactttctgattgggttgtttgtttttttttcttgtaaatttgtttaagttccttgtagattttggatattagccctttgtctgatgggtagattgcaaaaattttctcccattttgtaggttgcctgtttacttggatgatagtttcttttactgtgcagaagctccttagtttaattagatcccatttgtcagttttggcttttgttaacactgcttttggtgttttagtcatgaagtctttgctcatgcctatgtcctgaatggtattgcctatgttttcttcagagtttttatgattttaggtcttatgtttaaatctttaatccatcttgaattaatttttgtataaggtgtaaggaaggggtccagtttccgttttctgcatatggctagccagttttcccagcaccatttattaaatagggaatcctttccccattgcttgtttttgtcaggtttgtcaaagatcagatggttgtagacgtgtggtattatttctgagggctctgttctgttccattggtctatagctctgttttggtacaataccatgccgttttggttactgtagccttgtagtatagtttgaagtcaggtagcatgaggcctcaagccttgttctttttgcttaggattgtcttggctatacgggctcttttttggttccatatgaaatttaaggtagttttttctaattctgtgaagaaagtcaatggtagcttgatgggaatagcattgaatctgtaaattactttgggcagtatggccattttcacaatattgatttttcctatctatgagcatggaatgttttaccatttgtttgtgtcctctcttctttccttgagcagtggtttgtagttctccttgaagaggtccttcacatccgttgtaagttgtattcctaggtattttattctctttgtagcaattgtgaatgggaattcactcatgatttggttctctgtctgttagtggtgtataggaatgcttgtgatttttgcccattgattttgtatcctgagactttactgaagttgcttgtcaccataagggattatgggctgagatgatggggttttctaaatatacagtcatcatctgcaaacagagataatttgacttcccctcttcctatctgaatcccctttatttctttctcttgcctgattgccctggccagaccttccaatactatgttgaataggagaggtgagagagggcatccttatcctgtgccgatttttgaagggaatggtatcggctgtgggtttgtcataaatagctcttattttgagatacatttcatcaatacctagtttattgagagtttttagcatgaagggatgttgaattttattgaaggccttttttgcatctattgagataatcatgcggtttttgtcattggttctgtttatgtgatagattatgttttattgatttgagtatgttgaaccagccctgcatcccagggatgaagccgacttgatcgtggtagatgagctttttaatgtgctactggattcggtttgccagtattttattgaggattttcgcatcgatgttcatcagggatattggcctgacattttcttttttttgttgtgtctctgccaggtttttgtattagggtgatgctggcctcaaaaaatgagttagggaggagtccctctttttctattgtttggaagtttcagaaggaatagtaccagttcctctttctacctgtggtagaattcagctgtgaatccatctggtcctgggcttttttttggttggtaggatattattgcctcaatttcagaactttttattggtctgttcattaaaccagagttcttcctggtttaatcttgggagggcgtatgtgtccaggagtttatccatttcttccagattttctagtttatttgcgtggaggtgtttatagtgttctctgatggtagtttgtatttctgtgggatcagtggtgatcctttattgtgtctatttgattcttcccgcttttcttctttattattctggctagtggtctatctattttgttaatcttttcgaagaaccagcttctggattcattgattttttgaagagtttttcgtgtctctatctccttcagttctgctctgatcttagttatttcttgtgttctgctagcttttgaatttgtttgctcttgcttctctagttcttttaattgtgatgttagggtgtcgattttagatctttcctgctttctcatgtgggcacttagtgctataaatttccctctaaacactactttagctgtgtcccagagattgtggtacgttatgtctttgttctcattggttgcaaagaacttatttatttctgccctaatttcgttatttacccggtagtcattcaggagttgttcagtttccatgtagttgtgcagttttgagtgagtttcttaatcctgagttctaatttgattgcactgtggtctgacagactgttatgatttccattcttttgcatttgctgaggaatgttttacttccaattatgtggtcaattttagagtaagtgcactgtggtactgagaataatgtatattctgttgatttggggtggagagttctctagatgtctttcaggtctgcttggtccagagctgagttcaagtcctgaatatccttgttaattttctgtcttgttgatctaatattgacagtggggtgttaaagtctcccactgttattatgtgggagtctaggtctctttgtgggtttctaagaacttgcattttgaatctgggtgctcctgtattgggtgcatatctatttaggatagttagctcttgttgttgcattgaaccctttaccattatgtaatgccctttgtctttttttcatgcttattgatttaaagtctgttttatctgagactaggattgcaacccctgccttttttttgctttccatttgcttggtaaatcttcctccatccctttattttgagcctttgtgtgtctttgcatgtgagatgcgactcctgaataccgcacactgatgggtcttaactctgtctaatttgccactctgtgtctttcaactggggcatttagcccatttacatttaaggttaatattgttatgtgtgaatttgatcctgttattatgatgctagctggttattttgcctgttagttgatgcagtttcttcatagtgtcgatggtctttacattttggtatgtttttgcagtggctggtaccggtttttcctttccatatttaatgcttccttcaggagctcttgtaaggcaggccttgtggtgataaaatccctctacatttgcctgtctgtaaaggattttatttctccttcacttatgaagcttagtttgactggttatgaaattctgggttgaaaattcttttctttaagaatgttgaatgttagtccccactctcttctggcttgtagggtttctgccgagagatctgctgttagtctgatgggcttccctttgtgggtaacccgacctttctctctggctgcgcttaacattttttccctcattttaaccttggtgaatctgacgattatgtgtcttggcgttgctcttctcaagggcatctttgtgatgttttctgtatttcctggatttgaatgttggcctgtcttgctaggttggggaagttctcctggataataatcctgaaatgtgttttccaacttggttccattcgtcagtttcaggtataccagtcaaacgtaggtttggtcttttcacatagtcccatatttcttgggaggctttgtttgttccttttcattctgttttctctaatcttatcttcacgctttatttttattaagtttttcttcaatctctgatatcctttcttccacttaatcgattcggctattgatacttgtgtatgcttcaccaagttctcatgctgtgtttttcagctccatcaggtcatttatgttcttctgtaaactggttattctagttagcagttcctgtaaccgtttatcaaggttcttagttccttgcattgggttagaacgtgctgctttagctcagtggagtttgttattaacccaccttctgaggcctacttctgtcaattcgtcacacttattctccatccagctttgttctcttgctggcgaggagttgtggtcctttggaggagaaaagacattctggtttttggaatttttagcttttttgcactggcttttcttcatctttgtggatttatctacctttggtctttgatgttggtgaacttcagatggggtttttgcgtggttgtcctttttgttgatgttgatgctattgctttttgtttgttagtttccttctaacagtcaggcccctctgctgcaagtctgctggagtttgctggaggtccactgcagatcctgtttgcctgggtatcaccagcggaggctgcagaacagcaaagattgctgcctgctccttcctcaggaagctttgtcccagaggggcacctgccagaggctagccagagctctcttatatgaggtgtctgccgacccctgctgggagctgtgtcctagtcaggaggcatgggggtcatggacccacttgaggatgctgcctgtcctttagcagagcttgagcgctgcgctgggagttccactgctctcttcagagccagcaggcaggattgtttaagtctgctgaggctgcactcacagccacgccttcccccagatgctctgtcccagggagatgggagtttgatctgtaagtccctgacgggggctgctgcctttctttcagagatgccctgcccagagaggaggaatctagagaggcagtctagcttcaggggtttgccaagctgtggtgggctctgcccagcttgaacttccaggtggttttgtttacactgtgaggggaaaaccacctactgaagtctcagtaatggcgggcacccctccccccaccaagcttcagtgtctcaggttgacttcagactgctgtgctggcagtgagaatttcaagccagtggatcttagcttgctgggctccgtgggggtgggatctgctgagcaagaccacttggctccctggcttcagcccccttggctccctggcttcagccccctttctaggggagtgaacggttctgtctcgctggcattccaggcaccactggggtatgaaaaaaaactcctgcagctaactccgtgtctgcccaaatggctgtccagttttgtgcttgaaacccagggcccttgtgtaggcacccgagggaatctcctggtctgcgggttgtgaagactgtgggaaaaagcctagtatctgggctggatagcaccatccctcaaggcttcccttggctaggggagggagttcccccacccctttcaccttccaggtgaggcgatgccccaccctgcttctgcttggcctctgtgggctgcacccactgtataaccagtcccaatgagatgaattgggtacttcagtcggaaatgcagaaatcacccgtcttctgcattggtctcactgggagctgcagaccagagctgttcctatttggccatcttgcctgggaatctaaaagtttttaaaaagttaaataataaaagttttaaaaaatctaacagcaaattaaattccttcattgtcttttctaatttttttttttttttgagatggagtttcgcttttgttgcccaggctggagtgcaatggctcgatcttggctcaccacaacctccgcctcccgggttcaagcgattctcctgcctcagcctcccaagtagctgggattacaagcatgggccaccatgcctggctaattttttttactagagatggggtttctccatgttggtcaggctgggcccaaactcctgacctcaggtgatccgcctgcctcagcctcccaaaatgtttggattacaggcctgagccactatgcccaacccttcagtgtcttttcacattttgtttaaaaacaagcaaataaggccgggtgcggtggctcacacctgtaatcccagccctttgggaggccgaggcaggtggatcgcctgaggtcaggagttcgagaccagcctggccaacatggtgaaaccctgtctccactaaacatacaaaaattagctgggcgtggtggtgggcgcctgtaatcccagctactcaggaggctgaggcgggagaattgcttgaacccgggaggtggaggttgcagtgagccgagatcgcgccattgcactccatctcaaaaaaaaaaaaaacagaaaaaacaaaaacaccaaaaaaaaaaaaaaaaaagcaaataagaaaaagaaaaactactattcagtaactgaattttacctttcaagccttttgtcatttactctcatttctttttactttcattcttgccagactttcactctgggcagaagttgtaattttgcagcattttaccgttctgcactgcaaatgaggaagaaagagaatgacagagttcagtgtcatttttttaaataccaaaatgtatggttgtatgtgtgagagagacgttgctaagattttcgtttctggagaaatgagaattgaaattgaaagcaaggccaggtgtggtggtttatgcatgtaatcctggaatttttttttttttaagtgacagcaagtttattaggaaagtaaagcaataaagaatggctactccataggcagagcagccaatcccagcacttcgggaggctgaggccagaggatcgcttgagcccaggagttcaagaccagcctgggcaacatagggtgaccccgtctctacaaaaaatttaaaaattagctaggtgtggtagcctgcacttggggttacagctacttggaaggctgaggttggaggactgcttgagcccaagaaattgagactgtagtgagccatgctcatgccactgtactctagcctgagtgacagcaagaccctgtctaaaagaaaaaaagaaattgaaagcagtaaggcagaaaccttaaaaatggaaatgtatgctaacaacttactttgatctgaggagtacagaaaattgaaaaaaaagtatctaaaaaaatttagctgttggtataaggaattctgggaataataattgaatatttaaaatgtaaatcacatatgcaaagaggaatcactagcaagatattccatggactttgagaatatatggttttgaataaccaaaaatactttttcatacaccttctatttgccaggcatagctaactttagacctagggcctaattcagtacaccccaatccttaggatatccaggactaaatcttaaaggggctttcttcccatatagacctcattatcttaagaaattgatgttttatatctgatttttggggaaaggcaaggttagtctacagtagaattttaaagtgggtaaatttgtttatttgattctttttaaaaacatttttgacatgatatatctgtagaaaagtaggtaaaagctaatgtacagtttgaagaacagttttaaagttgacatctttataaccattatccaggtcaagaaatacgacatcatcattccagaaatccctgttcgccttctccaatcactatatcttctttcctacgttactactccgctaggggtaattactcccattcttttgtgataataattttcctgcttcctaaaaattgtttgagcatacatgaacatacctctaagtataatttagttttgtctatttttgaatgttatataagtggaattacattgtttgccttttttcctctcgcttcttttacttaatacatttatgaaatttgtccatattatatgcagctgtagcttattttcagctatatagtattgaattttgttttttaaaaatattcttttttttgagacaggatttcactctgttgcccaggtaaagtgcagtggcgcagccatggttcactgcagcctcaacctcccttggctcaggtgatcctctctcctcagcctcctgagtatctaggaccataggccaccacgcctgtgtgccaccaggcttggctaatttttgtattttttatagagacggggttttgccatgttacccaggctggtttcaaactcctgggctcaagcgatctgcccatctcagcctcccagagtgttgggattacaggcttgagccactatgtggggcctatagtatttaattttattcgtctatcactgtttgtccattttatacctttaattgatttttgagtgatttccaatttagttgcttatgtaaacagcattgctgtgaacataaattcacccgcatacatgcaaaagtttctgtaggaataagaagtaaaattactgggaatgcttatgatgcctgttttccaaactggctttccaattttctctccccccagtgtaatcaagctctcattaatctatgtctttgccagcatttagtagtgtctggctttctcatttttgtcattctgctgagtgtttactatttttttgtttaatttgtatttccccgctggctaatgaggctgtgttccttttcatatgtttattagtcattttgatttttgcaaagtgcccacttgggtccttttgcccattttcctctgagccatctgtcttctctcactgcatttttaatgtagcttttcgctgaagtacctactcaagtttgcttagcttttgaaggagagactggagttctaaaagcaactctttttccttttatttctggggtcagctgtcagtgcagttatcctcaggtagtagacagaaactaaccagattaaaccaatgttggaaaatagagggtattcttaaacagggtattggactaggtgacctccatttaaggtccgttgacatatttgtcatttgactctcagcatgcctcacattaaccaagggcacagaaactgacatataaaaccaaaatgccaaaaattttaatttgcagaaagaaatgtaatcattaaggtaattgaatttagatcagtttattctttatttggttcgtaattctcaaccagtggaaggaagtcataagaatgtctgagagctaaacagtttgaacacatggagatagagtgtggaaaaatagataacaataactgggaagggtaggaggaggggaagatgaagaggagtgagttaaagtgtacagatatacaggaagcttgaagaaataattcagtgttttatagcaaggtagaatggaaaaatacattgtactcaggtgatggacaccctgaatgattcgattactgcatattatatacatgtacaaaatttctcatgtattccataatttgtacacacaagaaagaatctcaaggattcgggtgctttttaaaataacaatcccttggaggttcaaatatgtgggatgcctcatagttaaaagtcatcaccctagtgaatcactgttaactgttgggagtatactgaactctttagttaggttgcagagaagttgaaaaacattgctttcgtatataagacaagacaatttataataaggttgtctgttgagcttggaatcagagcccagagggattagttaaatcatgttaatcagactgtgtcatcagactgtgatgcattaatacatttgtcttcattttaagacttaatggctttctgaatctgatatccatgtttatgggatgggacattttctttccatatacttgattcagaatgccaaactggccattctttataactagcatgcaggtgatcctattattattaacatattcttttatcaggccgtttattgtaatctggtcatgtcttcatgatgttacaatttgattacctttgttagagtttggtgcacattcttggaaggtagcttcagcttttttgtgtgtattggggactgctccgttgttaattctctgtacttctgtacagagggggtagtatttttgagatatagttgtggaatatgaggatggttgggtgggtggcttccctgtatctttggatattttcttccactaaactcaagaagtgagattttatttcttcatccagtagtccttcttccccagactcatccttgatctattccttgaggttatagtatgaatcacccactattcaaatgtcaatttttcttagaatgctgttagtgatgagaagtgactgttttcagacctaaccttggcaaggtcagtcctactttgatgttcttgtttcatcacacttcttggcatttgtagatttggaagaattgggcctttggtacctctgatctcttcgtttagcaacttactgtgcacccatatgcttagcttttgctgttttagctttttttttttttttttaacctgccacctagtggccgaaatgttgctatactattgataaggtactcctaattttggcaaaatagtaagaggcaaagcaccaaagattatgttctctcccttctccaaatctctcttggtgagaatgatctttaaaacataccactcagattattagcaatcttggtatggaacgtttttaaaaataataataatgtactttatgtggtgatttatgttattatttaggcccaaagttttgatttaattgtttccttttagcttatttttgagatatgcagtctgttaggaagctgtctctgtcttgttttttcattgagctgaattcttttggaggatcactattattgtgaagtactattttacttttaattaaaaaaattaagatatttttatttttaatttacagataaaaattatatttaattttatattatatttatatataaatcatatgtaatgtaaattatatacataagttatatataatataaaaattatatacataatataaattatatataatataaaaattatatttatggtatgcaacatgatgttttaaaatatgtctacattgtggaatggttaaaccaagctaattaacatacgcattacccgtactattttacttttatccaatacttcttaccactaataagccactgaaaaactagtaattgtgataaagaaggtgtaaaccatacttatttatgacagaacagcatattttttacttttaataagtcattctttttttttttttttgagacggagtctcgttctgtcgctcaggctgaagtgcagtggtgtgatgttggctcactgcaacctctgcctcccaggttcaagcgattttcctgccttagccttccaagtagctggagctgggattacaggcatgtgccaccacgcctggctaatttttgtaattttagtagagatggggtttcaccatgttggccaggctggtcttgaactcctgacctcaagtgatccacccatctcagcctcccaaagggctgggattacaggtgtgaggtctcttttttttttttttttttttttttaagacggagtcttgctctgtcccttagtaagtcattcttgaaaattagttaagaatgcttgataaagcacttccacttgtaccttttgaatagatgtgataacttttgttggcttgtatttttttgagtcttgctttattgcccaggctggagtgcaatggtgaacctcagcccactgcagcctccgcctcctgggctcaagtgatcctcccacctcagcctcctcagtagctgggactacaggcccacaccaacatgcccggctaatttttgtattttttatagcgataggattttgccaatgttgtctggatttgtctcaaactcctgggatcaagcaatccgcctgcctcggcctcccaaagtgctagaattaggcatatgagtcaccatgcctggcctgttggctattttataattatcttgtttggtagactctgatcttttacagttgaacttaattcaactcttttgcaatgtttacaaagattagacctagaattaaaagataaatgattttatagctgaccttgatatttctatttttcacttaccttgacaataatctgtacttcctataacaatgaagtattctttcataaagtgaaaatggacatatattatagagaacagaataaatgttattcataatcctaccactctgtatgtatcttttacatagttgaattaataatgtaatatattaaattttggtggaggtgatatgtaatttaaaaaatattataaagtaatacctgtttactgtttgaagttaaggaaatattagaaattatcaaaagaggggactaaaacttacctataaccttattatccagagataaccatagatcttacttgaaagaacagtatacagttttgtattttgtttcttccccaccccccacaatatttatatgtcaagagtctgagatccaactgcaaggcggcagtgaggctgggggaggggcgcccaccattgctgaggcttgggtaggtaaacaaagtgggctggaagctggaactgggtggagcccaccgctgctcaaggaggcctgcctgcctctgtagactccacctctgggggcagggcatagctgaacaaaaggcagtagaaacctctacggacttaaatgtccctgtctgacagctttgaagagagtagtggttctctcagcacggagtttgagatctgagaacggacagactgcctctgcaagtgggtccctgacccccgaatagcctaactgagaggcaccccccagtagggggagactgacacctcatacggctgggtacccctctgagacgaagcttccagaggaacgatcaggcagcaacaattgctgttcagcagtattcgctgttctgcagcctccgctgctgatacccaggcaaacagggtctggagtggacctccagcaaactccaacagaccagcagctgagggtcctggctgttagaaggaaaactaacaaacagaaaggacatccacaccaaaaccccatctgtacgtcaccatcatcaaagaccaaaggtagataaaaccacaaagatagggaaaaacagagcagaaaagctgaaaattctaaaaatcagagcgcctctcacctccaaaggaacacagctcctcgccagcaacggaacaaagctggacggagaatgactttgacgaattgagagaagaaggcttcagataatcaaacttctccgagctaaaggaggaagttcgaacccatggcaaagaagctaaaaaccttgaaaaaagacgaatggctaactagaataaccagtgtagagaagtccttaagtgacctgatggagctgaaaaccatggcacgagaactacatgacgaatgcacaagcttcagtagccgattcaatcaactggaagaaagggtatcagtgattgaagatcaaatgaatgaaatgaagtgagaagagaagtttagagaaaaaagagtaaaaagaaatgaacaaaacctccaagaaatatgggactatgtgaaaagaccaaatctgcgtctgattggtgtacctgaaagtgatggggagaatggaaccaagttggaaaacacacttcaggatattatccaggagaacttccccaatctagcaaggcaggccaacattcaaattcaggaaatacagagaacaccacaaagatactcctcgagaagagcaactccaagacacataattgtcagattcaccaaagttgaaatgaagggaaaaatgttaatggcagccagagagaaaggtcgggttacccacaaagggaagcccatcagactaacagtggatctcgcggcagaaacgctacaagccaggagagagtgggggccaatattcaacattcttaaagaaacgaatttgcaacccagaatatcatatccagccaaactaaacttcataagtgaaggagaaataaaatcctttacagacaagcaaatgctgagagattttatcaccaccaggcctgccctacaagagctccggaaggaagcactaaacatagaaaggaacaagcggtaccagccactgcaaaaacatgccaaattgtaaagaccatcgaggctaggaggaaactgcatcaactaatgagcaaaataaccagctaacatcataatgacaggatcaaattcacacataacaatattaaccttaaatgtaaatgggctaaatactccaattgaaagacacagactggaaaattggataattggataaagactcaagacccatcagtgtgctgtattcaggagacccatctcatgtgcagagacatacataggctcaaaataaagggatgtatgaagatctaccaagcaaatggaaaacaaaaaaaaggcaggtgttgtaatcctagtctctgataaaacagtctttaaaccaacaaagatcaaaagagacaaagaaggccattacataatggtaaagggatcaatacaacaacaagagctaactatcctaaatatatatgcacccaatacaggagcacccagattcataaagcaagtccttagagacctacaaagagacttagactcccacacaataataatgggagactttaacaccccactgtcgacattagacagatgaacgagacagaaagttaacaaggatatccaggaattgagctcagctctgtaccaagcggacctaaaagacatctacagaactctccaccccaaatcaacagaatatacattcttctcagcaccacatcgcacttattccaaaattgaccacatagttggaagtaaagcactcttcagaaaatgtaaaagaacagaaattataaaaaactgtctctcagaccacagtgcaatcgaacctagaactcaggattaagaaacttactcaaaaccgctcaactacatggaagctgaataacctgctcctgaatgactactgggtacataacgaaatgaaggcagaaataaagatgttctttgaaaccaatgagaacaaagacacaacataccagaatctctgggacacatttaaagcagtgtgtagagggaaatttatagcactaaatgcccacaagataaagcaggagagatctaaaattgacaccctaacatcacaattaaaagaactagagaagcaagagtaaacacattccaaagctagcagaaggcaagaaataactaagatcagagcagaacggaaggaaatagagacacaaaaaacccttcaaaaaatcaatgaatccaggagctggttttttgaaaagatcaacaaaattgatagaccgctagcaagactaataaagaagaaaacagagaagaatcaaatagactcaataaaaaatgacaaagggagtatcaccactgatcccacagaaatacaaactaccatcacagaatactataaacacctctacaaacacctctacgcaaataaactagaaaatctagaagaaatggataaattcctggacacatacactgtcacaagactaaaccaggaagaagttgaatccctgattaaacccataacaagctctggaattgaggcaatagttaagagcctgccatccaaaaaaagtccaggaccagatggattcacagccgaattctaccagcagtacaaggaggagctggtaccattccttctgaaactattccaatcaatagaaaaagagggaatcctccctaactcattttatgaggccagtatcattctgataccaaagcctggcagagacacaacaaaaaaagagaattttagaccaatatccctgatgaacatcgatgcaaaaatcctcagtagaatactggcaaactgaatccagcagcacatcaaaaagcttatccaccatgatcaattgtgcttcatccctgggatgcaaggctggttcagcatacgcaaatcaataaacataatccagcatataaacagaaccaaagacaaaaaccacatgattatctcaatagatgcagaaaaggcctttgacaaaactcaacaacccttatgctaaaaactctcaataaattaggtattggtgggatgtatctcaaaataataggagctatttatgacaaacccacagccaatatcacactgaatgggcaaaaactggaaacattccctttgaaaactggcacaagacacggatgccctctctcaccactcctattcaacatagtgttggaagttctggccagggtaatcaggtagtagaaggaaataaagggtattcaattaggaaaagaggaagtcaaattgtccctgtttgcagatgacatgattgtatatttagaaaaccccatcgtctcagcccaaaatctccttaagctgataagcaacttcagcaaagtttcaggatacaaagtcaatgtgcaaaaatcacaagcattcttatacaccaataacagacaaacagagagccaaatcatgagtgaactcccattcacagttgcttcaaagagaataaaatacctaggaatccaacttacaagggatgtgaaggacctcttcaaggagaactacaaaccactgctcaatgaaacaaaagaggacacaaacaaatggaagaacatttcatgctcgtggataggaagaatcaatatcgtgaaaatggccatactgcccaaggtaatttatagattcaatgccatccccatcaagctaccaatgactttcttcacagaattggaaaaaactactttaaagttcataaggaaccaaaaaagagcccgcattgccaggtaaatcctaagccaaaagaacaaagctggaggcatcacgctacctgacttcaaactatactacaaggctacagtaaccaaaacagcatggtactggtaccaaaacagagatatagaccaatggaacagaccagagccctcagaaataataccacacatctacaaccatctgatctttgacaaacctgagaaaaacaagaaatggggaaaggattccctatttaataaacggtgctggaaaaatggctagccatatgtagaaagctgaaactggatcccttccttacaccttatacaaaaattaattcaagatggattaaagacttaaatgttagacctaaaaccataaaaaccctagaagaaaacctaggcaatactatttgggacataggcatgggcaaggacttcatgtctaaaacaccaaaagcaatggcaacaaaagccaacattgacaaatgggatctaattaaactcaagagcttctgcacagcaaaagaaactaccatcagagtgaacaggcaacctacagaatgggagaaaatttttgcaatctactcatctgacaaagggctaatatctagaatctacaatgaactcaaacaaatttacaagaaaaaaacaaccccatcaaaaagtgggcaaaggatatgaacagacacttttcaaaagaagacatttatgcagccaacagacacatgaaaaaatgctcatcatcactggccatcagagaaatgcaaatcaaaaccacaatgagataccctctcacaccagttagaatggtgatcattaaaaagtcaggagacaacaggtgctgcagaggatgtggagaaatgggaacacttttccactgttggtgggactgtaaactagttcaaccatgtgtaagacagtgtggtgattcctcaaggatctagaactagaaataccatttgacccagccatcccattagtgggtatatacccaaaggattataaatcatgctgctatacagacacatgcacacatatgtttattgcggcactgttcacaatagcaaagacttggaaccaacccagatgtccatcagtaatagactggattaagaaaatgtggcacatatacaccatggaatactatgcagccataaaaaaggatgagttaatgtcctttgtagggacatagatgaagctggaaaccatcattctcagcaaactgtcgcagggaaaaaaaacaaaacactgcatgttctcactcataggtgggaattgaacaatgagaactcttggacacaggaatgtgaacatcacacactggggcctgttgtggggtggggggaggggggagggatagcattaggagaaatacctaatgtaaatggcgagttaatgggtgcagtacaccaacatggcacatgtatacatatgtaacaaacctgcacgttgtgcacatgtacccaagaacttaaagtataaaaaaaaaatttatatatcagggcaattaaaatcgttgttaaaaatttactgtaaatgatttttaacagcagcctaatttattgtatgcatgtactattatttacttaatataaatgcctaataatagtggaatgataacctattcgcttagccttgtgataaatacctttgtggttaaatttgtattctagattatttcttttttttttttttttttgagacggagtctcgctctgtctcccaggctggagtgcagtggcgccatctcaacttgctgcaagctccgcctcccaggttcacatcattcttgtgcctcagcctcccgagtagctgagactacaggcgcctgccaccatgccccgctattttttttggtatttttagtagagacagggtttcaccgtgttagccaggatggtctcgatctcctgaccttgtgatccacccgccttggcctcccaaagtgctaggatcacaggcgtgagccactgcgcccggcctagattatttctttaaagtaaattttcaacagtggaattaattgggccaaaaggtacaggttttttttttcccacaaatgtagctaaactgctttctatctaaccatgttctaccaatttgtatttaatgtagtttcactctgacacattcatattttttatctggatagtttgcagaggggagaacttgataaaattaacattcagtttggtaaagatgatgcacagtattttttagattttttttttttttttttttttgagacaagagtcttgctctgttacccaggctggagtgcagtggcacaatcttggctcactgcagcctccacctcccaggcataagcaattctcccacctcaacctccggagtagctgggattacaggtgcacgccaccatacctggctaatttttgtattttttgtagagacagggtttcgccatgttgcccaggctggtctggaactcctgagcttaagtgatccgcctgcctcggactcccaaagtgctgggattacaggcctgagctgcctcacctggctggataaatttttaatattcttaacatttataattgcatacaaaaaaccctagcaatttgtctcaaatttcatgcataggatcaaaagaaaatgttttatatgactcataagttatcctgaggaaccagataatgataccctggcttactgttaattttctaatttgttacactattaaactaagagacaataacatcttcatagctgaaaattctatttcagatttttgattcagtttgaatttacatatttgtatttttagaactagtttattatttttttgttaggtgatgaatcaagattggttctctaagttattttaatatagtaaactttgaaattgctttgggcaagagagattatatttattgagaaattaaaataaaaggaggtatgtggtcttttttagttaatttttttgttgtggcaaaaatataaaatttatcatctgaaccatttttaagtatacagctcagtagtattataagcatatttaggtcattatgaacagatctccagaactttagcctcctgaaaagatccagagacccctggagcttctcctactatactttgaagaacctctatcttagagaatatattacttcatctggaaaagacagactcacagagaactctagaaatatagtcttttaaaacatatcatctaaaagattaataattctttttatcatcttatccggtctgtgttcatatttccccattgtctaataatgttttcgtaattttttgaaattaggagccaaaccaggttcacacacgttacatttggtggttgatataccttttatttttttttaaatttatttttctgagatgaagtcttgctctgtcacccaggctgaagtacagtgcatgatctcagctcacggcaacttctgcctccccagttcaagtgattctcctgtctcagcctcccgagtagctaggattacaggcgcgtgccaccacgcctggctaattttttatatttttggtagagacagggtttcaccatgttggccaagctggtcttgaactcctgatctcaggtgatctgcctgcctcggcctcccaaagtgttgggattacaggcgtgaaccactgggcctgcccttgatatgccttttaaattttaatctattgattgtctctttgtttataatttatttgttgaagaaacagggtcatttgttctacataattttcctcattctggttttggctgagtgtatctctggtaaaatttaacatgtttttcagttctctgtatttccagtaaatttataggtagagacaggcttgattagatttactttcaattcttttttggcaagattcctagttggtgatgtgtatttctttacatcaagaagatgtgttttgtgatgttaaaatcaaacagtttagctgttgtcagattgattcatccgttgtaaaattcccaattaacttttctctaatgatagcatctattgctaattgttgcctcattgcagtatattagtaggtgttgtaaaaggtgatattccttctccagccttctgaatttattggctgggattcttcaggaaagaagacctcttcctcatataccactttattaccctgaaagtatttatacaggaaaggccaaaataaaatgggactttttttttctttttacctacatattcccagaataattaatttgtgccttaggagcctcaaaacatgactagagttttgtttgtttgtttagaattataaactcatggatttttgcctcccattcattttcgatgttcaaattattctttctttgaccagtggcagcttatttatgttggctcctttgtccttggcacaatcccagtggtctgtagtagtttcctaaaatatacaagatgaagctcatcttgtatattttcttccccagatttagaatcagaattctaattcctttcagtgggaaatggtatttagagattataatctgggtgatatttttgtatattcctacaatgttgtcattgtttataggccttttgatggacagaactaggaaaactttatagaaagagaaaaataattcatgtgttccagatgctatttcttttttttttttttttttttgagacggagtctcgctctgtcgcccaggctggactgcggactgcagtggcgcaatctcggctcactgcaagctccgcttcccgggttcacgccattctcctgcctcagcctccccagtagctgggactacaggcgcccgccaccgcgcccggctaattttttgtatttttagtagagacggggtttcaccttgttagccaggatggtctcgatctcctgacctcatgatccacccgcctcggcctcccaaagtgctgggattacaggcgtgagccaccgcgcccggcctgctatttctaactcagataaaagatgataagagtttttacttcattttaaaatttacatttgtatttttcctcaacatgtaaaatgtggttctaacaataagattattgaattgcaaaatctggggcaggaactattgtattatattagaagattggagggttacaaatacaaatgcctaaaggggccagacagccaaatgaatatatcaggcctgttatgaaaatcatccgggaatggtggggattaataagccagagagcatatatcccatctaaaggaggcatctgtgacttgattctagctgatttttgccaagagggaatatgggcatggtactgcttggttttttcatttttaaaaagaagacgtaatccctgcactttgggaggccaaggcaggcagatcatgaggtcaggagatggagaccatcctggctaacacggtgaaaccccgtctctactaaaaatgtaaaaaattagttgggcatggtggcacgcgcctgtagtcccagctacttgggaggctgaggcgggagaattgcttgaacctggtaggtggaggttgcagtgagctgaaatcgtgccactgcactccagctggggcaacagagcaagactccatctcaaaaaagaaaaaaaagaagatgtaaatccaaatattttatgtgaaattatttagcttttaaatattgacaatactattgacaaactaagtcaaagttttaaaaaggacttttggaccaaacaatgatttcttccataggttattagtttgtaacctcttgtgagaaagatctaaggattttccagacctcagacaatctgaaaaatatattgggaaagagtatgagaaagggaacttaatcatcttggttttgctgatcatgattacatttatttatctgacttttattttttagccttaaaaattaaaatagccctattgaccattaattttgctttttatttctttttgcacattcaaaataggaacttacaatgtctcagaaaaatggtgggaatgttcttcagatgatgtatgagaaacctgaacgatggtcttttaccttccaaacatatgcctgtctcagtcgaataagagctcagcttgcctctctgaatggcaagctcaaagatgcagagaaacctgtattattttttgaacgatctgtgtatagtgacaggtatgtataaatggcttgtacgtggccatttgaagtttttatcttagaactggactttttttttttttttaatgtttcctgggaattagtaataatgaatggctgagctggggatttaagatggaaaatgacatttaaatccctcagcagtctggtactaatggcattagggaagttattgcatttataatcctcagcttccatagaaactgttgggaatatggtggtgcccatttcatttaaatttgcagagaagttgtttttccctctaacccttttaaaattctcatctgctctggttaaatctggatctatatcctagactcttacctggatcaagaagataaaagtctctaaggggccttagaattgccctacttatgctaggattcttttgacctccaaagttagctcagaacagaggttctcaaacatttgatctcagggcccttttcaattcttaataactatcgaggtgtccaaagagcatgtcctattgatacttaacattactagaaattaagatgcacaaaaatgatttaaaattagcaataataaattcattacatattaatataaatacatttgacaaaaagttatattttctaaaataaaaagtagctagaagaatatcattgctttacatttttgcagatatctttaatgcctcacttattaaaagacagctggatttttatttatgcttctgtatttaatctgttatggtatgtttgtttgtttgaagtatattggtatatgaagtaatctggcctctcacagaaccccttagaagatcttggggacttaatggggtcctcactccgtattttgagaaccattggccaaaaacatgatggaaagactcttgtctttttctgctttccacggcactatgtgccactggatttaggagaatgtttcatgttcctgttctcttttttatttctttgttgtttttttttgaaatgatacatgtgttgatgaagactctcttttaggtatatttttgcatctaatttgtatgaatctgaatgcatgaatgagacagagtggacaatttatcaagactggcatgactggatgaataaccaatttggccaaagccttgaattggatggaatcatttatcttcaagccactccagaggtaaaacccaataaaaatgtgtttcactgaaaatttaaagaaatatttagaactcttttcagtggtatataatgagggcaatttagtttaactccagcctcccaacctcccactccccacctctaaattagaaacttgtaactgtgtagatagaagcattcttttttctcagcaaactggaatcccagactgggcaagttgctgttttaggctctttgtgcttcctcaattcttttttattttactcattatttctttctaacatttgcagactcttctcattcatcacagttaaagtaatgaatgtggtcaagcaactcctagaatataggcttcatgaggtgggaccttgggcattttgattactattgaatttccattgcctagaacacccagtgctgggcactgttggagcatatagtaggagctcagtaaatatttactgaatgaatggcaatgttgatggaggtccatatcaagaaatattttattatggttgtttgtgccttggaatgagtggataatggcagctatcgttgggaaaagacttagaggacccttgccattttccattaagggagctcacttgaaaaggtgctttttgtgataggttgtaacatagctattctagttacatatgatgttatataatgaatacaggatgaccaaatagatgcctttcataaaactaacctaaatattaagatcttacatttaatcagaagctttctggttttggtgcgtgcatttctattgtttctgttttttaattctcattttttccttaagtcacagggtaggcactgatgaatgtaaatgttatgacttctggcctaaaattagaatactgtgttgctgtcgaagctgggttttcaaagaaattaggtttcctattccaacggatgattttgttcttcattaagtaaagattttgttcttcattaagcaaggatttagcaattttttagcaatttcaaaagtgaattttgaaattcacttttatttttgaatttttttgtttttaattacaaaaatagtaaataaaaatgtgaaaaagaacataaggaatatgaataatttcattttgcttgaaacatttatagtcactattaagctagaatttagcaaatataataattttgaaattcacttttatttttgaaaaggtttcttaaagttatgaaaatagtacaaacaccaaaaacataaataatactaataatttcattttgatactgataatttcatcagtattgtttctgatatctttggatgaaaggattgtttaattattgaaaagagaatttagagtagagtttgaaacacagtttgtatgctgccatggtcttatgcatgtcatttaggttggaggcttttatttcttggaatgcatgaagagtttctcatggtatatgagcccccacaaattatacgaaattttttatgtatgtgtgcttttgggggaccgttatctagagctgcactgtccaatgtggctatttaaatttagggttattaaaattaaataaaatttagatatttagttccttggtcaccacactagccatatttcaagtgcttaaaaaccacaggtggctggtggctaccttatttgataatgcagatataggacaggcataaaacattccaaagttgttttggttgtgctgatatagagttttcatcacattaagaaccactgtctttagtggttttatgtgaactgaacatagatattttgtaatcaaggttggttaacagcaaagtaagattatgtttatagattggcataccttttagctgttgtctctgaacattttaagtagatgtttaatttttttctcctttttatcaaacttagtatatttcatgtgtggatggataccaaaaatttataggcttatttttgaaagtactgcttggcttagagccaccaagtggctgaaaagctcatggagggaaaaatgaattatttcagcttttaagaagtaataagtagagattttggctagcgtgagtagagagacacagaaaagaaaattttgatggcagcagacaagaataattgttccctgcctttttcttccatctcttattacttgcttttagacatgcttacatagaatatatttacggggaagaaatgaagagcaaggcattcctcttgaatatttagagaagcttcattataaacatgaaagctggctcctgcataggacactgaagtaagacttatttttatttactattcattttaaatacctttgttacctttgttaaattttaatctaaaatttggaagatatgactagcaatatgtaaaatttccagtcgttttgcttattggtatcttccagaactaggtatagattttcattctcttgattgcaatgagatcctatttacttaaagtttttataactagtatcccttggtggtattgatagcgtaatatgtgaaatttcactttaagtgataaagtaggaatatatctgaacattatttaggtactctttcagaaagaattttgacttgggagattgtatagcgtggttgttgagaggatagactttgttattagtcaga

SEQ ID NO: 345 - DNA, 2268 bp, Homo sapiens
  source 1..2268: mol_type = other DNA
attggtgggatgagcaatccgagttcccggatgagggaacattctgcagtataaagggagcagggaaggcgggagacagcgcagtttgaatcgcggtgcgacgaaggagtaggtggtgggatctcaccgtgggtccgattagccttttctctgccttgcttgcttgagcttcagcggaattcgaaatggtaaacttcgcagagacgctcgatgactccgcgggtttttgccggcgagagaaaaacccgttacacagagggatgggggtgaagtggcgacggttgggaacgcgcggagacaggatttagaagagtggggggaggtgttttgtcggctgctagcggagcagcctcggatctcgcggcgggcggcgacggttgggtggcgcgcgcagcgccgctgggggccggcgggcggaggcgcgcggccgtggcgagcgcgcggcggggggcgaacgggcggggtcgcccctgcggcgcgccgcgggccggagaccccggcagggtgcggggacgcgctcgcggcgggacgcgccgcggtgggggatgggcgcgccgccttggtaattctatattctccgttcctcctccgctcgcgggcgtgtgcgcgccgcaggctggcggtaaggctggaaaggactccggaaaggccaagacaaaggcggtttcccgctcgcagagagccggcttgcaggtcagtagttgttcgtgcagtctgggagtcatgatgtttttctttgcatttccttttttgttattcatcgctctcgatgggcgttttgtgtatgcgtgggtgatgcggtgtcgcgacttgggctgcccatacgataaatatgggggggaggaatcacgtgtttcgatgtcgggacgcgttgctgcgcccgtgccccttgctttggcgcgcatataatttccccatctctagttctcatttttgtgcatttatgtttgtgtatgcttaaaatttaagttcccagtgggccgtattcatcgacacctaaaatctaggacgaccagtcatggacgtgtgggcgcgactgccgctgtgtacagcgcagccatcctggagtacctcaccgcagaggtaaatgggtgaacgcctataatccggagaaggtttggggggcggggaggcggcaagagggaaggaggaaagtgatgcaagaaaactcccaggccctgaacgcggcgagaggcctaagagaacgctagagggagctggtgttcaacaaggatcctactgagcttgagttctctgctcttggaattaaaattgcgtgccccctgtatatcttgccagtcagatagtgaggaacgattccagttggtagatctgcgtttgtgagggttttattctgttctctgaatcttggccaaaggaaagttggaaggcaactgacagattctgccttttaggtacttgaactggcaggaaatgcatcaaaagacttaaaggtaaagcgtattacccctcgtcacttgcaacttgctattcgtggagatgaagaattggattctctcatcaaggctacaattgctggtggtggtatgttaacttctaacattttaaaaaatttcttcagaggaaggaattttttgctgcttttaattagtttttccaggagaggaaatttaagtatattttcaatgatggaagtatggttgtatcatgaaatttgatttatatgtataactcaatgaatttttacttcatacttgagctgcatgtttttaaagatacctttcaagttgaacagtatacactttcttggtttcaaatactgtgattttttaaaaaatcttaagtagaattaattcctgtcactctcctaggtgtcattccacacatccacaaatctctgattgggaagaaaggacaacagaagactgtctaaaggatgcctggattccttgttatctcaggactctaaatactctaacagctgtccagtgttggtgattccagtggactgtatctctgtgaaaaacacaattttgcctttttgtaattctatttgagcaagttggaagtttaattagctttccaaccaaccaaatttctgcattcgagtcttaaccatatttaagtgttactgtggcttcaaagaagctattgattctgaagtagtgggttttgattgagttgactgtttttaaaaaactgtttggattttaattgtgatgcagaagttatagtaacaaacatttggttttgtacagacattatttccactctggtggataagttcaataaaggtcatatcccaaa

SEQ ID NO: 346 - DNA, 32742 bp, Homo sapiens
  source 1..32742: mol_type = other DNA
taaatttaaaggcggggcggcctgtgagccctgaagtgccggccgcggagggtcctggccattttcctgggaccagttcagcctgataggatggcggaggaaggagccgtggccgtctgcgtgcgagtgcggccgctgaacagcaggtaggggggccacaccacggcccggtgcccgctgggcctgcggcgccgccctgagccggaggggcgaggcctacgatgtttccaggagccgctgcttcccggctctgctgtctagtgactcggctgctggccatcgtttcagggtctgtaaagtgacaggggaggatcggagatctagaagatactttccagctgcgagattcacttaaatttaactcagtctcgctgacatacagaccttcccttctgtgctgctctgccttgcggcatctgctcctccctgccccattccccgcctagagaagtcgtatgggaccgtgccttcctggccctcatcacagttagtcattttacacctaactgctgtctccagaccctctgaagacaagggctagtctgtcttgtcacattacattcaatcgtcactcaagatcattctacaaatatttatcaatttttttttagtgactttgtacaacacagacactcccgtcattgcccagtggctcttccattctaatgggacgagacagaaagtaaagttgaaaatgtaggatgttaagtggtgatatgtaggtaataagtgctagggagaaaaagcaggaagaggaataaatgaaatcggtttgcttcactagcttctggccctcgacccgaaatgctaacactttgtgtgtgtgagaaatttttattgaacacggggtttaataaatgcaaataccaagatcaggaatttcctatttttgaggagctcattatctaatgccttaaacggctacataaagaaaccattaggataccttttgacaagtgttatgatgggcaggtagagaatgtttgctagaggagttattagcccatcagagacgaaagcttcccgtggggtgaactggtgtcagaaaagtcttgacgcttttcatgagtgaaataatccctatgttacttaatggaaagggaagtcagagtattccaggcacagagaggttacatctgtcatttggggaagaccttcaggtagagcttaggatgtatctaggaattcagaggaaaatggaagagagaaatgacatgatctaggactcgtgccctgctgaggatttcataagtttccaaaaggttttaagaattttaagcaagacagacataatcagagttgcattttgaatccatccctttgtttaccagtactgggggagagggtgagaatgaaagccttcacaagaaaacacttttgaggcggcagaaggtcactgaagctccatttaagagttgaatcctcaaagatggactttctgtcattctcttatgttactatctttcaaaatattctttagcaggtgaaatcttttcaattattcctcctatgacatgacttttatgactggttaaaatgcggtgtttttattcttttagagaagaatcacttggagaaactgcccaagtttactggaaaactgacaataatgtcatttatcaagttgatggaagtaaatccttcaattttggtaagcttataatagcatcaaaagttaccttgttatccttttgctattaaaagtacaaaaggcttatcaataatattagatttgtcactaaagattagactaagccttctataaactgcttcactggaaacaaaattgtttatccatcatgtatttaagtaaggtaaccaattggcatttaaaacagttataatcacagttatctaatttgcatctaggtagattccagacccccatgtgcaaacactataccttattgcctcttgaaagaacatagaaaagttgacttgtagtgtattttttgtgtgtgaaaatgaactcattttaccttagggaagggtattttcagagaaccaaaaagttgaaaaaaatactgtgtcttaaatagttgatcatcctacattctgacagttttacttttgggaataattactaatttggaatgaaaacacagtggactcatttgatttaacttctgtgttgttgttgttgttgttgttgtttagatcgtgtctttcatggtaatgaaactaccaaaaatgtgtatgaagaaatagcagcaccaatcatcgattctgccatacaaggctacaatggtttgtattcactcaatgctgcagaaacattttagtcttgggcgtctgtgcaacaagcatgcatagttttacccattataggtttgtttttaatctttgcgtatgtgtgttttgttttttgcaggtactatatttgcctatggacagactgcttcaggaaaaacatataccatgatgggttcagaagatcatttgggagttatacccagggcaattcatgacattttccaaaaaattaagaaggtaagtaacttaactggatttctagtacgtacaggtaaaactagtaaaaactgggtaccagtcttagtgtatttctcttgtaaagatgaaaggaagtagatttacagttattgtttgattatccatggggaaagaagaaaggcatagcatagattcacttttatctccacaacttactttataaagcttaaagttcttttattctttctcttgaattctgcaacaataatactctcaacaaaaagtaggcattaaggaacaagaaaatgttatcagaatggttagctccacctaaccatttaactatcagtgattataaaggaacagtagaaagtggatgtaggtaaaaaaagaagggaagcagaaagccagaataggcaaccgagttagttggtttcaaattagcatttttattaaaataagaacatcttttgagagggttttattttgagcctagagtttgagcctagagttggtgttctcccagctttatggtacttcacttttcattatttctgtaacgatgcttttatatttttgtgttcattattttgtcaacagtagaaccaaggggtttcttagtttgttttacatacattttacctctttaagcacatgagcatttagcattaggttttcacaattggatgcttcctggtgtttttatataattttttttcttctagtttcctgatagggaatttctcttacgtgtatcttacatggaaatatacaatgaaaccattacagatttactctgtggcactcaaaaaatgaaacctttaattattcgagaagatgtcaatgtgagtagcagacttaagggagctttaaaattgactgacttattgagattattgttcttgaatgtttacctttaatttctatagtttttaaagtgtctcctatttctatagtatgtgagggtttttttgaagtatttatattcatcttttaaacaatatgaatagttttaaaatactgacagctctaatattttggtttaagtgtaaaaatagcaagttggaagtatcaggttagaatttgttgtgctttggtatgtgaaataaattgtgggtattcatagaattatttgttacattcctacagaattatggttccatttgccacttttaactttcacaaatgaattctataatagtttgcaccttcttttgaaaagcaaacttgtgacttctatttctctaatctttccataattaaacttgtttcagaggaatgtgtatgttgctgatctcacagaagaagttgtatatacatcagaaatggctttgaaatggattacaaagggagaaagtaagactttatgctgtatttctttagaacacttgtaaaaactatcttttcaatcaagcacgtttggacctcaaatcatacttttttaagttaaaataaaaattattgtgtttctatggattttattatatatgcagctgaaatataactcatttttacagagagcaggcattatggagaaacaaaaatgaatcaaagaagcagtcgttctcataccatctttaggatggtaggtaattctatctatctgttagatctttccaagtaagaatgcactaatttttctacagcttgccttttctatctagattttggaaagcagagagaagggtgaaccttctaattgtgaaggatctgttaaggtatcccatttggtgagtattaatgaaccataataatgtactgtatgggccaaaacaaaatttaatttagttgctggatgtttggtttaataagaactgttaactaaactaaatgtgggaggaaatctacaaattgtctgcttagtcttgtcagtatcatcaaattcctagctaaaatgtcgtaggaaaaattcagaggatctttcttcctgttatgtcatggttgccatctcctaaaatttaaatgtcagggctatagggttataggaattgatgttttttctaaccactaatgcagtagaatttttttctatacacatttaacactttagatcatcttagaatttgagggtctttttgtaaaatctcagccaatgtaatttagacttatgtgatcaacaaaaatctaggttggatggttaaaaagtaatcacattactttaggttttacttaagtacaacaataaaatatattttgtattgtaaacgtagtactttagactgtaaatccattgaggagtgatactgcattcatcctggtagccccaacacattatacctattttatgtctaatatagatttgctgaataagcgaatatatgcattatgcaaacattcctatattccacattagtaaaccttcacttccttctttccacactaaattattgctgtttctttcttgctccttttctatcttttaccatattgctttattctgcatttttagggcctaaattctttagcttgatgtgggatatgatttaagattatttgattagaaaacttcagggaaaaaagcaatctataatatgtttattcattttcagattttataaaattagattattaattacttaatattcaatcctaatttcaccttagctattttgctataaaattgtataacttattttagtagactttaatcttgttttaatttaacaataaaaaaccaaaccctaacctctttagttttctcatccaagactgtgatatttcatataattttaacttttaataatttagctttaatactcttggcatattcagtgatctacttgatgattttcctcatgttacgtgatgctctgtcatttgtgttccatctgttccaaccctccagcctacccacttactctaagaatcttcttggaaagaagtctctaaagagtcatctctgtctctttagaggtggctcttttctgattatctcctggccttggtgggatgataatatccagtttctcttagctgtactcctctgttttctaccctggcttctttttccctaccctcctaaaaaaataattaaaaaaaaaaaaacttggaggtattctgtgacgtttcttactcaagttcttgctctcaaatgttctgtcatcatttccatgttgatgactgccaaatattttacctatagtctctgaattctaattcatgtcttcctaaagatggttataattgtgtcccatcattatctcaaactttaatatgtctaaaacgaaactattttcttcctaccatagtgaatattccttatttccagtaaaaccagcattatcctagctgcctaagctggaaacctaagtcaattttgactcatctttttctgcctttctctttgtccacttgtcccatttcttactgatcctacctttaaacatttccatgggtgctacactcatttactttctcatctctcttgaattactatgtcagtctcctggaaccttgtctccatgacccttgtctttgtttcttgaagtcatcataaggatttcgaatatactaaccattgcttttgtatatcacttcctggggcaagatttggccactcttaaccaatctaactttatttccttctgctctacatgaactcctccctcatagattgggcctctgagtatctttgaatatgaatgcttgttctcatctttaaccttcactcatgctgccttcattaccactttgcccttttattatgtatctgtgtcatctgtagtggacactgtgcaagaaaaattagcctccttaactggtaatacatatttacctgcctagtctcaaaaatctccacagagagaaataacgtaaagctttgactttctttcaaatcactcacaatatttactaagttgttattgtcttctgagcatggtgttgggctctgagattaaaaaaacaataaacaagacaccccttcactgcttctcttacaagcagtctcctctgccacctccctaacccaagctggtattatctctcaccgagattcctgccccagctgcctgatggggctgcctgcagctgctcttgccccttcccaatccatcctccacccagtagtcatagtggatccattgtgagagtcattgctgagctttatgcaaggttctctttttttttccagttttacgtttttttatttttatttatttttttattatactttaagttttagggtacatgtgcacaacatgcacgtttgttacatatgtatacatgtgccatgttggtatactgcacccattaactcgtcatttacattaggtatatctcctaatgctatccccccctccccccaccccacaacaggccccggtgtgtgatgttccccttcctgtgtccacgtgttctcattgttcagttccaacctatgagtgagaacatgcggtgtttggttttttgtccttgcgatagtttgctgagaatgatggtttccagcttcatccatgtccctacaaaggacatgaactcatcattttttatggctgcatagaatttcatggtgtatatgtgccacattttcttaatccagtctaccattgttggacatttgggttggttccaagtctttgctattgtgaatagtgctacaataaatatacgtgtgcatgtgtctttatagcagcatgattttataatcctttgggtatatacccagtaatgggatggctgggtcaaatggtatttctagttctagatccctgaggaatcaccacactgtcttccacaatggctgaagtagtttacagtcccaccaacagtgtaaaagtgttcctatttctccacatcctctccagcacctgttgttccctgactttttaacgattgccattctaactggtgtgagatggtatctcattgtggttttgatttgcatttctctgatggccagtgatgatgagcattttttcgtgtgtcttttggctgcataaatgtcttcttttgagaagtgtctgttcatatccttcgcccacttgtcgatgtggttgtttgttttttttttttctaaatttgtttgagttctttatatattctggatattagccctttgtcagatgagtagattgcaaaaattttctccctttctataggttgcctgttcactctgatggtagtttcttttgctgtacagaagctctttagtttacttagatcccattttgtcaattttggcttttgttgtcattgcttttggtgttttagacatgaagtccttgcccatgcctatgtcctgaatggtattgcctaggttttcttctagggtttttatggttttaggtctcacatttaagtctttaatccatcttgaattaatttttgtataaggtgtaaggaagggatctggtttcagctttctacatatggctagccagttttcccagcaccatttattaaataggcaatcctttctccatttcttgtttttatcaggtttgtcaaagatcagatagttgtagatatgtggcattatttctgagggctctgttcctttccattggtctatatctctgttttggtactagtaccatgctgttttggttactgtagccttgtagtatagtttgaagtcaggtagcatgatgcctccagctttgctcttttggcttaggattgacttggcaatgcgggctcttttttggttccatatgaaccttaaagtagttttttccagttctgtgaagaaaagtcattggtagctgatggggatggcaatgaatctataaattaccttgggcagtatggccattttcacgatattgattcttcctacccatgagcatggaatgttcttccatttgtttgtatcctcttttatttccttgagcagtggtttgtagttctccttgaagaggtccttcacatcccttataagttggattcctaggtattttattctctttgaagcaattgtgaatgggaattcactcatgatttgtctctctgtttgtctgttattggtgtataagaatgcttgtgatttttgcacattgattttgtatcctgagactttgctgaagttgcttatcagcctaaggagattttgggctgagacgatggggttttctagatacacaatcatgtcatctgcaaacagggacaatttgacttcctcttttcctaattgaataccctttatttcctcctcctgcctgattgctctggccagaacttccaacactatgttgaataggagtggtgagagagggcatccttgtcttgtgccagtttttaaagggaatgcttcgagtttttgcccattcagtatgatattgcctgtgggtttgtcatagatagctgttattattttgagatacgtcccatcaatacctaacttattgagagtttttagcatgaagtgttgttgaattttgttaaaggccttttctgcatctattgagataatcatgtggtttttgtctttggttctgtttataggctggattacgtttattgatttttgtatgttaaaccagccttgcatcccagagatgaagcccacttgatcatggtggataagctttttgatgtgctgctggattctgtttgccagtattttattgaggatttttgtatcgatgttcatcaggggtattggtctgaaattctcttttgttgttgtgtctctgccaggctttggtttcaggatgatgctggcctcataaaatgagttagggaggattcccttgttttgtattgattagaatagtttcagaaggaatggtaccagctcctcctagtacctctggtagaattcggctgtgaatccatctggtcctgggcttcttttggttggtaggctgttaattattgcctcaatttcagagcctgttttggtctattcagagattcacttcttcctgatttagtcttgggagggtgtatgtgtccagcaatttatccatttcttctagattttctagtttatttgcatagaggtgtttatagtattctctgatggtagtttgtatttctgtgggatcggtgatgatatcccctttatcattttttattgggtctatttgattcttctctcttttcttctttattagtcttgctagcggtctatcaattttgttggtcttttcaaaaaaccagctcctggattcattgattttttgaagggttttttgtgtctctgtctccttcagttctgctctgatcttagttattgcttgccgtctgctagcttttgaatgtgtttgatcttgcttttctagttcttttaattgtgatgttagggtgtcaattttagatctttcctgctttctcttgtgggcgtttagtgctataagtttccctctacacactgctttaaatgtgtcccagagattctggtatgttgtgtctttgttctcattggtttcaaagaacatctttatttctgccttcattttgttatgtacccagtagtcattcaggagcaggttgttcagtttccatgcagttgagcggttttgagtgagtttcttaatcctgagttctagtttgattgcactgtggtctgagagacagtttgttatcatttctgttcttttacatttgctgaggagtgctttacttccaactatgtggtcaattttggaataagtgtgatgtgctgagaagaatgtatattctgttgatttggggtggagagttctatagatgtctattaggtctgcttggtgcagagctgagttcaattcctggatatctttgttaactttctgtctcgttgatctgtctaacgttgacagtggggtgttaaagtctcccattattattgtgtgggagtctaagtctctttgtaggtctctgaggacttgctttatgaatctgggtgctcctgtattgggtgcatatatatttaggatagttagctcttcttgttgaattgatccctttaccattatgtaatggccttctttgtctcttttgatctttgttggtttaaagtctgttttatcagagactaggattgcaacccctgcctttttttgttttccatttgcttggtagatcttcctccatccctttattttgagcctatgtgtgtctctgcacatgagatgggtttcctgaatacagcacactgatgggtcttgactatccaatttgccagtctgtgtcttttcattggagcatttagcctatttacatttaaagttaatattgttatgtgtgaatttgatcctgtcattatgatgttagctgattattttgcttgttagttgatgcagtttcttcctagcctcaatggtctttacaatttggcatgtttttgcagtggctattaccggttgttcctttccatgtttagtgcttccttcaggagctcttgtaaggcaggcctggtggtgacaaaatctctcagcatttgcttgtctgtaaagtattttatttctccttcacttatgaagcttagtttggctggatatgaaattctgggttgaatattcttttctttaagaatgttgaatattggcccccactctcttctggcttgtagagtttctgctgagagatcagctgttagtctgatgggcttccctttgtgggtagcctgacctttctctctggctgcccttaacattttttccttcatttcaactttggtgaatctgacaattatgtgtcttggagttgctcttcttgaggagtatctttgtggcattctctgtatttcctgaatttgataaaacgtaatgaacaaacctccaagaaatatgggactatgtgaaaagaccaaatctacgtctgattggtgtgcctgaaagtgacagggagaatggaacaaagtaggaaaacactctgcaggatattatccaggagaacttccccaatctagcaaggcagggttctattactcccttgcataaagccctgcaatggcttctcattgaatataaacatttcagagttttagatctcacttaaaaagtcctgcataatctggcccctgtctacttctcttattctgtcttttcctgtcttcacttcaccaactgtgccacactgccttttctatttttttgaacacactgagcacattctgctttgtgactaagtgttttggctattctttttgtctagactactgtttcccttgatctttttgggaccagcttcctcttctcaggtcattcagatcgcagcttaatgacaagccttccactgctatccagtcctatgaacctaaagctactggccccttttccagctctatttaaataatctctgttacacttatcacaacatgtttcttatttgtctttttatctcttcttaccagcctcctcctctatgtagaatgtaagctccatgagagcagagaccttatttatttgtagccctagcacctgatgtacttcctggagcataataagcagccacttcttttcagtaatatttgtgaaatgaaagagaggtccagctcttaaagatgccacagtaaagtcatggtattgctacagcatagtacagctagcatgcatgactagcccaacaaaataagtgctataaatgtaagtcgtatctataagtcatgtttataaagatttctggttatgcagttcaaggagcagttcatctgaaatctggcggggaggaaggataaagtaggcaaagctatgctgaggagataatctttgtgcctggttcttgaataaagaataaggacagaatagaacattagaactaactgaataaaggaaatagcaaaaagctggtgcttggaggtgtagaagtacatggggtgtttggggaatagtgagtagttcagctagaggtaagaataagggatggataaatacaaagttggagcagtgcaagtgccagcttataaagaattatatttgccatagtaagtttttggaccttgtataggaaacagaacctatactggtggcattatggaagatataaagaaaggaacagatagagaacagtttgactcagagaaaaaagggaatgcctaaacagtagcatgggagacatggatacagatcgaatattcagatataccatgtattaaaaatgttctttcagtagtttgaattttattatttcaaattatctgccctaaggatttatttttatctatcttacagaatttggttgatcttgcaggcagtgaaagagctgctcaaacaggcgctgcaggtaattaaaactcatgaaatatgttagtcttaatgtcttcctattttacaggtttaaaaagtactaccaggcatttttagaaattgataaagtaattatattcattattaataataatgaatcattaattgtgattttctgataaaagtttaacatagaaatcagcatctgtatctgcttaatttttattttagtctacaatagcatcaattaaaaaatgaaaattatacaattgatgggattgtacagcaggaaagcccatgagaattccataaaaaccatttaaactttcaaaataaggaaattaagaaagataatgtggtacaaaattaatatgcagatattaatttttaaaagttaaaatattaataaaaacaagttaaaatatttagtagacaaaaagactccatttataataacctaaaagatgtgatatctaggaagaaactcaacaaagatttgtacaagactgatataaagaaaacttttttttttttttttttctaaggcagactctcactctgtctcccaggctggagtgcagtggcacgatctcagctcaatgcaacctccacctcctgggctcaagcaattctcatgcctcagcctcccaagtagctgggattacagacatgcaccatcacgcccagctaatttttgtatttttagtagagacagagtttcgccatgttggtcaggctggtctccaactcttggcctcaagtgacccgcccacctcggcctcccaaagttctgggattacaagtgtgagccaccacacccggcctaagaaaacttgtaaatcagacttgaaggacacaaacaaatacttgaaaaaatggagaagcatacttaaatggaaaagattcaaaatcacaaggatatcaggcctctgtgttaatttctagatttaacacaatcctaataagactatcaagagtacattttcatgtttaaattaggtaagatgattttaaaatttgtatggaaacataaaaacagacaagagtagccaggaaaattccaaaaagcagaaagtggaatttaagattttactatcttactataagatagtaaaacatattataatgccatagtaattaaaactgtgtgaattgtcagcccagtgaaatagaatagaaaatccatcaagagtcccaaatacatacagaagttagaatacaataaagatggtccttcaaatttgtaaagaaaagatagattattcattaattgatagccatttgggaaaaaaaattaagtcggatccatatatcatacaccaaggaatgcattataagtagctcaaaaatttcaatataaaaaaactaaaaattgttggaagtcaacttacagtgggaaaacccttttgtaactgatacaaagtccagatgccttaaaagcttaaaagaaaccaacaaaaaactgggcaaaggatataaatgaatagttcataatgcttaaatggtttagcttgcacctgcactcttgccattagaagagctgctgatccaaggaagattagaagtttgttcaacagacttgagctcattctgcaacctattgtagagccactcaactgagcctagcctacatccaccaaaccagtccatcctcagacctgtgaacaaaaaataaatgcttgttttagccggttggttaggtagtaatgttaaagcaatagctaattaatgcacctgtgaaataacatctgttcaaaattatttttacaattttttttgtataggcagtagactgaaaacctacatgtccttcaacaggggatggggtgggtgaatgaagtctgatgcagccgtaaaatggaattttatactttaaaaaagaatgaaaaagatcagtgtttaccgatatggaaatttttccaagatatgttgccaagtgagaaaaagcaaagtgcaaaatagtatgtatggactgttactattgatatcagtgaagaaggaaggaaataaatacatacgaacttgtatttttaaaaatctctaaagaaaaaaactaataacagtggtttcctggtagaggtataggaactggttgaatggggataaaagtggaagggagctttttcaaagtgtactttttttttaaactttttgaaccgtgtgagcatattaacaatttaaaaataagaaattagaggctaatttggttgtaagttcatagttgcctatatttagatgttggaaaaaaattgatttgaactgaagagctagagaagctctttcaggaaacaggttttttttccctgcattcttccctccctcttcatttttttctttttactatttttctcaggtaataacctttctgattcacttgaagtgggaccaatagggagagagctctttctaccactgatattaaagatgggctcatgtctaaaccagagcatagactttagcatctgccctctaatttctctcattaacttagtgataaataagtttatcatctagaaaaggagtcaagtttagttttcatatttgtttaataaattcaggtgtgcggctcaaggaaggctgtaatataaatcgaagcttatttattttgggacaagtgatcaagaaacttagtgatggacaagttgggtaagtttatcccgttgtgcacttacctactgattcttatatttttcattaggttgaacattgcaacatttcgatgacactcaaatgtactgatttcttccatatattcaaaaacttatacatatgattataatctactgaatttactttctgttttaaatattttttagtagttttaatctgcctcatataacttgtaaactaatttttgaaactctggctgatttaagagttctgcattaaaaaccaactactttattatataaacgttctcaatctttttctcctgtaaacttattccttgctaagtggtttcataaattatcgagatagcaagttaacacgaattctccagaattccttgggaggaaatgcaaagacacgtattatctgcacaattactccagtatcttttgatgaaacacttactgctctccaggtgagtttgatttttatctcagcttaatataggggaagatcagcttgaagaagaaaacattacctactaaaattaagcatagttttttttaattaactcgcctgttataatcgatatgttgtctactaaatagcatttcttaatttaattttgccagacttcgattatttgtatcttaccttcataatttttgccacacccaacactattttactgaaattgacttgatatttttaaaataactcactttttgtacttaatttattgtaaaaggaaactttaatattagtcctatcaatgggaaactattattacttgccacaaatagaaggtaacaaaaaaaattgtgtgtctgtctgtataacaaaataattctgaaattcctggtagttaactgttgccttcattttctctgagcctaaggcctacattttctattttaaaaaggaaaggaaccagcctgaccaacatggagaaaccctgtctttactaaaaatacaaaattagccagatgtggtagcacatgcctgtaatcccagctactggggaggctgaggcaggagaatcacttgaacccaggaggcagaggttgcggtgagccgagatcgcgccattgcactccagcctaggcaacaagagcgaaactatgtctcaaaacaaaaaacaaaaaaaaaaaaaaggaaaggaaaaatgagaaatatcagtagggtagctttctcaatgaaggattcaatgttatctaatggtcaccttggtgtacccacctaaagttacttatggtacttatactctgagaaacattgctttaaatagctgttgagcaccagatcaaggtactgtcagaggtgcaaagagaaactagagtccctggcttaacagaattaatgaattctgtgacaaggcacataacacttgtcttgcaacataattgcctttgattagtagttaagtggttaataactagtatagagtttaaaggaaggagagatatttttggctagaagcaaaacttcagagtagaggaggcgttagcactggaccttgaggggtaaatgagattccaataagctgatgtttttaagttctctcaatatatcttttttattctcccgaagactatcacccaggataagttacagagcattgttataaggacatagaatgttccctttgttcaaaagtattaagccaactagaaagagtattgatttttttaatcttgaatataagaaagctaaatattattaattaaattcgaatttttttaagtgttgaacacttagcactttcgtattttttttccagtttgccagtactgctaaatatatgaagaatactccttatgttaatgaggtatcaactgatgaagctctcctgaaaaggtatagaaaagaaataatggatcttaaaaaacaattagaggaggtatgtatgaatcatttatttcattaaattgaaagaaccaatttagaatggagacctgcccaaatgctcagagactcttcattcctgaatatctgagttgctacaacttaggtttttaatcacttttaaagaagaagaaatccactcataaaaattttagtttaatttactataaattgtaagatttggttcttgaaattattttagattttgttttttattttcaacgggcaaaatctgagattatcaaatgggccaagtagagacatttcttaaaatttttcacaaatacatatgaattcgattaaaaagagaaactacagagttacttagaaccaccttctgtgttttcatgttatcctgaattcctcttctaacccttagatagcaatctaataatatagcataattacttatcattttagtttgttttaaccatcatggtcccatattttgtaaaaaatcacgcattaaggatcttttttaaaatgagctaaaatatcaaatggtaatcttatgagaacatctctatctttactatcagaattcaagtctttgttttatgacttctgactattcatatcttcttaggcaattaatagagttatattaacagcattggtgtcttatacatggtatatagaatagttacatgagaagaaatgtgtattttattgtaagtctgagaaattattgattatggtaactgcattttggtgttctacagttagagtatattttatttcagtgaaattaaaattcttatagttcatatacaaatttaatattttattcttttatgctactttaaggttttaaaacttagccacatttattattaacataatccaatattgcattctataggtttctttagagacgcgggctcaggcaatggaaaaagaccaattggcccaacttttggaagaaaaagatttgcttcagaaagtacagaatgagaaaattgaaaacttaacacggatgctggtgacctcttcttccctcacgttgcaacaggaattaaaggtaaaattaaaagatgacagcttaaacttgatgtacagagaatagaattggtatttctatatgtttattatatagtatgcactttctatcctttgatacagtatattcaagaaacccagaagattttgtgtttcatagtacctaagagattcattaaaaatgccaatttctgattcctatttgtagagattctaattcaacaagtttggaatgtatttaaataatttatttgcaatattctgcttaataaattctagagaaactgggtgattggaagccataggtttctagaatatgtggaaatattattttctacttaaacagaaatattaatctcaggaaaattggtgtagaatataaaacaacataattgtgtcaatgtagactctggtgaaagaaaaacaacatagtgaacaaaattcttactttgttggtgtgattttttgtttgtttttaattgagtaggaatttatttattcagtagactttttggggtgtgagggtgtcatggataagagaatgacctctggagctagacttcctggatttgaatctgtcatttcctgactcttggccttggacaatttcttgaattcactttgctgctttttcctgtggaagtagcagtgtggaatagcttgatactcacctcataagtgttgtgtgagaattaaatgagataataggtagaattagctcaacacagcactttccacacagcatattctcaactaatgtacattgttaatgtgaataagcattatgtacagaggtatatagaagacaatcaagaactattggttgagtggtgagcaggaagtagcccaatgaaagacctagagaagaatgtttcaaaagagacctacatgtacaaaagcttggagttgtgaagaaacattatgcattccttgcacttaagatgttctagtagcaggggcgttttaaacctccttgagggatttgaatgtgatgttttgctaacaacaaagaacagccttgtgtgtgacatcagaattatagttgagaaagatgtagctactgtgcacatcagattgcttgggcctgcaaagattgtggctctggagttggagtgaattggataaattggagaaatgtttggaaggtaaacttagcaggactttgtgattgtttggatgttgagggcagagaaagggagaaggaggtgtccggaatgacttgcaagcaattccttggcttcatgggtagctggtaacaatattggttgagttaaggcacactgaataaagagcagtggaaatggtgggtgttttatttgggatttcttttgtttgagatgtcaggctgttgaaaatgcaaatgtgtgaatatgaggtagaagatttgagatataaatatcaatttgggcattaactactacagatccaaattaaagtttgttctggttgcatgttgagagaaggcaacaggaggcaaagtgacagaaggcaaaactccaattgggtaaggcagagaaagaagaatccataaagcagcccaggtttagctgtacagttaagaataaaacctagtgaatatggtagctaaggggagagaatatttcagggaggtagtggtcagcagtgtcatattctgctgagaagttaaataagataaagatggacaaaaattatttgcatttagaaacacagagctcatttgcaaaagtaatttaagtgatggggatgaaagccaccttatagtgtgttgaggtggcctagatggatggaatcttgaatatagtagaaagaattggactaacataggagaaatacctcttgaattggagcaaacatggaggaaaggataggcttctgtgcaggtagtactcttaggagtttaggtttatactttctttgtgaaataggtttaattcttctgctgagatggcaggtgatggtagagtcataagtttgcagagatactaagggtttgaaataggctagcctttgtaggtaatgaaaaagaaagctgacaagggggaagggaatattgccatgcaacattaaaggtccagtttatcttgtcagccggtcttctggctgtgtggctctggcagtgctcaggaggctgataaaggtcttgaacacagtgccatttgagtgtgccgtgtagggtacatgtaagggacagagagtgggtcaaataatttgagaacattgacctcaaatttcaaacatgattacagtgatctatggaatctaagatgatagggtgagaaccaagagggagatggcaaaaaaaaaaaaaaaagtcatgcaacaagggaacagagctaaatagcccctgatgagctaaatagctatagtgggattaactaaattaatgatttggaaggacagcaacggcaatgagagcaagaggtctagtttatgactttcagataatgacaaggtccaggtgtggctttggtagcaactggcattaaactgaaggttattggagtcgaggatttgaatatgatggggcttttgcagagcagggtgtggaaagggctggccatttcaagcagaaggacagcactcagagaggcatgacagtatgcagtatattctgtggacaacaagtaatcttaagaggcaatgtgacggaatggttgcatggataggctctgaagtaatagacaatgggctcagccaccaattggctatacaaccttatgcaacttctccaaacttgttgggcacccaactcatctgttaaaaagatgtagtaaggttgatactcgatacaagtatcatctcatcttatttgattctctcaacaaccttagggttgtgtatttcagatgtgattacaaccctagggttgccgagagagtcaaataagatgagatgatacttgcacccagtaaagagtcaagagaagaatggtggctatgaaacctggagaaacacacttaagaggcaggcacaggaagagaaactagcaaagcagagtgagtggtaaggacagcagctgggtaaggtaagaaccaggagatgggtccctgaagtgttgaggaaggagtggataaatgatgaggaggacaaagtaggaaaaaaagaaaatggtagttagagtgaagtaaagagtcaagagtttgattttttttttaagcaatatccttagactaataaaattttaaactaggcttaataagaattctaccaagtcaatggttttcaaaaatagaaactagttcccttgttttattatgtttgaatacagatctatatgacataattttgatttcttcttctttaggctaaaagaaaacgaagagttacttggtgccttggcaaaattaacaaaatgaagaactcaaactatgcagatcaatttaatataccaacaaatataacaacaaaaacacataagctttctataaatttattacgagaaattgatgaatgtgagtgcttttttcaagtggaactatgtttaattataaaagcatccttataaagagaaactatgtttatagctcagttaatgtgataaacatgtttaaatactgtgtatttcatatgtgattacaatggagactatgatttaaaataagtaattctaaaaatacaaaaaaactagctgtgcgtggttgcaggcgcctgtaatcccggctacttgggaggctgaggcaggagaatcgcttgaacctgggaggcggagcttgcagtgagccaagacccgttgcactccagcctgggtgacaagagtgaaactctgtctcaaacaaatataaataaataaataaatagaaagtaatcataagttctttattctgaatctcctaagaatgatgcactagttgaaacacacatgagacaggtgtttttattttctaattattattcaattaaattgttagttatatggcatctgcctttgctaatcttaaaagagtggcattgacataggaatctgtttcaaaattatttcttcaatagtacagtctgttgggggggaattttaaatctacttataatgatcaaatctcaaattcagaatttgtccttttaacctatatttcattaaggatcctgtattgtgtcactaattccaaccagtgatcatcttaattcatacaataacataaatgaccatatctattaatgtacttttggtattcatactctgagcacatagtagttaatttgaagttcttagtatctctgataagaatttttttagtaatctttaatttgacttaggaaatttggtaaacatgttcatggacaaattttttttttctctaattatagctgtctgttcagagtctgatgttttcagtaacactcttgatacattaagtgagatagaatggaatccagcaacaaagctactaaatcaggtaacttaatgtattttacagcatataatgcttttactctttttaaaattcttttgttattaggttttgttacttgttctcatttaatttcagtaatgattttggctctaatgaaggcttttctctttacatttctactctataaccatcaggcacctagaggaaggctaaaaatttcataaggcagacatgtgctagtaggtaaacctttgcctctagctctttactagcagatcttagtattcacaatgtttgtaaagtttctgttttgccttggtaaacttcattagggtaacaagactgattttaaaagtgtcaattctcaggcatttataatgtatagaataatatatcagggagaggtaattttggtgaatacatcagtaagtttagattccgtgtttactttgtagattgctcgtgtttaaagatgtatagttgtataaagtaatagacattttcatttgaattttagaatataattgcattactacttattattgttagttaattcctataaagtattattgataaagtgtttttttgttcctaatacatacattagaagtttcttgggttttttttacaatctctggtgtaaaaaagtatttttttaactcatggtttatctcttctcttataataatatagaaaatagaaataggcctctttatagtaaaacacagttgtcattagctttagaagtcaataaataatatctctgtttccattcttgaattcagaaccatctgagacataaaataagagttagttagattggggaattcaattatcagttttattactgaggagcttgaggacttatggtcaaaattccctgtcaggcacaggcaaacatacactttattgatatatttttaaaattctccttctttcaaaataatctattctaagttagctagtttgccaaaatgtagaactttagaaagatatcaaatcaaagttaaagtagttatttaaataattcaaattttattaaggaaacaaaaaatatttgaattttctgattggaaaatctgttcttgtttataataggagaatatagaaagtgagttgaactcacttcgtgctgactatgataatctggtattagactatgaacaactacgaacagaaaaagaagaaatggaattgaaattaaaagaaaagaatgatttggatgaatttgaggctctagaaagaaaaactaaaaaagatcaagaggtaagagagacagaaatgtaaaactaaactaaaagcatacttttaaaagaagtattctcttttttctataatgtaagcttttttaattttttttaaatgtacagataacattttatgtgtttattgtatacaacatgatgtatgatgttttgaagtatatatacattgtggaatggttaaatctagctaacaaatgtactacctcacatagttattgtttttgtggtgatagcacatagtatccacaaattttatgttttttaagaatacaataaattgtcattaactatagtcaccttgctgtacaatagagctgttgaaatttattcctgctatctaactgtcattatgtcatctgaccaagatttccccattttcttctccctgaaaaacaccccagcctccaataaccaccattatactttgtacttctaagagatcagctttttaagattctgcatgtgagtgagatcatgcagtatttgtctttctgttcctggtttataatgtcctttgggttcatccatattgttgcaaatggtaggatttctttttttttttttaaatagctgaagaatattccattgtgactttataccaaattttctttatccattcttctgttggtagactcttaggttggttccatatcttggctgttgtggaaagtgctgcagtaaatatgggaatgcagatatttcttgaacatactcatttaagttcctttgggtacatgcccagtagtaggactgctggatcttatggtagttctatttttgctttgttgaggaaccgtcatactgttttctatatattcctaccaacagtataaaaggattctcttttgtccacatccttgccaacaagttctcttctgccttcttgataagccattctaattgggatgaggcaatacctcactgtggttttgatttgcatttccttgattattagtaatattgaacatattatgtgtatgtcttcttttgagaaacgtctgttcaggtcttctgcctatattttaattgggttgtttgggggtttttttgctattgagttgttttagtttcttatatattttggatattaaccatgtgtcagatgtatattttgcaaatatttctgcaaatattgcaaatattttgcaaatatttctgcaaatattgcaaatattttgcaaatattgtctctttattgatgatttcctttgcctttagttgtaattccgtttatttgtttttggtctttttggttgtgcttttaaggtcttattcaaaaattccttgtcctgaccaatgttatgaagcatttccactatcttgttttctagtagtttcatagtttcaagtcttagaatttaagtccttaactcattctgaattgattcttgtatatgatgagagacaggagatctagtttttcttcaacatatagatattcattcagttttcccagcaccactattgaagaaagactatcctttccccaacatatgttcttggcacttttgtcaaaaatcagttgactgtatatgcatggatttatttccgcgttctctgttctattggcctgttgtctgtttctatgccagtagcatgttattttggttactatagttttgtaatatattttggaggcagatggtatgatgcctccagatttgctctttttgctcaagattgctttggctatacagggtcttttggggttccatacgaatgtgaggattgtttttaatctacttttgtgaagaatgtctttggtgttttgatagatatcgcattacatctgtggatcactttgggcaatatggacattataacaatattcttccaatccatgaacatgcatatcttcccatttgtgtcttcttcaaattctttcattaacgttttatagttttcatttgagagatctgacacctccttggatagtttgccattaacatatagagatactacttttttttatgttgattttgtatcctgcaactttactgagttttttattagttgtaacagttttggatggagtccttagggttttctgtatataggatcatatcatctacaaatagagacaatttaacttcctcctttcctattatgttttatttttctcttttgcctaatagctctagctagaacttcctgtactatgttgaataaaagtggcaaaagggaacatccttatcctgttctagatcttagagtaaaaggctttcagcttttccccatttggtattacattagcagtgggtttgttgtatgtggcctttattgtgttgaggcatatcacttctatacctaattaagagtttttatcatgaagaggtattgaactctgtcatgatttttctgcatctgttgaagtgattgtatgactttttttcattgttttgttaatgcggtatgtcatgtttattgatttgtttatgatgaaccattcttatattcctgggataaatcccacttgttcatggtgaattatcttttaaatgtgctgttaaattcagttttatagtattttgttcagggtttttctgtctgttcttcagggatattggcctatagttttccttttttgtctatttttggtatcagtgtaatgctggccttgtagaataagttaggaaaaattccttcctcttcaattttttggaatactttgagaagaattgctattagttcttctgtaactgttggtagaattcagcagtgatgccatcaggtcctgggcctttctttgataggagactttttattactgattcaagtctcctttctcattactggcctgttcaggttttctatttattcataattcagtcctggtaggtaatgtggtagaggaattcatttcttctaggtttttcaatttattggcatataattgttctttgtatttctgtggtatcaattgtaatgtctccttttttatttctgattttatttatttgagtcgactgtcttttttacctagtctagctaaaggtttgttgattttgtttctttcaaaaaaaaaaaactctttattttgtggatttttttaaagtccctattttgtttatttctgctctgatctttattctttccatttgctaatttggggtttagtttgttcttgtttttctaattcttcgaggtaatagtttaggtagtttgatttctttcctcttttttgatgtagatgtttattactataaacttctcttttagaactgcttttgctgcatcctatacattttggtatattgtgtttccattttcatttgtcttagctttttaaaattactcttttaattcattaacccagtggttgttcaggagcgtgtttaatttttatgtatttgtaatatttccagaatttctgctattattaatttctagttttatgtcattgtggtcagaaaagatacttgatataattttgattttaaattttttaagactgtttttgtggcctaatatgatctgtcttagagaatgttccatgtgcagttgataagaatgtgttttctgcagctgttgaatggaatgttctgtaaacatctgttaggtctctttggtctagactgcagtttaaatctgctatttctttgttgattttctgtctgaataatctgtccattgctgaaagtgtagtttcaaaatcctctattattattgtgttgcagtctctcttccttcagattaatatttgctttatatatattctgccatgttcagtgtgcatatatatttacaattgttacaacctcttgctgagttgacccctttatcattatgtaatgaccttgtctcttttcacagtttttgatgtaaagtctattttagctgatataagtatagcttctcctgctctcttacaatttcagtttgcatggaatatctttttccaccccttcctttccatctatttgtatccttacaggtgaagttaatctctttcaggcagcatatatttggattttttaatccattcaaccactctatcttataattggagaatcagtccatttacattgataggtaggaactactgataggtaggaaattactacttccattttgctaattattttcttatttgttttttaggtccttttatcttatctcactgtcttccttattggataaattattttctctgatagtatgttttgatacctttctatttttagtgtatttattataggtttttttccttcgtggttaccatcaggcttacaagaaaaagtcttacagttatgcaggttattttaaactgataacagattatcattgattactaaacaaacaaacaaactccacactttatctcctcccactttctgaatatttgattttctaacttttgatgttacaactgttttccttcagtacttttactatatcattgcactccctcctggcctgtgagattcctctttgttgttgttgttgttgtttaattatactttaagttctggggtacatgtgcataacatacagatttgttacataggtatacatgtgccatgttggtgtgctgcacccattaactcgtcatttaacattaggtatttctcctaatgccatccctcccctaggcccccaatccccaacaggccccagtgtgtgatgttcccctccctgtgtccatgagttctcattgttcaactcccacttataagtgagaacatgtggtgtttggttttctgttcttgtgttagtttgctgagaatgatggtttctagcttcatccatgtccctgcaaaggacatgaactcatccttttttatggctgcgtagtattccatggtgtatatgtgccacatttcctttatccagtctatcattgaggggcatttgggttggttccaagtctttgctgttgtaaacaatgctgcaataagtatacgtgtgcatgtgtctttatagtagaatgatttataatcctttgggtatatactcagtaatgggcttgctgagtcaaatgttatttctagttctagatccttgaggaattgccacactgtcttccacaatgttgaactaatttacactcctaccaacagtgtaaaagcattcctatttctccacatcctctccagcatctgtttcctgactttttaatgatcctggcctgtgagatttctgcttagaagtctactgctaaccataatggaactcccttctatgttatttgcctctttactcttgctgctttgctgcttttaggattttctccttgtctttgacttttgagtttgaatataatatatcttagggcagggtcatttagattgaatttgattggtaacctttgaccttcctatatgtggatatgtattgctttcttcaggtttgggaattttctgctattatttctttaaataagctttctgtccctttatttttctctacttgaactgcagtgacccaaatatttgcttttttgatgttgtcccataaacttcattccttttcatccttttttttttttgcctcctgactctatattttaaaatagcctgtctcaagctcacaaattcttctgcatgatccattcttctattgatgttctttgttgcatttttcattttgttcattgtattttcttgctctaggatttctgtttggtttttttattatttcagtctccttgataaatttctggattgtttctctatgttttcttgaggtttgctgagctcgcttaaaatagctattttgaattctttggcagataatacatctccatcttttaggatcagtcaccagtatcttactttgtgcttttggtgacatcatgtttccctgatcatgatgcttgtggtcatgcagcagtgtctgcacattgaagatgaatgtagctatttgttttagtcttcaccatctttataaggtcttttcaagatctatagtatgactgaggtcaccatgttatcctgcagaggcactactggacacctttctctttaggtccccaggtgggcagagctgttcttattccacagatgagaggggtcagtatcaagatccagggccatttgagaatctgctgatggacaagggttgcaaaacctgccacagggacttggatacgcctgtctcccggtaggaccccggctgggtaaaaccattctcagactatcgctaggagaaactgaaaccaagcttcagagttaattcagaatgtgctatggaaccaatgttggtaagcttaacctggtggcaccagcagtcaagactcccagcagttccttatgcagggaggattgcttgcattctgtagctgtgacattcaaggttctttccagaactgctatgtgatggaagccagcaggcctgtcctacacaggcaggataactgccaggctgcagtagagaggggctgcagtcaagacaagactgctttaggatctattatgggaaagatgcatgaaacctgtcctggtggctggggcaggtgcttcacccagcagttcccaatacagtcgagatagcttcctgactgcagcaaagaggcattgaagctgagacagggccccttcagtctattgtgggatggaggactgcaagcctgacccagtggctcagacaggttcatctcttggcagttctctgtgtgggtgagagcagggaggctgcagcaggggagggctggagccagtacatgtccccgtcggaatctgctatgagacagaggccggcaagcctgtcctggtggctcagatgggcatgttcccttctgggtccttgtgcaagcagtactaagctaggactacagcttgaggagggcaggagccaagttataggctaacttttgggtccactgccaagaccaatgtcgacaggcagaagagcccatctgccgagaccctagagtgtgtgatttctcctggaccccttgacagatagttttggttgcagactctaggccaaacagggctgtagctaagtccttcaaggaatgggaccatttctgcatatgaacctgggagcacaattggcaggactcccacctgggtgttggtatgcactctcaaaaacaacacttccaggtcttgagttctactggggttttacaacctcctacctgaatccaaaggctcccacaaaaagacttgtctgtaataggtacagaattcttgttgttttggggggatgtgagcaggtgacctcctattctgtcatcttcttgacatcactcagaagtattgtcttaaagatttttttttctaagattgagatgttgaagatctaaccatttttcatatgtatatacaatttagaaaatttaagaaatattttcttcatttatattttaaaaatagttaaatcatgtttctttccctggtgcttatgcaagagaaaaaggaattaaaagcatctatgggaagggttggtgtatctacctcttgatggatttgtcttgaaattgtttccttatagtttgtatattacattttattgagcatatataaatgctacctagagcacagcagtttcctactgagatcagtatgaattttaatatctagatgactattttatatatggatgctacatattaatggatttctttttctttagaaagtatgtttctaaataattaaaacattagaatagctggagaagctaattttgtacgttttgtttttccttctccatctaagagagttatgtgaaaattagtataactaatactaaatagttataatggaatttatagaaacagatcactcattttctaagtataaaatattaggctacacgttaagagaacttaatccagaaaccatcagactttagggactcagaaattgtccaaaagattaaagggagttattagtgtaaagtgtccttaacctagaggccacagatgctgtgaaattattttgcagaatttttcaatgcatattcatttttctggaacaagaatctgtagttgttatcagacttgcaaagtgattcgtgaacatccccccttcaaaaaaaaataagacccagtgttttatgtagttaaaagatgaattaatttgcagctactcttcagacttctatgtggctagcccaaaaggccatgaccctttttcctcgatatcattgttcagtttctcaacctcttttcatttttaaaggaaaaaagaattctatgccaaagctattatttccattctacctacaaattaaaattattgctttatttcataggtactatattcaaagaggtaaaagtctataagttctccacagggtttcatttagcttgttttaaaatgcatgttaatgaagtgcaaaatgtcatgcatgacaaaaccattggactttaatcaataaaactaggttttatggaagggactggcctagtgtcatgattaagaacatggtctctagagtgaaattgcctggatttaagccgcagttttgccacttataaacttaccgcagatccaatcctattatgaattgttgccaaggccttgggcaagtcactgaatctcagggcttcctgtatttctccacccttgaagtagagaccagatgctcaccaaggtcccttctgactttaaaatttcatctaatttttgtatgttttttatatgtgataataacatgacataaaactaacgtttgggataagtggtaataatttctctaatatttttctcacatcattaatatattaataagaaaaattgaagcttattgaattgagtcaacacagagaaagattacaaaaataccacagaatatatgacatgtatcacactgcagtttttctcccattttaaccacagttgaggaggaagaatcctactccgttctttttaaatttctttttcttttttttcttttttttttttttaaaacacaaagctcagctttctaatctaaaagacatataattaaaaaactttttctttatagagacgggggtcttgccatgttggccaggctagtctcacattcctgggctcaagtgatctgctcgcctcggcctcccaaagtgctaggattacaggtgtgagccactgctctaggccctttacttttaattcgacacaaaatttaaggtta

SEQ ID NO: 347 - DNA, 7489 bp, Homo sapiens
  source 1..7489: mol_type = other DNA
ccatttcaatagtcgcgggatacttgaactgcaagaacagccgccgctccggcgggctgctcgctgcatctctgggcgtctttggctcgccacgctgggcagtgcctgcctgcgcctttcgcaacctcctcggccctgcgtggtctcgagctgggtgagcgagcgggcgggctggtaggctggcctgggctgcgaccggcggctacgactattctttggccgggtcggtgcgagtggtcggctgggcagagtgcacgctgcttggcgccgcaggctgatcccgccgtccactcccgggagcagtgatgttgggcaactctgcgccggggcctgcgacccgcgaggcgggctcggcgctgctagcattgcagcagacggcgctccaagaggaccaggagaatatcaacccggaaaaggcagcgcccgtccaacaaccgcggacccgggccgcgctggcggtactgaagtccgggaacccgcggggtctagcgcagcagcagaggccgaagacgagacgggtaaagggatgcgggatatctgcaggagggtgggtcgagcagggtttggcattggcttagcaggcagagaagagtggcgagaaggcatgtcctgggcttttggaagggggccagggtctggagtgcagttggtgctggtgtgtggtttgccacagtaggagttctcccatattagcatcaggaccccgccaacactgtgtgtatgctgccggtctgctctctatagggggcatctgcctgtacataatggggtcaaaccaagctctaaaacgtgtagtcttcgctcagctccgcgcctttctctccacttttaaaccccaggcactgctgtaggactctgacccctatcctcctcacgcttaagagatgacctctactttagaaaagcgtgtacaaaatactttgcttttggcaaattccgccattttagccggatttgctctgttgctccaccctcgggcgacagtggtgaaccaacaatttttttgctgtctttcctaaacttgtcacgtattggcctgtcacccgacccttcttgtggccctgataagttttgcataattccacctagtgttatctattgatagcctttgtgggaatgcctgtgacaaatgggaacatcccttctcttttgaatactgaaactcttctttgtcccagaaagtttaattcctgatagagtatttgggagaaaaagcaaaggccaacacccataagagaaagaatgcaagactagtaggctcaaagccagttattaatttttttttaggttgcaccccttaaggatcttcctgtaaatgatgagcatgtcaccgttcctccttggaaagcaaacagtaaacagcctgcgttcaccattcatgtggatgaagcagaaaaagaagctcagaagaagccagctgaatctcaaaaaatagagcgtgaagatgccctggcttttaattcagccattagtttacctggacccagaaaaccattggtccctcttgattatccaatggatggtagttttggtaagttttaaggaaaatctgtgtggaattacggtaattataattattagatgatattaatgatttgcattttaagatgtcttatgtagtcattttgactatagtgagttaggtttaatgtaacaaggcttagaaaggatgtgacttatctcagatctcacagctaacacttgacttggtgacatacaaaaagatccttatccagtgctctttcaggttcactgccagtcacatcaatctaattataattagatcttaaatgcttattttaatctgatcccataaatgtgttcttggttgggagaatagatttcagttttatttaactcacttatatatcacttagtgctatttgaagatgcagtcttaaatattgtgattacataacgtctcttccagttttataattttgtttctataaaaccagtctggattagcatctgataccagaaagtgacacttttcctcctacaagtaaatagttgtaccatggctgtttactcttacccatgtattaaagtagcttctgtaaacagctctttgcagtttgtactatttctttgccctagggatattgagtcactggacagctcactaaatccaatctcattttagttttagttgtattgattgtgaggaaggaggggtgagcaggaaaagtcctttggaaataataatttgtgtgtttttatcaaaattttgcagaaaatgtttaatctcaaggtgatctttgaagtgaaaggaataatggatgatactctttgcttcaaaataatttatactacaaaaaataaattatttatagtgttaatccatttgcccataacaaacctaatttcttaataacacttgttaatagaggccatttaactgatgctagctattgcctacttgtgctttatatatgtcagactctgggatctgcagtttctcttgggacaaatcttagatattatctcaaaacttggattttaaaagtgttctgtcctaacagaaccaccatgccatttgctcctttctgttgtggaagatggatactttaagataatacctgattctcattttcctgttaggggcctaccaatatgtttttttttttttccctcattaactaaaatcattccaaagttctatgtacagagatactgagactagggtaaaatattctacatattttgtcatgagaagctctttttagtttgaagaaataagtgctttgttaatatgagattccttccatggcagtcatttttagctattaaactaaataggcaaacaattaatttaatcatatcttttgaattgtcccagagtcaccacatactatggacatgtcaattatattagaagatgaaaagccagtgagtgttaatgaagtaccagactaccatgaggatattcacacataccttagggaaatggaggtaaaggttctctgaatccagtttgtataatgtatttgttaaatgtggctaaatgaaattgagaggataatgtttaaatttttaaactaatgaattattctaatgctacagttaagtttatagcatgtagcctctcgtaattaatggtaaaataatctaattgcagtttttacactagaataattttaacactataaataattttctcaataggttaaatgtaaacctaaagtgggttacatgaagaaacagccagacatcactaacagtatgagagctatcctcgtggactggttagttgaagtaggagaagaatataaactacagaatgagaccctgcatttggctgtgaactacattgataggttcctgtcttccatgtcagtgctgagaggaaaacttcagcttgtgggcactgctgctatgctgttagcctcgtaagtctaccttggtttgtttaaaagtgatcacgaccttttgtctagggaagaaattgatttttttaatggtgaccttttaacatacaccaggcagagtcagtgactactttagggatggcaatgtgctggggcttagggcagtggaggaggatgaaactgttctaatctagaacactaattttcccccaactggattccttgaacatgatatagtacactaggttacaaattttaaaacattttccttccaatattactttctggcatataagcagtgtctcttttattaagaagtaaaggctgggtgcggtggctcgcgcctgtaatcccagcactttgggaggccgaggtgggcggatcacttgaggtcaggagtttgagaccagcctggccatcatggcgaaaccctgtctctactaaaaatacaaaaattagctgggcatggtgatgcatgcctgtaatctcagctactagggaggctgaggcaagagaatcgcttgaacccaggaggtggaagttgcagcgagctaagattgcaccactgcactctggcctgggcgacagagcaagactcttgtctcaaaaaaaaaaaaaaaaaagaaagaaaaactaaatttaaaaatgaaaacatgaaacatgttttcctaagacttgtatttcctaaattttcagctacttggtgaactctggcattgttcccatctcgagaagtctcatgcctttcatttacttcctttgactgaactggggaaaatatctcaaaagtcctttattgatttgggccttttaattagcaattagctatccagtctctactagaaatgatgatcaagtgtctggaaatgcagttggtgtggattttggattcattccatattctgctaatgggatttcagaactgggataaggaagcttgcttctcttttaggactgattacttaaaacttttttcattgtagaaagtttgaagaaatataccccccagaagtagcagagtttgtgtacattacagatgatacctacaccaagaaacaagttctgagaatggagcatctagttttgaaagtccttacttttgacttagctgctccaacagtaaatcagtttcttacccaatactttctgcatcagcagcctgcaaactgcaaagttgaaagtttagcaatggtgagttaactttcattttgttgaatggtgattctttggtaataattaggggtaagccctaattcctttgtaaaggaacctagttcctttgtacagcagtggtgaagagatttagtattcagagggagattaatgctgcagtatggaagaaagcctactgctggcaaaagataatctatatcaggaaagcactagaagcagaggtctaaggatgacatcttggggatgggtagtcagaagagttgttttttaaaagttaataaaggagggaaaatacaggatgaggatggaacaaaacactaaaatgattgatatgtttaaagatgaggctgtgagatattttttctagagttgctacagagccgttatcaaaggcaggaaaaaattaggttagaaggcagaggtttgacatttgaattctaaacgctcttgtgatcataaagtattttttattccagtttttgggagaattaagtttgatagatgctgacccatacctcaagtatttgccatcagttattgctggagctgcctttcatttagcactctacacagtcacgggacaaagctgggtatgtattacggtcttcacacacctatcttgtgactgaaatgcctgtgccagattaaataataattgtcctacaaaactgagggttgcctagatgttcttacttggaaaaacttcaaatatatatagttgacctttgaaaaacacaggtttgaactgtgtgagtccacttacacatggatttttttccaatcaaatgtggactgaaactacagtattcaggggattcacaacccatatatatggaagggtgactgcaggacttgaatatgtacagatttgggtatatttgggaagggtcctggaaccaatccctcatgtacactgagggatgattatatactgtttaaggcatgttacctgttgaacagtgtttgttaggtagtaagcttagttgtaacttggattgaaaggtgagcttttttaaaagcatctgacctgttgctggcagggaaagtagtagaaaatggatcgagggatggaataatggcctgagaaaactagtagttggaaaagttaaagattagtactggaatttaacataagcttaatgccaactatttactgtgtttggtgtgttactaaaagcaaaactcaggggttctctattcccttctctgtagcctgaatcattaatacgaaagactggatataccctggaaagtcttaagccttgtctcatggaccttcaccagacctacctcaaagcaccacagcatgcacaacagtcaataagagaaaagtacaaaaattcaaagtaagaattaacttggatattgaagcttacttttctagattatggttcagagatctttgacattttaaccttattcatgaatctgccatagcctccttgagaagctgttctctaaattggttatgtgtttgaagaaggttgtagttcatgctttctgccctgggtctgggggagaagagagaaggaagggggcatgcatgtgtgtttcagggaccagacagtgtttctaaaaccatcaagtcggtcagacagaaatagcattttttagttcccaatacatgagtacaaacattattccatgatctcctttacccagtgagtgtttactaaaaatgctttttttttccctacttacaggtatcatggtgtttctctcctcaacccaccagagacactaaatctgtaacaatgaaagactgcctttgttttctaagatgtaaatcactcaaagtatatggtgtacagtttttaacttaggttttaattttacaatcatttctgaatacagaagttgtggccaagtacaaattatggtatctattactttttaaatggttttaatttgtatatcttttgtatatgtatctgtcttagatatttggctaattttaagtggttttgttaaagtattaatgatgccagctgtcaggataataaattgatttggaaaactttgcaagtcaaatttaacttcttcaggattttgcttagtaaagaagtttacttggtttactatataatgggaagtgaaaagccttcctctaaaattaaagtaggtttaggaaaacagaccctcaaattctgacattcattttcctaagcaactggatcaatttgctgacttgggcataatctaatctaagcatatctgaatacagtattcagagatagatacagtagagattccccagactttttcgctctttgtaaaacctgtttgtttaggttttgcgaggtaaactcaacagaggttgggagtggaagagggtgggaagcttatatgcaaattaacagacgagaaatgctccagaaggtttattattttaaagcacattaaaaacaaaaaactatttttaaaatcctgctagattttataatggatttgtgaataaaaaatacccagggttctcagaatggaataaatatcccttttaatagttatatatacagatatacaactgttagctttaattggcagctctcttcttttttcttcttttcactggctttttacttggtgctttttcttgttttgcactggtggtctgtgttctgtgaataaagcaaagtaagaatttactaagagtatgttaagttttggattattgaaataagaggcatttcttagttttccagtaggatctaaaatgtgtcagctatgagtaagactggcatccaagaagtttatattatagatttaggtcctaatttttataaatcacaaggtaaaaaaatcacagaacagatggatctctaatgaaaaagggatgtctttttgtttatagtcatgtggcaagatgagagtaaaaccagagagcaaacctctataagtgttgagtatatgtatacatttgaaataaaccagaaatttgttacctt

SEQ ID NO: 348 - DNA, 28995 bp, Homo sapiens
  source 1..28995: mol_type = other DNA
gttgcttggatcagtctaggtgcagctgccggatccttcagcgtctgcatctcggcgtcgccccgcgtaccgtcgcccggctctccgccgctctcccggggtttcggggcacttgggtcccacagtctgggtgagtggtcgcagcccggggagggggctccttctggagaggagagcgtggtcgcggggcactggattcgcgcggacgctcggccgagagctgtcccggtagctgcgagagggcgggtcggccccgtggcggggccctccgggctgtctgagcgccgccgggtccccgcggacctgcgcttggggagggcacgagttgcaaatggcgcgctaagcccgaggtttcttctcttttgcagtcctgcttcaccttcccctgacctgagtagtcgccatggcacaggtaaggccgtgcgccccccactgcgctggatttacccacaactttgtatgctgcgacgagggacttttaggatttgtctgagagccaaaaagtttaggaggaaagggaacctgctttggggacatcgcttccacttttcttgttccccctttgcttccctgcccccgtttctgtgtcccggttcttcccgctgagcgccctccggaaccagcaccgacgccgccaagctgccttcgcgcgcaacagctggtgacgtggccggatttgtgtgcgctcccttttcatgagtgaatgtgtaaaagtgggccttccccaaaatccagagagtagctcaaattagaaccggagcaagaacagctcatcgtggtcatgtgaggcgaacgcattccccccccaccccgccccccgacttcctttattttttttccgcaaagttttctgtattttaatactgtgattgagcattggctttttccagttgctcagcccagttttactaaaactgtaggacgtaggctctgattttttttttaatccaaaagattaaacacaagcgctgtttttcttaagcaatgaactcgtggaacgagttctcaattgaatttgccttgggactgtttcagaaattgataatctactacaggctttctttactgttttttttttttcctttttttttgagacggagtctcactctgtcgcccaggctggagtccagtgacgtagtgatctcgctcactacaacctctgcctcccgggttcaagcaattctcgtgtctcagctttccaagtagctgggattacaggcgccccaccatgcccagctaattttgtatttttagtagaggcggggtttcaccatgttggccaggctggtctcaaactccttgcctcaagtgatcctcccgcctcggcctcaggactgtaatcccactgcgcctggtttctttactgttattaatgtttatcaaaaatgtaggaaagagaagatagtttaaggtctttaaatattgaccatgttatacagtcttttgtgaataagataccagggcttaaaaactctaaaactgatttcacagatcttgtcaatctaaccggcttgtcagagtccagatagttttttttaaacaagtgttttaactgctaaaacaatgctgtctcttatttatagttcactttttatcagattgacttatcaaaattgaaaaaggtttcttggtcctttccaagtgaaaatgggaggattaagattagttgattactttatgaaacttacacagtgatcccattcttacctcctcttttgcacttaaatgttacagtaaaccaattctcatattacttcaagtggaaagtttggtttaagttcttctccatagaaaggatacttttatgtggaattaactttcctgagtaatatttttcctatcttgatatgctggtgtggtgatgtacatgaagatttaacaagcatcgaataataattccctctatctttgctcatttagcagtttcttgaatctcttgtaagttccccagtgatgtctgagggtccatcaattccttttcattatgtagactgtttacccaaatagtataagcgaacatattttccagttgtggacattaattttaataatttcaaagaatgattagtatcataaaggccatgtgtatagaaaacctaggagaatggtggtttgcatataaaattatgtacctgagccctatgacaatataacaccaagactgttttctatcaaaactacagtttttactaatcataaaagttacaagtaatgttttaaaaaagatacagagtgttaaattttgttctagttttgttactatttttggaaatcatgaaagtaaaacattttgttaaaatatttagtattggccaggcatggtggctcatgcctgtaatcctagcactttgggaggctgaggcacgtggatcacgaggtcaggagttcgagaccagcctaaccaacatggtgagacctcgtctcttctaaaaatacaaaaattagctgggcatggtggtgcacaactgtaatcccagctactcgggaggctgaggcaggagaatcacttgaacccgggaggcggaggttgcagtgagctgagatcgcgctgctgcactccagcctgggcaacagtgagactacgtctcaaaaaaaaagtttagtattaaagttgggtgcggcgtctgagcagtaagaatgtcatgaaggcaaaactaggctacgtaattgttcattagaagcttcatgaacatcagaatttttttgtttattttttatttattttttattatatatatatttttattatactttaagttctagggtatgtgtgcacaacatgcaggtttgttacatatgtatacatggtgccatgttggtgtgctgcacccattaactcaatatttacattagctgtatctcctaatgctatccctcccccctcccccccgcccacaataggccccggtgtgggtgtgtgatgttcccctttctgtgtccaagtgttctcatgaacatcagaattatctctatggtatatgtttaagttacaaggtttgatcagaaatattttcggttggtttaaaattattataataatttaaaaaagccctgtgccgagcaagcaggataaatgtaaataaataaatttgagatgaaactccttccagaggagctgactggatattgattgcatcttttcatgccattcattttttaaagtcaagtctctctggagctaatgttcacttttgggatcttagatcagggttacctgtttacccgtggcctgtgctgctcctggtgatttctcttggttccttatctgtttaactcttaagttcattttggctgctgagaaagaactagatcaaaaactacttggctgctttgcaagccactgagcaattcattggcattcagcaaaccctgatttccttatctaatatccagttctccttggaaggcctacataggtgatcaggctagttacaggcaggcagtccggctttcttcttttaatgacttagaagttcaaaatggtaaaaatataacagtgcttttacagcatagattcattcctgaaatacattttattcatataaccttcatactattctaaaatttcacaaatgcatctgttttttaaaaattagggctcctaagacctttgctttaagtgcttcttagacgcagtctttcagtttagttagtttacataatatgtaaacatatcatcaattgattaattgcaaggaattatactcctggcttcatttctttggacactagttttttgggtttttttttttctcccccgagatggagtctcgctttgttgtccaggctggagtgccgtggcgtgatctcagctcactgcaacctctgcttcctgggttcaactgattctcttccctcagcctccggagtagctgggattagaggcatgtgccaccacgcctggctaatttttgtatttttagtagagacggagtttcgccatgttggccaggctagtctcgaactcctaacctcaagtgatccgtgtgcctcggcctcccaaagtgctgggattacaggcatgagccactgcgcctggtgggacactagttcttaactgttctctttttcatccatgcatgcattcatgaatgcatgaggcttttgcattttcactatgtgccaagtattgttaaacatgagcgcaatgggaaatggatctaagatttattgatataatagatgcattgccaagtcttttgtgtgcattatttagtcctcataacacagttttggaaataggtattactatttttgtttcacagaaggggaaattgaggttacttagctggcattctttgtatgggacaaaggagggaagccatcatacagagaggtaacaacagcaaataaatacttaggggtgtaaaagagtttggcatgatggagtgaaactgcagtgaggtggggaaatcaagccttgtcttggaagggatagaacttttcaagtgttattcatggaatgcccaatggaacaatttggtaaaagagcatactctcctctgaccttcaatgtgaactcatgggaggccaatgccacctgctcactttaactcactcaagacatcactggagttattcttgggcaacttgagcacacaatttaactttccattttattggtgtttgtcaagggaagtcattcttacactggtaaagagacacaacattaaacacagagcattaaagaaatacacaacaaaaatttaaatcattttacaaatcttcactttgttatcaaaaccttcttttctaccacgatgcaaacaacttagtctgttctccagtgatgttttttttcccttgcatttgattttaagaaacaggtcaaaggtggtaggatggatagacaaatggaaagaagcaaaaacaagtaagatggagcatgaaaaggaaaggaaattacacaaaagtaagcaataggccagttcgagtttaacgctttgaactatatcattcactttttctgagttgggattagagcaagggttaggattgggggttgagagcatgtctctgacctctgatgtgtttgtactcctcagtcttcttggaggtcctaattttttccctgataattattttgctttacagctcaaagcataatcaggtcacactgacatttccctcttttatgcccttcttatttttttcttagtacagtgataaataatttattttctcattagcgggaaccattattgcaggaaatattaacgggcctctaatacgtacataaggtagggccctagtgtatgtacatggagtggggaggcaattgtcttcccagcttactgttttttggagtggctccaaggtctttggaaacctgcctcagaagaaccacccttaaaaatcactgcatagcggcttagcagttgctcagcttgtggtttgcttcatgatttccagctcctagttaatattacgtggaatgctggaggtggggggagggtgcggtatttgagtaaatattgattatatggaactggagaacaaagagagtttagtccttttctgtgtcttcaggaaggctttatttaaaatgttccagacaggtgaatactttctcatctttaaacttgaaattgttatttatgtctaagttctgtgtctagaaaagctacccttcccttgttgtttggttggtcttattcattttttttttggcatacctagtccttgcgggtaaagaactttttcatttagagaaaaaaaaagccaacaaaattatagacctaaagaatggatatttttgaaggtgagaattaaaagagtgaattgtatattttggccaagtattatctaagaatatattataattatcttcgtaaggcattggtggtagcagataaagggaattgaggatgaactgaggatgggtgaatgggtgagggaacagtacctacttaagagttggcattaatctgggtaaagtgtggggactccaggaaacaggggaagccctcttgaatgagtcatttaaagtcacatttgcagacagttttgggtgggcagtgatggggtttgcacaggatgtccaaacaagggttctgcccttcttactcatttctctgattcacatctggtctcttaataccgctacgtggctttgctatccttagtggatgactctgactgtatggaatgtagcaaaagtgtttcacaatttctagaaagctctcaaaaagaggactagcagttgtttcttcatgcttagtaggtgagatttttaagatgcttttcttccattcatctttcacctaatttccttcagtctctggtgtcagatatcttttttctttaggcaaatccctcatgtctcttctgtttctaacctctccctgtttttcacctctctgtctctccagaagtttcttcatagcctacaaaccttatcaagcctttttttttctcttaactgtgtttttaaaagcctgctttgcaaactgttgtttcattgagaccgtctttccctcaattcattcctgagtgtcctatagccagactgttaaacaccaccaaagatctcctagttaccaaatccagtggaccctttcactcttagctcttccttgacttcctgtggtattggacactgcctcctctttctttcctcttggaacatttgcctccttcagcttccatgccatcaccctccttggattttcttcttgcctttaggagtacagtgtagcttcatgggtaagagcccaggagccaaggtcctgtggcttcaagtcccatctctgctacttgcttgtttgatggtcatttgggtgactcacttgctaaaacctttctgagccagtatgtttctttgtctgtaagatgggatttccctgagatgatctatgtgaagctctgtgcacggtgcctggtgcattgctgcactcagcagatactagctgccactctgattgtaggtcaccttccctttccttctcctctggctctttccaccccattaatattgtcttgcgtggtggccccctccagctactaccggcgtatgctgacaactcaccaagcctactatggagaaatgcaaagtcagccatcctctttctcatccaaaaaacagaatcaccctaagtagttcctgtctacctggggcctgtttctgtccctgcctttgtttaggtcttcctttccttctttgtgttgttagtttctaagcagtcttcttgtcactcttgcacagtcggttccatcttgctgtgcagagttgacattgttcttccctgcctgagtgtcctccagtggcttcctgttgcctacaggatgaggtctgcacattttagcatggcttttgtgcccttcccctcccttcactgtgacctttcccttgtttttgtttcaaccttactgcttgttccagtctgctgaaatacttaactctttagccaaagtaccaagattggcctggcaaattcacaggcaactttcaagactgtttggaatttttttccgaattttttctcttttcacacttcccaatatagtcctctcaaatgtgctcacattgccctaatccagcctctgtgtgtacatattctactgcacttgattagttatatgcctgtcatttcacacttaacttgagggatcctgacttttaactagtagttagtataatactttggacgggggagacattcaaaagatggtgagtcaatgagtaaaaagacagatggactgcaaggggcattcagtcctaagttctcacattaagaaaacttgtagagtttattcatttttacaatgatactgatcaatttgaagtggtctcattaaagagaagctgtaacttgatctgagagaaagaactttcctaacacaggctaattttgagcatcatcttctcaaatcttatcaatttctcttctaaactataactccttttatgaagttgtcagtattcaaccattcagtttcatatggattaaggtatcgaatgaatggcagggaatctattggtctttatgtatctgtgctccttagatggggtggaaatggagactagcctggctgtgggtggatttccctcttggtggaatgaacagctctggcttagtttcataacctctccacgagacaagtgggagagaggctccccttccccttttcctagttggccacagtcccttgtttagctgaggcacagagggagtgaaagctgctgccagtggtgctttcaacaacctggggctgggacatcaacctggaaacacctctttttctcttgaattatattcttttggcctcatgatcataccacttgacttaggagttaaggtcgtgtggggcttcatgaggtcaggttttctgataagttctctcatagctgaccctgttccgaggaaagaacagtgtgtcttctcttcttgaacaagggtaaggactacagttgaagaaaaagttattctggtggtaaggaagacctcagtcaagaatactacaatgtaagtcatgactgttatcacaggggagagagattaggttcaactctgaatacagtgaagacaattggggatttatagctaacaagcagagtgaggtcagtgcatggaaagttactaacaggaaacatcaagttagggggactcgtgctaaactgacttaataggattcttgctgaaggcaggccaggatgatcagatgttgggggaggggatgaggaaattgatcagatatagagggtgccttagttcattgggctgctgtaacagaatactatagactgggtggcttataaagaaggaaattcatttctcaaagttttggtgactggaagtctcagggtgccagcatggttgggtgtggtgagggctctcttctagacattattgtagcctaacgtgacagagcagagagaggcaagctgtctctggattcttacaaggatgctgatctcattttgggggccctgctttcatgacttcatctaattctaattatctcgcaaaggctctacctcctatttaccgtcatgtggtggggtagggtttcaacatatgaattttgaggggacacagatattcggttcataacagagggtgatcagataccaaaagtaggggtatcctccttaaactgacttagcaagcttcttgctaggcaggcaaaggaggcccaatgacaaggactagttgagaagagggctcaggggagcctcttcaaagtgtggtcaaagggagagtctttgtcactatctcctggatccatgagtgccactttttcaggaagcctaatttagtgccactaaagagagaaggccactgaactgacctttgacactatgccctggggaagttcttcaccatggctatctctctctgttgtcatcttttaaaatttgattagtattatgttattgttggcatagcaacaattggaggctaagatggaaaagaaactttcctcctttttggtgactgtgcttttgtgcatttataataagacatgtaagattgtaaacgaggctagctttacagtccttttagctgtttgtttctcagtttagatggtacctaagcaggagttttgagggaatgtaaaaacatttattggtaaagtaaattctgggagcctccatttagcgtaagataaacatttatggctcagtattaataaagccttatgactctcaggatctaatgatatcactaacttttttttttttttttttgtgagacagagtctcgctctgtcaccttggctggagtgcagtggcgcgatcttggctcactgcaagctccgcctcccaggttcacaccattctcctgcctcagcctcccaagcagctgggactacaggcgcctgccaccacacccggttaatttttttagtagagatggggtttcaacgtgttagccaggatggtctcggatctcctgaccttgtgatccgcctgcctcagcctcccaaagtgttgggattacaggcgtgagccactgcgcccagccgatatcactaattttttttgaaatacgaagatattttggttattaaaagcagtgtatatatatgataaagtaatgtgtaacaggaagctttatgaagaatgtcttccaatacacctttataaagttctaaattcaaagatttgtattcctctggcacgtgaacgatcatttcaggctttgctgggttatcgtaaagtccctaagtatgtatacagaaacaggacttagatcaaaaggcacgtaacaagagcactgcttaaaattgagtactcaggatagggtattaagatttagtgcgggctcagtatgcttgtagatcaaaatggtgtgagacttaatgggaagggaacctgcaaagatgtgccctctgtgaaccaggaggtgttggtggggtttcgtcacagagaagagggagccagccttcccactgatggtattacaggtgatcaggatagcttctgtgctgaatcggccatgccaattcccattgtaaatggttcccttcccagttcaaaaggggtcacaaatcttatcaaatggtaaatttatttaatgactgaatatgatatatagcaagcggcttcctgtttgtgttatttactttgtcatattagtcatgatatgaataataccactgtgtttcgtgaattaggttctcagaggcactgtgactgacttccctggatttgatgagcgggctgatgcagaaactcttcggaaggctatgaaaggcttgggtaaatttagcttcctctttctaaagcaaatgtgatatttgtttttccaaacaagtcattaattacagtaagaataattttagaatattttgatctgaaatctgtaggagaagagatatgttaagataacaaaataatactataaaccagagtgtccagtcttttggcttctctgggccacattggaagaattatcttgggccacacataaaatacactaacaataatgatagctgatgagctaaaaaaaaaaaaaaagcaaaaaaatttcataatgttttcagaaagtttatgagtttgtgttaggctgcattcagagctgtcctgggccacatgtggcttgcaggccatgggttggacaagcttgctataaaccatccctaatattcagtctctagaactgaacaggcagttaaattcagcctctgtgcttttgagcttgtcaccctcacctgtgtggtagaggcccgagtcgataaggcagccatccctgcaggtgggcagctgtgcagctctgttcccaatcagatatcccattctcattctgctagactcttctctttccccagcctcttttctagtcatttaaaaacctctcatctcaaggatttccatgtgtcactgatctcctgtgctcaggctccttttgtactactgttcatgtgctttctggccctgtaagtccttccattgtatccagcccaccttttcagactcatctcccattactgtttaatgtgttctcagacccaaccatcctggcttatctgctgtttatgaaagccctgtatttccccactgctgagcttttctctcattctaaacgctgtccttcctttcgtcactgcctttcacaatccttccatccttcaatacttgtgggtgtcaccttctccatgaatcattctccaagattcccttccacctcctatcagctaggagacccttctttgagccccatttaacacctagatctctcctgaggcacttgtcacattttgccttagctcatacttatttgtgtgtttttaaaaaactaggtgccctaagttttttaaaaggcagaagtatttttccatctacttcacaataggttgggaatggggggtagaatatattggaaacgtaacattttatatattgtaaatttttaataaactgtttaataaaacatttatatatatgtgtgtatttgcgtctgtgtgtgtgtgtgtgtatatatatatgtgtgtgtgtatatatatatatatatacatattttttttttttctaagagatgggggtctcactatgttgaccaggcaggtcttgaactcctggcctcaagcaatcctcccatcttggcctcccaaagagctaggattacagatgtgagccactgcgccggccataaaatatattttatattcgcatagggagaggcaaggaaataaggtgactgggaagcgagttgccaagatcgttgggagagtatgcatgtaggagccaaaatgtaattgttaaccataaattgcaggcacagatgaggagagcatcctgactctgttgacatcccgaagtaatgctcagcgccaggaaatctctgcagcttttaagactctgtttggcagggtaagaccacacttcatcccaagagagaatgggagaacagctatcagttataagactagtttggaatatactgatattcttttgtaagcatcatttattttgtgattccgacttccctacttctgtttcttttccactctcctctaaattatcagctcttaggatacagtgctcacccagcttatcctcacataattgtttttccttgcctaatgctgtagaggtgccaaaagatcctgtagtgagaactgtctctcttcttttcctctgtgtttcccactcagcattcacatggatgtcttactatccattttctaggtgtaagcctgtattaaaatatgttttgttttaacacagtcacagtcttggttccttttgtcatgattttaactaatgggtttttaattagttgatttaaatgcttttatttgattaataattcaaaaaaatttatttgaattatttaaatgaattatttgaattatttaaatttaaatgaattagtgcatgcatggaaaacttaaatgtagtcttgttattctgaaaacgtatgtcacttaactaaggaaacaagtgcaaagcaaaaaagaaagtattctaaacaccatttttagttgtgtggtatgctgaaacttataggtaggaaatactgtgttttttttttcacaattacataattttttcataattacatacacaatttccccataggaacagatatctcccagtggtcaggagtcataacaatgactataatctattatgtgtttgaatgttattacatattgagagaaaagaaaaaattattacgtttgggtatgagagactaaatgttgtcctttgtaaatttcattatatgattattttttgaaattacaaagaagatatgtttctcagaatagtatttttataaaatagttttagactacttttaaaggtattcttttttttcaagttaagaaaaacatcttttagaaacaaatatcttgacgtataagtgggtttgctttagtttaagattttggtcacaggttaaaagtatgttattcaaggttatagggttttgtttagctcatgggccttctacttggagacagcaacataaagaattcattagagcaaaggactgtcattcatatttaagaagaatcttattacaatttctgctggttaacaaatttgtattttctgtgggttaggatcttctggatgacctgaaatcagaactaactggaaaatttgaaaaattaattgtggctctgatgaaaccctctcggctttatgatgcttatgaactgaaacatgccttgaaggtaaaaaggatgagtgaaaggaacattcttgcatagatagtattattttgttttggtaattacttcctcttatttgttatatttaaaaaattttatctgattatttcagtgagagttgcttggcagacaaaactgggaggcaataagcagtaaaggagggagaaaattacacgtgtgtcatttcatctttttgtagatttaaactcaataatactgggctgtttaaaattttcatatttttatagctttttgtattttattttcatgcctgtcttctgattttgaggatgtttaaaaaatattacagatgagctattttatctttttcagtagaaaattgcctgattagggaaccataatattgctcatcattttaggttaaaaggtaaagcttcagagagaattttcaagataaatattttctcatactctttccttctttcctgcccctctaaacactaaaatgaagtagctggtaaacttgctataatttcagttgcagcaaaaattaaatatgtattcccttgactggtgtttggaatgttgtataaatatgaaggcattgacacatttgtttaggctcatgggacaggaagtagttcagttgttagctgttagattttgaatgggcacattgagatttaacaaggaaataatgtttctcagggattcttactgatggagtggagagaggagaagggtcatcctgataggagctggtttgtgctcagtctcttcattttcctatggtgattcttttggaataaacaaaaatctgaggttattgagaaaagcactttttttgctaagtacttctgaaatgtcagcagtagttgaaattctgccagagaatgaactctaggtttttcagtgcttgatttttggcaaaaaatagaaatataaagaaaataaggcttcaatatactatcttttaaaaaaaattaagtccagctatatcgttgcatctcttagtttaatcatatagatgtgatttttaaaagcagaaaaaggaaagccaactaaaatgatttttcaaaaatccagaaagcaagtcccaattcctttatactgttctaattcctaataattaagtattgctatatttattgttacctttgatgtagaattttcctgtgactgcacagcacttaacttgggggtcaggggtttatcttttgaggtgcttattaagtatcagtgctcttccatgtacatttacgtgaagttttcatttttactctttcggtttttaaaaaattacttcatgtttcatgaaaatgttttacttttaagctagaattaactgatcaaattaaaagttacaaatttatgtaactggttatgtatacgtacacatatatacacacatacacatgataaacattgttttccattaggcaaaaagaataaaatggtctttggagagaaaatcatttaaaacttgttatttctataactaatagaactcatatacaaagaaatccatgttatactggataatatttatataactatgcaatttgggtaacatctataactttcttttaataactttctttttaatcttattgacatgttttctctattaaaatctccaaacagggagctggaacaaatgaaaaagtactgacagaaattattgcttcaaggacacctgaagaactgagagccatcaaacaagtttatgaagaaggtaaatgtttgtgagttatattttgacttcacctccactatcacttccttcatttctgtgatttgaatgcagtcctttgtaggtatgggaggcacgcagtaaatgatggatgaatgaatgaatgaatgaatgacctgcaattcaagctatttttctccttcagtaaggaaaagactgccttgttatcctctactattttcatattttataagaagctactgctgaagatggagtttacttttgcataggatttgcaattagtgtagggatatacaggttgtctttatgttaacattaaggtaaaaatggtttttcctcctttaaaaatatttagctttatgctagcaaaatttaggagttatataaaaagtacttttggaactttggaagagaaacctaaaccctttcccacatcagagttgataaagtacatttgagtaaatgtatgttgtcttagctaatggcagtgcttgaataaaatattctgcattttgatttttctttttagtgtgtcttttatatgaacagaaatctgcatttcggcctaaaatatgtctcatgaatagaatcaagaaaatgaagtaaaaagtagaggtagagagtccttttcttaccagatttcttgtagccaactctttctcctgcctgactgaggagggtcagactatccagtttctcagctcagtcaacagactccaagcctagtgtcttttgctaggggctgtatcttgccattagtttgttaatcttagaaatggctttgttaacccagcaagtcaaaacagcaaaaaattgtttagagcaactgtataattacctttctaaagggctgaatctctctttcctgcttctctttttataggcagtaagttcccaaccgctaaggcagaagtgatacatgtatctcaactttgaactttatttgatgtactattcaaagatctctttctggggatgttgacgttgatgagagcctttgtgctactggattacaaatggtgtgctcaaagggggtaataactgtgtggtctgtcctactcagccgtgtaattgagcactggctatgtgtctggcagtgtgttaacaggctgtcatgagtgacaaaaggtgtgcataacacagctcctgtcctcaagcagtttgtgtgcagtctcctcagtgggtgacatgacagaatgactgcaatatttaaaggataatgaaattcaaactaaagtaaaataccaatgatgttaaatgcaataatgcattcagaagagagaggtcatcatagctttggatgttagggaggcttcatggtacaaatcacacatgcagcagagtttcaagactaggtgggtttacaaagtgtccattgacagatgaatagataaagaatacgtacacacacacacacaaacacagacacacacacacaggagtactgttcagtcttaaagaggggaaatcctgtcatttcaacatcatggataaacgtggaggacataatgcaaagtgaaataagctaggcacaaggcataagctatgcatgatctcacttcttatgttgaatctaaaaaaattgaactcatagaaacagatagtaaaacagtgtttgctagggtgtaggggtggggtgaatgggagaagggactggtgaaatattggtcaaagcatacacgattttagttaggcaggatgaataagttctggggatctcatgaacagcgtggtgactatagtgaaagtataactattatatgcttgaaatttgtgaatacagtatattttaaatgtcctcaccacacacaaaaatatagactatatgaagtgatggatatgctgattaacttgattgtggtaatcatttcacaacgtacacatatatgaaaacatcatggtgtataccttaaatatatacaatttttatttgtccatcataactcaataaagctgggaaaaaaagactaggtgcattttgagtaggtagaaaagatatttttgggtgaggtactgcctgtctttaatggcatggagactggactgtggagagtgtattgagggacggagagggcctggctgctgtggaggatgtgtgcatgtccattgtgggaggtaaatggaacaagcgaggttaggctcagatatagatggttttgcatgactggattaggaatttggacttaattcacaggcactgtaaattcctgaatgagcagtggagtgctgaaggaacaattgagggaggaaggagatttgaattgagaggctaattggatagttatgtgtgtgggaggtaagctaggtatttaggaattgtggcccaacctaggtgagtgagaggtgtgaggaggataaatcagggacaggagaaacgtgataggatttaatggttaatatttacaggtgttggtgtagaagaaagaattaaagattcctacaaggttttgtatttgggtaacttgttgaaataaacatgtaactcttctgggccttttaaaatagaagtttcaggcttttaaagttcgtttgcttttgcataataattaaatatttaaataccttagagtaaggcctcctttcctttaatagcatctgtttgagagtagtgagaaagacttgtagactcttgtagatcccagttctccccttttatatgggcttacattgagcagctggaaatagaggtgggaggggggcctactttaaaatatcattgctgtctctcaagagttaactttatttctgcagaggaaaaataccttattaggagtgatggccatgcccaaagaaataaatctcagaatattagagatagaagacatttggaagctaaccatataaaagatttgaaagaaagcaaaacagagtttaagcttatgattgattgtgttttggagactttccagtaccatcatgtatctatagattaatgactacattggtcgagagaatttctaaatggctgagtcttgatttaagtttgaattgagtgcctttgggagactttaattcatttttgtccaaccactcactgaaagcatttgcttagagcattcagagatggaatagagggaatttatgttaaccaaatataattatttcttcttttacatcgctttcatttgattaatggggcaagattacttttctagttgaaagaagatgtaaataagtatgaaattattttgttgcagaatatggctcaagcctggaagatgacgtggtgggggacacttcagggtactaccagcggatgttggtggttctccttcaggtattgcgtggagattaattacagtttgattaaaaagcctgaagttggactgggctgaatctagttaagtaaggtcacttaaaattcttttaataatttgtggtacttgctgattcttactgcgatgattctgactgtatgttgcctgtgcttgtttgtgtttcagaatatctggtctaaattcttaacagctaactcatacatgttttagatagtagtatcttgttcctttcatagaatgatagcggtatcttgttctttcatagaatttaaaatcagtagggtcattattggttttggacagtgctgggtgatgataacgtgaaatagtgcaggattgatcttaataaaagcatattattcctagagaaagagtgttattgaataaccatcaggtggaaccatttttccttttgaatgagaatgctctatagttcagtaatgtgacatattacctctcataggctaacagagaccctgatgctggaattgatgaagctcaagttgaacaagatgctcaggtgagtgacaccaggatatgatgactttattatgctgtagaaatgaagaaataattcatggtaatgaaaaatcacaatgtatgttgtaatagcttctagtgataatcttgttaatgggttatttacatagcataagacctacataagtagctttttcttattctgacctggtcagcaaaatattttaccttaaagctgaaacgaaataaaataaattatatagtgagttccaactagacatgtttttttttgtgattattgaacattcacaaaatagagaattttaccaaaaaacagtgttattacttccactgccaattatgcagtgggtctcttagcaggagaagataaagaagaaagaataaagtatttaacagtaagtggtgtttaattacataagagatgacaagttattttggtattaggaaatttctctgcatttccttcgacagaattttaagtaggattggtcttctgtcagcagctttttagtgactccaaatgaaaatttcctcttaagtgacttataaacccctataaagtctcagtctggttaataaaacagttattaaaatataggaaaggaaatttgaaacatgagagctgaaaactggaaattggtaataaaggaattacttgggttcctagaaccaccaatcatagacctctttctggtcacatgtttcaattaagagaatatacaattcttggttgtttgtcatgtatcattgaaaaaggaagagccatattcattcctccagtggaacaacccatggatatgcgatctcactttgctaacaggaaagaggagagcggttattcttttgggtaggttgattttataatggtttcagaatgctgtcatctctgtctagctggagagaaaaaaagaactgaatgtttaccgagggctctctgtgcagtatttgactcttgcttcactctgtcttagaaaatgcaagccaattgtgtccagccccttcagactctggtggttccattgccctcaggataaagtccgggttcctgaatgggttacaagcccctttgttatctgtgtgttgtttacttatgcctccagcctctctcacatgctctctctgccctcttgcccctcccaccccgcttcacctgagtcctcttcaagagtcagtcttcagcttagatactttagagttaggtgcccctcacagggaaaaccatacccccccccgcccccaggcttcctgtcacagttcttgccacgttctctggaagccatctatttacttcactgccttcctgggccccctgagctgtcagttcaattgtatcctcagcttctggcatagagtaggtgctcagtaaataactgatgaatgaatgagcacataactctaccagaaaggggcaatttcccttttatggataaagaaacaaacccatggcttccactgaatagcagtggagttggaattcctaacgaggcctgtctgactccaaagctctttctctttcactagaagatagtcagtgttattgaatattaatatttcactataagaatatttcactgtaagatattcagtgttcttgagtattagtgccttccctgattttctctatcattaaagggcttattaaatatcaactcaagcatagatctagcttaattccaccttctttcgggaagagggctagagcaaccctacagagttgtactcctgttaggggctttgttcagtactgaggtgatcttactgctttccaagcattggttgtggctttgctaggagatagtgctgattctctcattcctactgtcaagagtaggataggagttctgggagcttttcagggtcacagtgtaagaaaccaactctagtcctctcagatgtctgcagtgaggcctgcattcacaggcagagggcagatttcccagcatagttggtgatgtaatgagagcattgctgcagcacgaggctcctgaggggaaaacagtacattttaaccttgttttcattgatttctgtccttggagcacttactggatagcactgctgctcaaactttcatgggcatgtggcgcacctgggacctttaattgcagattctgattctatgggtctgggcaggggctgggagtctggattttgaacatgctctcaggtaatgcctgcattcttggtcctttgattactgaggctgtataggtgacacttacgtgtcatgcagtggatataaccattcagaaccctgagagtacatgtgagactgtacatgtgaaaactgctttatggagttactttaaagtatcccttgaatggaatccaagcttttcttagccttccagtgactaggagcaatacagaacatgttacactggctattatttttgattctttcaaatgtattattattaattaataaacctgttgaaaacaaataatcttttggcattataaaaaggaacacaccaacttgtacctcgtagcaagggcagctggactgttatcactagtgagaatttgagatttcttaattgagagtaagctgagacagctaaagggctcttttataagcttttgcatttttgtctctactgatacctggcactaagaagatttctattatttgagaggtttgataagccatagtgagtcattcacttgggaactgaacgttttgtagataatccactttttaacatttttaatgtgttaaattgatttaatacttttaatgcattaaaacagatttaccttcttccccagtaaatccttgttttattctttctctggagggagagttgaactcttagaggaaagagggagaaggagaagtaatcaggcactttttacttttactgggcatttgctactgattacctgacactgttcagtgcattatcttagttatataatctccgttaatgactatatacactgaggctgaagaggagattaagtagttcatctgagatcttgcagatagaccacatctgttttgactccaaagactcatcctttgcactgaaccagggcttatgaaactgtactcaggctgaaccgtaaagcttagggaaggggtgtaagggtccctcatccagatggatccatgaatattgggcatcctcatttaggagaaaggatacttagattaaaacaaaactgttaaatatcattgttttacatgaagaagccatcattattattgcatatgattacttaataatagttttacagtagatattgatcccaaacataattctcccaagaaaattaaaacattgtggtaaaaataactgacatctcaccaattattcccatataacaggcttaactcctgtacctactagagaacatttctagacatttaaaacagttgataagaagtgtgtgcatcaatgtctgtgatattgtacaagatgagtcctttacccatttaggtgttaatgtatttgtatattttatctacatgtagaaacataccagaagtagtaactagcaccctcaggaaattgatattaaatagcaacttttcttttctttcctttctctttcccctttctcctttttccttttctttccttcacctttccttcccctcccatttccttaccctcccctttccttcccctcccttctccttcctatcccctctccctcccctcccctctccctcccctcccttctcctttccgcccctctccctcccctcccctcccctccctcttcccctttcctttccttcgtgcccaggctggagtgcagtgccatgatctaggctcactgcaacctctgcctcctgggttcaaacaattctcttgccacagcctcccgggtagctgggattacaggcatctgccaccgtgcctggataagttttgtatttttagtagagacaggttttgacaggttgcccaggctggtcttgaactcctgggctcaagcgatccacctgcctcagcgtcccaaaatgctgggattacaggcatgagccactatgcctagcctgcaacttctattttcttatttttgttctttcttagttttataaaatttctcaatgaacttgcgttgtttttgtaattaaattttaaaagttattttaagaaaggtctgtgtcatcatgatatagttctaaagtttagatgcatgcatgactttcagagttactgtcttttcaggttttaagagcatgttcacatggccagaattgatattattcatttttatctttaaaataattaattttaaaattgagcataaagatacatgagtctcatttttttcttattctccagaaatataataaaaaatagatctttaccaccataatctacatttttaaatatactgtgatcaaaacttctatattcaagcctgttattatcacttcctgtctttatttggattgctgcttgtgggtataaggccaactgcaagtagcagcctcagcaaattgcattcatcttgctttaatatgtagacttagtttgaaatgaataaaaggatagtacagtcattgtaaaggttgattctttgggttttaataaattattctcacgtcaataagtggattcagagttaacgttgatgtttgtatataagcttatttttttaggcagctatacgtgcacaagaaagcatattttttccccatgtcaaaaaggaagtatgggcactcaaactattcaaccactacttattgagtgcttctatatgccaggcactgtgctatacccacaatcttttaaaaatttattgtgatctttggaaatatgaaaacattttatagctagccttggttaaatctcagttgtaaagagaaaatatgaagtgtacttttactcatgtgctattgaacagctatagaacaagcaaaacagaaaaggcagacaacttagcttccagttaaatcctttcccagtctatacatggatgtatcaacagtgaggtagtcataactttctcctgacccatactgttgcttctgaaagattggaggttatggcagacattttgggaacatgtaaccttgcaccattgccgtgctttgttgcttggacccatgaatcttctgtggcacagttcagtggcaagctccaaaggtgctccaaactcagtgagctgagtttcagagtaggacacattagaaatgaaaactattaatacaagatgatgaatcaagtgagttaaaattcagggagtaaaaaacaagtgtgtttaagaacctggaaatgagatggaggaacaatttattaattgagtttgaaatttttgcaggctttatttcaggctggagaacttaaatgggggacagatgaagaaaagtttatcaccatctttggaacacgaagtgtgtctcatttgagaaagggtgagtgaaaaaaatctgtatggggcagatacattggtaaatttggaaagtgcatgagccagtgtgacagaatacctgctacatagcagggacttagagaatgaatcagtttttgtatttcttccttttggtgacctggagaaatctcaacattgtttttgctgctgttgtagcttttacaaactagagatcctgagtccacccttcactattggaggatggcaagggaggtcagttctctagattgttcctctcatagtcacacatcactgaatagtggctcactacacgtatttcctcctagaggttggtacccaggaccttatctctggatagtcatcagcacttgtggtatcagttgggaatgaatttagtgcaagtgacagagaaccctaatagtggctttaaaaattgggctttttttccagaggtgggattccatggttgatttggcaggacctgagatctttctggtttttctttttgctccattatccctagtgttttggttttctttcttcattatcataagatgtctgctctagctccaaacttaaccatttcacagcaggaaggaaagaaaagggtaaactagtcctatctgtgtatcactttttgtaagtgaggagatttctcagcatcccctccagtagatttacctttaggtctcattggctataactcgtaagggggctggcaatcagtgaacaaagtatatttacaatccattgcttagggcttggcacattgaggctttgagcacaaggttctgtcagcaaggaagaaggggagatttgtgttcagtaagacactacctaatcaaagtaaataccatctttctggaaagagtgatccctacatgattagggaatcatttttattttttctagtgtttgacaagtacatgactatatcaggatttcaaattgaggaaaccattgaccgcgagacttctggcaatttagagcaactactccttgctgttggtaggtgatttacaatgtattgatatttttggtggtaagagctaaagcattttattcaattgaggctgcatctgaaaataaccacctaggtgtgaaggaagagcttgatatgatatttaggggaagcaaactcccaaatttccaattcagaaatttattttgatgttggaaatacaggattgtctggttagttcatctaaatcctatggaaatactaagataattgtttaaaaatcattttgaagctgcattaaaaatattatttattgataaacctgaaatgtcgtggacattatctcagaggcttgtaaacattatttctgatacctgtggaattttagaatttttttgaatactgttctctcagctttgaggcagactaagaaattgtcatctggtttagaaaagaagaatatctttgatgtaatagaagatgtgatgatggttgttttcaaattaaataatttagttttattttaattaaatattcagaataatctggaaaaattggagaactgaatctgtgcagttgattgcagtattatgtactccaaagctagggagaatctagtttgtgagtctcctgtggtccttttgttcatatgggtctgcagtgagcctctgtctgctgtttgttccaagtatttggccttgagctcacacttttgtgctctctgtcttcaggagactaagctaaagatctgcatgaaccaactctaaaagtagcctttcacttgagtacacagttaatgtacttttaccagaaaacttttagacaggtccttcataattagaatacgcatacaaattaagacattttcagttactggtggctgtttttcttaagacttagaaaagggagaattaagaaatctccacatgcaaggattatttttgtatattaaggaattttcatgatagattttctgaagctaagcagactgaggtctgagcagccccaacctacattcaacatgtacatgttcagagaagagatcctttctgatattgatttatctgtttttgtactgaaatggataaatctcatgctgctctgtgtgaatcattgatattaaagaatatgtagagagtataggaagatcacccaagagtttaaaaaaattaggtagtaatcttgtattatttgctttaatgtcttggaatgaaaacttccaagggatttgtgtaatttattggtgatgaagaatgttgtggtattatgataacaatccaggctgcccaaactgcagtatccaaaaagtcttcacagaaccaaggcgcatagaaaaacctgtgcccttattctccatgcctttctatgcagacctcagaactccaaggaaaacctaagccagtgtctaagaaaatacttggtgagtgaggaaatcagattagcttacagctctttagcctctggtacttttgtgtttttatagaagtagagctataagcaggaagcagcacttgatttttaattacttaatcctttacatatcaaaatagcatttgaccattgtattgtttattttcttagtgaaatctattcgaagtatacctgcctaccttgcagagaccctctattatgctatgaaggtaagtggagaccatgaaccttctatctaatacatttctctttctaattattattcttcacttttgtttatgttttagatgatagaccttgggaatttttcccttataacattcaacccagttctactaaattgttataccttattgattcacccgcacccgggagcatttgatcctatgtttgaagtttttaagcattttgcttctctctttttttttttttttaaagggagctgggacagatgatcataccctcatcagagtcatggtttccaggagtgagattgatctgtttaacatcaggaaggagtttaggaagaattttgccacctctctttattccatgattaaggtagtagaacctttctttaaattacgtttgggaatccaaagcagactggtatgttgcatgaaagacaaggataagagaacctgattcttgtgttaagtttaaaattttagtgacacgattagagcaatgagttaaaaagcttagcataatgtttcctgaagtagagatgatggctcccaagtgaaagcatgggtattgatgtggctgaggctcttggtgaactcagaagcattatttagtagtggtaacagatgactcaacaaaccaaaccccttgcctatgataataatgtgttctttctgtcttttatcaattccagctgtctttattagtccttcttttatttcatatcagcttttcctttctttatcgtctgttatcaccttatctctgatgctggtttctaattcaggaaagagccaaccaggtcatattgggagtaaagagcccctaggtattagtatcatttttgttctttttaaaacaaggtgctctgtggcctataattacatttagcttaaagtcttttgactttttttttttttttccagtaaaggttaatgtggaccatgtgcaaagcaagatttcaattgagcagaagcttttagtttagcatgtttgtggtttggctggcccaaaggacactagagagtttacccatgcacttttagcttgaaacattaatttatcatgcatgtctgcatgtgagacaagcagatgcaaagcatgttctgcccttctgtctcggagggagagccatgacagccctgcagccccagcactgcccgtgttagctgatatataccaagtgatagaaactattctgtctagaaggcttgatttgactatagttgttaaagttgcctgattctttgtgttaccagagggaatactgagtgtctgaggttacattggtaggaaactccctgcataacattcctgatgtgaaagtcacagagattacccacttgggagaagagtcttatgaataaaatttgttgccagttatttagttttaaaattttctatggcttctgtgagtcatggaggttaatggaatacatttggtttcagggagatacatctggggactataagaaagctcttctgctgctctgtggagaagatgactaacgtgtcacggggaagagctccctgctgtgtgcctgcaccaccccactgccttccttcagcacctttagctgcatttgtatgccagtgcttaacacattgccttattcatactagcatgctcatgaccaacacatacacgtcatagaagaaaatagtggtgcttctttctgatctctagtggagatctctttgactgctgtagtactaaagtgtacttaatgttactaagtttaatgcctggccattttccatttatatatattttttaagaggctagagtgcttttagccttttttaaaaactccatttatattacatttgtaaccatgatactttaatcagaagcttagccttgaaattgtgaactcttggaaatgttattagtgaagttcgcaactaaactaaacctgtaaaattatgatgattgtattcaaaagattaatgaaaaataaacatttctgtccccctga

SEQ ID NO: 349 - DNA, 18361 bp, Homo sapiens
  source 1..18361: mol_type = other DNA
gcctatccggagcgatccatctcgttacgtcaccaccagcctagctcggacggcaagcggcgggagattttcaaaatgggagcccagaggcaccgcccaggcctcggaaggtgtcagggagaactttccgtggtttcagcgtcgtcgcctggagcggcggtttagagagccgagcctgatgggcgccaaggccggctggctgcttggagcgctgcctcgaagggactgcgtgaaggaagctaatccggagaacccaggccagagcctggaaatatggcgacctgcatcggggagaagatcgaggtgaaaagactcggcagtctgcagcggggcgggtgggagtaattgtgggaggacacgagaccgctgtgggaaggggagcgaacgaagctaacggctgcggggcgggcaccgaggtgcttagggagggtcccaacggcccagacccctgctgtttaggggcggagcggcccgcccctcaagagacaagagtagggaaggcgggacaggtgagtccctccccgcccggcagtgtcccgaggcactgcggctttctttcagcaatcccgcccgagctaccgcgttagagcagggcagggctacctcccacttctccaaggggatggcggttatctccggcgggagctgcggcgggattctgaccgagccctccgctcccggggattggctggagatgggaggagggcgcttaggctgcactgaggttgaggaaccagatcactagggtgcaccatcaccctgagcttccagtccagcctggaagcgcaggtatccccgcacggagtcaacatgccttccaccctagacacctgctgcatcgaggtgtaatacccgcttgaattttgtcaaattccccactcgatccattttatcttctttttccagccccttcccatcttcctttctactgtgagtcatcacacataatctttaattttaacttttaaggattttaaagttggaaatctgcttggtaaaggatcatttgctggtgtctacagagctgagtccattcacactggtttggaagttgcaatcaaaatggtaagaataaactaatcaacttctctcctgtactttgcaagtaactagagaggtatcagagatgtcagaaactccttgtctactagcctttcctttgattatagtgtaaggaacactttacataggcagaagacaatagtgccaagtccagccgttgaacttaaaaatattttaggaaagccttgaccttgcttaagtaagttttatcttcattaatgttcagtagacctcgtatgtggtgtaattatccatacttggagtaatgagtagaaatcaactaacaaataatttgtttatagttcactgtgtataattttgtatttccctgtaacatacaaaatattattcttgattgttagaagtcagcctaataggagtaacataaacataagcaaattaagaattatttgtcagccgggtgggtggctcacacctgtaatctcaacgctttgggaggctgaggcaggtggatcacctgagctcaggagtttgaaaacaactgtgcaacatggtgaaacctcctctctaccaaaaatacaaaaattagctgctgctgggcacggtggctcacgcctgtaatcccagcactttgggaggccgaggcgggtggatcacctgaggtcggtagttcaagaccagcctgaccaacatggagaaaccccatctctactaaaaataccaaattagccgggtgtggtgctgcacacctgtaatcccagctactctgaaggctgagcaggagaatcgcttgaacccgggaggcagaggttgtggtgagctgagatcgcgccattgcactccagcccaggcaacaagagctaaattcccatctcaaaaaaaaaaattagccaagcgtggtggcatgtgcctgtggtcccagctactcaggaggctgaggtgggaggatagattgtgcctgggaggttgaggctgcagtgaactgtgatcatgccactgcactccagcctaggtgacagtgagaccctgcctttaaaaaaaaaaaatcatttatctaaaccacttagaaaaagaactggaggttttgctctaaaatttgcctgaattgggatttttttttcttaatagttaggctagttgtgctattagattatttaaattgagataggatattagaattaattggtcaaacttttaccaagcaccctctctgccgagcactctgctaggtgcatggggaaaacagataacagtaggttgaccacaaagacgtataaaaggacttcagtctattttaaagtatactttattttcaaagttcacttttaagcagtttatatttgaaagtctgtcaacatttaaacctgttatttttagatagataagaaagccatgtacaaagcaggaatggtacagagagtccaaaatgaggtgaaaatacattgccaattgaaacatccttctatcttggaggtaagatataaattttgtagaagtgaccaaggacactgaatttttgtatattttaatttattatgccctttcacatttcagctttataactattttgaagatagcaattatgtgtatctggtattagaaatgtgccataatggagaaatgaacaggtatctaaagaatagagtgaaacccttctcagaaaatgaaggtaggtgtgtggttttttttgtttgttttgtttgggtggataaaagttttgcattttaaagtgtagttttgaggaatatgctattttataatatatagtaaaactgtttgaattattactttaagctagaaaaggagatttcctacatcccaagctgctaattcttaaaacaattcaattattacggtagtaaagtaagaaatttgttatccttctgtccttaaaaccacattttaaattaaattattggtagcagtttactgtgtatcttttcaaatgtagtaacctttttaggatgtcattggtgactataaagtagttctaaatcaagcataaatagccattgaaactgtttattatagaaaacatgaaacatacaggtagtgtgctataatgagtcccctgaacttaacactcagcttccaaaactagtgactcatggtcatattatttcatctttactgtttttactaccttgattttccaaagtattttgaagcaaattatagacatatttttaactagaaatatttcaaagtatagacttctttaaaaacgtagccacaaagtcattatcacacctaataattatttactatcaaatatatagcttcagacttcctcaatttctcataattttttgcagttcaaagcagaaccaaataaggtctatacattgacacaaatgattgttttcaagttatcttgctctgctaactgagattacagacaagctaacagaagtagttgctgataggcttcttgtacatctgaatctatataagccatttggaaaacaattcggacatatgtatttagagttacggaaatatttatattctttgactcagattccattgttggaagtttattccaaagaaataatacaaattgaaaaaaaattgatactcatcttgataatgactactgcagttttttataatacttcattaaaaaaggccttattaggctgggctcagtggctcacgcctgtaatcccagcaccttggggggctgaggcacgtagatcacctgaggtcaggagttcgagaccagcctggccaatatggtaaaaccccatctctactaaaaatgcaaaaattagccgggcacggtggctcatgcctgtcatcctagctacttgggaggctgaggtggatggatcacaaggtcaggagatcaagaccatcctggctgacatggtgaaaccccgtctctactaaaaatacaaaaaaaattagctcggtgtggtggtgctctcctgtaatcccagctactcaggaagctgaggcaggagaattgcttgaacccgggaggcagagattgcagtgaactgagattgtgccactgcactccagcctggtgacagatcaagactccatctaaaaaaaaaagcttacaaattgattacttgggaaagtttgggagacatcgttggaactttagctttttcttttttttaacaattagaaaatatgtatgaatcgtttgtgcaattgtttttcttaattgctatggttaccctaatgactctcagttgctaaaaaaaaagtaggcttctcttaactgcatgtaaaacgctcatcagttggaaataacgaagattaaaaggaatgcctagttttcttaaaggttaatatgataggccaggcgcggtggctcaagcctgaaatcccagccctttaggaggccgaggtgggtggatcacgaggtcaggagattgagaccatcctggctaacacagtgaaaccctgtctctactaaaaacacaaaaaattagccaggcacggtggcgggcgcctgtagtcccagctactcgggaggctgaggcaggagaatggcatgaacccgggaggcggagcttgctgtgagccgagatcgcgccactgcactccagcctgagggacacagcaagactccgtctcaaaaaaaaaaaaaaaaaaaaaggttaatatgatctctttagaggggtgtgttggtaccactctgataattgctggtaattgaagtggctggtaaatctaagctccaagccactgttctactacagtgctctagaatatttacctgggtttcataatgtatactaaatactagatactgaatcttccagagtttctaaattgtaaattctcttttttaaaatcctaacagctcgacacttcatgcaccagatcatcacagggatgttgtatcttcattctcatggtatactacaccgggacctcacactttctaacctcctactgactcgtaatatgaacatcaagattgctgattttgggctggcaactcaactgaaaatgccacatgaaaagcactatacattatgtggaactcctaactacatttcaccagaaattgccactcgaagtgcacatggccttgaatctgatgtttggtccctgggctgtatgttttatacattacttatcgggagaccacccttcgacactgacacagtcaagaacacattaaataaagtagtattggcagattatgaaatgccatcttttttgtcaatagaggccaaggaccttattcaccagttacttcgtagaaatccagcagatcgtttaagtctgtcttcagtattggaccatccttttatgtcccgaaattcttcaacaaaaagtaaagatttaggaactgtggaagactcaattgatagtgggcatgccacaatttctactgcaattacagcttcttccagtaccagtataagtggtagtttatttgacaaaagaagacttttgattggtcagccactcccaaataaaatgactgtatttccaaagaataaaagttcaactgatttttcttcttcaggagatggaaacagtttttatactcagtggggaaatcaagaaaccagtaatagtggaaggggaagagtaattcaagatgcagaagaaaggccacattctcgataccttcgtagagcttattcctctgatagatctggcacttctaatagtcagtctcaagcaaaaacatatacaatggaacgatgtcactcagcagaaatgctttcagtgtccaaaagatcaggaggaggtgaaaatgaagagaggtactcacccacagacaacaatgccaacatttttaacttctttaaagaaaagacatccagtagttctggatcttttgaaagacctgataacaatcaagcactgtaagaataattctatcagaggcattttgttttttggtaacattatactagtataaatatgaagctgcatgtaagcggggggataccagggaaatgaatgtctaaaaaaaaaaaccactgtcatgattttgacctgtggttaacagtcttaacaggagtgtgtgtgttcatgaatgtgtttataaaattgtttaatatttggaaatttttagcctcattttttaattttatatggagtgagtctccagtgcaaagtatcatatatattagtcatgccttaccccctaaagtacttaataataactgtatacatagatagaaaagctgagattgagtggtcataattctgactgcttccaatatgaaaactaattttcagtgactgtattgtgtgttttttttctttttctgttcattttgtgatttttatgcttaaattataagagggcagtagccatacagaaatgctgtcaaagtgccctgggcattttggcatgggagtttagctttttaaagatagcatagttatgccaatattgttttctatagttattctaaaatgttcaggtattcaaatcagaagaaatccttctctaatatttttaccttaaaaagttacctgataattttttattagtttatgggatttttttgtttgtttgtttagctccaatcatctttgtccaggaaaaactccttttccatttgcagacccgacacctcagactgaaaccgtacaacagtggtttgggaatctgcaaataaatggtgagtttttaatggagtatttaatcaagaattaattacttggaaacttaccaagcattgcagtgttctatttgagatttttaaagaaaatcattttcttgcttggtgcagtagctcatgcctgtaatcccaacacttgtgaggccaggactggtggattgcttgagggcaggagttcaagaccagtttgggcacatagcaagaccctgtatctacaaaaaataaaaaattagttgagtgtggtggcatgtacctgtagtcccagctacttgagaagctgaggcaggaggattgcctgagctcaggagttcaaggccgcagtgagctatgatcacactgcactccagcctgtgtgacagagagagagaccctgtcaaaaaaaaaaaaaaaaaaaaagcattggccaggcgtggtggctcatgcctgtaatcctagtactttgggaggccaagccaggcaggtaacttgaggtcaggcattcgagaccaccctggccaacatggtgaaaccccgtctctactaaaaatacaaaaattagctgggtttgctggcacacacctgtaatcccacctactcggatggctgaggcacaagaatcgcttgaaccagggagacagaggttgcagtgagctgagatcacgccactgcactccagtctaggtgatagagctagactgtctcaaaaaaaaaaaaaaaaaaaaaaaaaaaaaaaaaaagcattttcagtacgtctcaataaagctctgttacaatatttgaatatttgctgtaagtcagccactgtccttaatgtttaacatatattaagttctcacaaaaaaacatgaggaagatactgttattatctccgtcttacagatgaggaaactgggtacacagagcttaatttgcccaagctatgtgaccattcagcagaggagccagggttcgaacataagtagtctggctcagagactttattcttaacccctgctcttgcagcctctctataatcagcaccttctatcagtgcccataaaataatgaaaagatgattgaccttatttttaagtggaagctgataaggacagtatagggtaccaatgggacctcacactaaagtacagagctactaaaacctaaatatttttaaacagctatcatccaagtcatgttgtttataatacagagtttgaaggttaaacattcctcattaatgaacatgacagattcacagaaggtgaattgggaaataatgatggaaaaaagaataaaagagacatatggagaggaggagatcattttttactaagtatcgtattacctcatagacaaaaagcaaataacacagctgtaatttaatcagagagttgtatgttatcttgagtctattctctttttttaatgtatattattctcagaagcccaaaaggaaattaatctttttatttatagtaattagagatgataattcaggtttgttttttaaactataaaactgccacatacttaattttgcacatctgttgtgtttacagatacttatatttagtaacacagacttgtctgagatggagaaataaccttgtttataataatccagtagtgttcctgcaatttttcagtatattatttgatacaaaatactttctgtcataaggagagtggggggaaagcactaaaaagtcatttaagaaaaaaaatataattcaaatttttagtttagcattgaaaaattgccttaccaagttttatataatctgatcatttaaagcctgtaaaagatactgttctgtatgtgaactttaaaaccatacaaaataaaaattggtaaacttaattacttttttaaaaaatgctggtgcaagtacatgtgtaatattaaatattaatgttaaagctgttcatatagtgtttttgcttttagttgcatattttcattaattgcaggtatttctaagtaaagatgggctagacagttcttagcttaaagagagtaagtttatatatttttctcatgtagaatgattacttgggaactcaaatctgcttttgttggcacattggcagttgcatgctttaggattaataggtgaccatatagtgactagtttttgccttaattgaaaaattaattttatgttaatatcttttgtgtcttagtcttaggaatactaaaggtatttcttcacgatctggtttaaaatgttctttcaaagtcatgtcttaaactgcttatttgttagaaaattatgagctcttattgttttgttttttgtaactagaattcttttgttcaaaaaatgctattacaatcagagtgacgttattttgtgtcgacttgtgtttttagttatttactaaattgcttcattctatgtatattgtagctcatttaagaaaaactactgaatatgacagcatcagcccaaaccgggacttccagggccatccagatttgcagaaggacacatcaaaaaatgcctggactgatacaaaagtcaaaaagaactctgatgcttctgataatgcacattctgtaaaacagcaaaataccatgaaatatatgactgcacttcacagtaaacctgagataatccaacaagaatgtgtttttggctcagatcctctttctgaacagagcaagactaggggtatggagccaccatggggttatcagaatcgtacattaagaagcattacatctccgttggttgctcacaggttaaaaccaatcagacagaaaaccaaaaaggctgtggtatgtctgttatcttcttaagttactaaataacattttacttgagaatacaattcttgagaacatattttttagtcctctgtaatgtccttttactttggggtgtatacatgatcaactttattaaagagaaaagagactgggtgtttatggaaaaacagctcttatttccctctatcttcttaattatagtgacatgatactggtaagttttgaattttaaattattaatttaaagtagatttgaatgaaaaacattttaaaataatactggctatatgctggttaaagattattttgttcacaattccaatcagtgagctaatattatcctttgcttctatttttattgtttgtaaatttaatcccatctcaaattttaaaaaactggaaaatataacttttatttttttagcttctggaactaaagaaaaggcatatacacatttaagtttagagtttaaaaattattgtatgtgaattgagaatggtgtgtgtttttttaattctatctttatcctgttgtttgttcccattttacttcccatttcatccttgcctttgtttggcttgctattatcttttcaaagtccttattctccactctaccttctgtttgctttctgctcattgattatcacttcacacttcattatacattcttaactttgcaccatatggttcacagttgtgctcaaatatacctctgatctggactgttgtagtgaagcagctttgattttgacttcaatatttgtttctgccatggttaagtactcctaagtattatgtatgtcagagctgttctagtaaacaaaagaattattactgattttgggttttttttttttttaggtgagcatacttgattcagaggaggtgtgtgtggagcttgtaaaggagtatgcatctcaagaatatgtgaaagaagttcttcagatatctagtgatggaaatacggtaatgtgtagttactttattaccttgcaacttcaaattatcgtttaagcacgtttagcattctaattcattttacaatgatgtaagtttttttaaaatcagtttgccagtatgatagtgtctctggaattcaaaaattgaaatagcatattaaacatatttaaataaattggtgcagtgttaaaaataattatatctagtaagaaaatctaaacttttggtttaagttaaaaagcaaaaaaattacttttacagaatatttaacatttttctataaaataatatttaatgttacatttaaacactttgtatacgttttagcaagatatagtactggaacttaatggcatgtaattagaattttaaaaaaatcttttggcagatcactatttattatccaaatggtggtagaggttttcctcttgctgatagaccaccctcacctactgacaacatcagtaggtacagctttgacaatttaccaggtatgtgaatttaccagggaataaattttgatagtagatttatatgtatatacgtataaactctatatatagatataataaattataaatagcttcagtcaaactttaggtcatatcatattcttgtactttgtttctggtgagagttgtatgcctttaatgcaatgtttattattaatattctgtgttataatggtactatattctatttaaaaactaactctagaacattagtcatatgtctcacaaatgtaatttgtatacttgtttagaatgtggctatagttatgttaaaaaaaattcaacattgtgcttgcttcagagcacatatactaaagttggaatgttacagagaacatggcccctgtgactcacaaatttgtgaagcattctgcatttaaaaaataattcaccatgtatgtggcttttgagctttgaaatcagtgctgctacataaatgattatttataattatagttaaccaaatttgactcccagtttggtttctggatattatggactatggacataagtactgaatagtaagccttcattgaggtaactcttagaaaagaataagaaaacctgtctaatgtaaccctattagaaatcacaataaatagataaaactgtatgtcaggtcaacactttcttccctaatgttaagtattttttttccttagaaaaatactggcgaaaatatcaatatgcttccaggtttgtacagcttgtaagatctaaatctcccaaaatcacttattttacaagatatgctaaatgcattttgatggagaattctcctggtgctgattttgaggtttggttttatgatggtaagtaccatttggaaatggtaatttgttcctttagtttgtaatttagtagttacgtatatgtgggtttttaaaattcaacacagtcagttttaaagatgtgtatgtatataactatacatataaattgcacagcggagtatacatgtcaaatcatattaatcaaaatttatctagccttcctttaaacaatttatcctataatatgtatattagtcctctttttctacttagctccagtttaactacgtctaggctgatggtataaaaatcacatgaaatgcgcaatgtcctatttcttattagaaaccttaaatggacatataccaaattatgagaattataaatgtagcaaaaaggatagggttgagtctaaatctattctgtaaagatgaatgttcttattttctaaatctattctataaagatgaactattttttaatctataaacctcctttaagggacgcaaagcattcatatcacacagtacacatataattatagctatccttcaattatgtttttgtatgaatatagtgattttttaaaatgtaaaagtatcaggcttaaaccagatatatgttgggaaaaaaatggatgatccatatttattgaatgctttgatagtctcattttattaatagtcaataaatgaataaaaatgataccttgatccaggagccattatatactggtatgataataaatataaatctaggaatatttttaaaaaggataagagaacagttttctgattttttttttttaggggtaaaaatacacaaaacagaagatttcattcaggtgattgaaaagacagggaagtcttacactttaaaaagtgaaagtgaagttaatagcttgaaagaggagataaaaatgtatatggaccatgctaatgaggtacatacctaattgtaggtttttcataccaattaataatgattgcaaatgacataggtgaaacaatgacagaagcactcttcttttgaaatagggtcatcgtatttgtttagcactggaatccataatttcagaagaggaaaggaaaactaggagtgctccctttttcccaataatcataggaaggtaaatgtctgaaaattttaaacatatggctaaaatgttttaaaagtttgatgtttatattataaacattctttagttttctgtaaattgaaagcttcaagggaatatatttggacttttccccttcagaaaacctggtagtactagttcacctaaggccttatcacctcctccttctgtggattcaaattacccaacgagagagagagcatctttcaacagaatggtcatgcatagtgctgcttctccaacacaggcaccaatccttaatccctctgtaagtaaatatatgtcacttctgtactttaaacctttcaatgattgcctgatgcccttcttgtaaaatagtttattgtggctttactatcatctacgtacttttccagcctcatcctgagccactttatcccatactatttatgtttgagcgtcaaaggccttctttcagttctttaaacaagtcaaagggccttttcacatgctgttcacttgacctggaactcttttccccaaccacttaactttatatgtgtaagtcttatttttcaagtctctgtttaaatgttacctcaatgagccctaatctcagccctctggggaaagctaagtgtattaacatatacatatgtagtttttttttttgtttttttgagacggagtcacccaggctggagtgcagtggcacgatctcggctcactgcaagctccacctcctgggttcacgccattcttctgcctcagcctcccgagtagctgggactacaggcgaccgccaccatgcctggctaattttttttgtattttcagtagagacggggtttcaccatgttagccaggatggtctcaatctcctgaacttgtgatccacctgcctcggcctcccaaagtgctgggattacaggcgtgagccaccacgcctggctagttgttttatttttactagtaaaatatcattaactgcctaaatgctcatgatagactcatgattaaatttattatatatttaatgaacatggcgatgaagattatatagcagtgtagaaaaatgcaacattaaagaaataggtgtgtatatttgtgtgtactcacccacatacacaaaaagaacatgccatgggataaaaagatgaaagaaatccaccaaaatgaaaacagcaattgtgcaggagggtggggggttcttttctgtatttttctaatttccaataatgtggttatattttcgttaaaaaatgtttgtttttaaaaaaattaagctaatgaaaaatctcataattgtctgcttttgctgaatgtggcttataaaaatgctgaggaataatatcttcctgtcctttattctttgtagatggttacaaatgaaggacttggtcttacaactacagcttctggaacagacatctcttctaatagtctaaaagattgtcttcctaaatcagcacaacttttgaaatctgtttttgtgaaaaatgttggttgggctacacaggtgagaagtttctagtacagtgcattttctcagtatgaatttcttttcattttcacactgataagacaattaccaaaaaatacaaattattgtaatgatatctttttacaaggaagtttttgtaccttttaacattggttatatcattaaaaattttaacttcttaaatttgtattcagttggaagactccagacattgctgataagaggttgcctgctaggcttgggtgacctacttttgccatttgtttttaaagtagaggtcatgataattactaattgtgaagagtagagtgtgatatctgggacgttttaaattttggaaattatttgtaatcaatattagtagagtaactttcttttttttttttttttttttttttttttgagacaaagtctcacactgcaagctccgcctcctgggttgacaccattctcctgcctcagcctcccgagtagctgggactacaggcgcccactgccaagccgggctaattttttctatttttagtagagacggggtttcaccatgttagccaggatggtctcaatcccctgaccttgtgatctgcctgcctcagcctcccaaagtgctgagattacaggcgtgagccactgcccccggccagtagagtaactttcatctggcaaaagaagaaaaggatttttccattaaaagtcatgtgaaagccaggtgtgatgtcacgtgcctatagtcccagttactcaagaatctgaggtgggagggtcatttgagtccaggagtttgaggccagcctgggcaacaaagcaagaccccatcttttttaaaaagtgaagtcaatattgagtttcaaacttatagaattttatgtagttgtgaacctatatgtgtatattatctaaaatcttgaaacttggagagacttctgagcctgacacatgtacttttacttaacagtgaagtaaatgcaacctagtactttatgggggtaggtaacatttgttgagcacctgctttgtggtacctaccatgtttttcacatactttgtctagtttatcccccaaaataacctagtaaagttgtatctccttttatagatagtaaaattatgcttcataatggtagattaacttgcacaatcctacactgtactcttaagttggcagagtctagatgtaagcctaggtgtgtttgatttggcgtccatgtactatgcacttctccattttgagtgacacattgtgactattaatgactaaaggaagaagtttcagaggctaaaatgtaatattctcaggccaggaaagaaattcttgtggcttaaggacaaagaaaatgttgcttttattccctaaatctcttcttgttaagaaatactaaatatttcttgtgggggaaaaaaaccaacaaccaaaaaacttagaaatcctaatggaaattaatgggaaacaggattcactttctaataattttaatattgtaataccttagctattaaaggaataatctgaaaaagacatgaatattctcagtgctctgccatcgtagccccaaatttgtagtcacttagagagttttttttttaactgtggaaaacctgttaaatatgttaaatattaatacagaaccacaaaccctctactgtatagtaattttgtgtgctactactgctgtttttttttttttctgtgcctgttcttacccatgcttattatttttctagttaactagtggagctgtgtgggttcagtttaatgatgggtcccagttggttgtgcaggcaggagtgtcttctatcagttatacctcaccaaatggtcaaacaactaggtaagttcttaaaatactggtcgagattcagccctttgctataatttctctttctctatatgttgaaatggatgatttaataaagatacttctttcattttgacaatgatcgtgtgattctttaaactgttaattattcttagcaattcatgtagtcattaatgcatattttatgattatctgtattaactcagggcaattggtataaataatccactctaagaggttgggttccttgtagccttactgttccatagtgtaactcgatggcctttttcagaagtaagggactcctaattctaggttcaaataatataccaaacctatttacttaaaagaacagaaaaaagaaatctttaagatataacctgcttatttttcccaaatgaaaggctatatccccaatctaatgtaacgtgattaatgtttgaaagacttttttgaatgtgtatattcattctatatgaaaatatgtgtcaggcaccaagccaaaaataaagaatctggcaatatgaaaaacaaggagttatttgctttcctcatttaaatcagaacttactaaaagtagggtactgacgatgccaatgcaggcgttctcttttatgagaagtgcttattgtaatggaagtacttgggacaaatataatctgtagatacctaccaactgcatttttgtgttaaatttagataatgcagtgccatcacttaaataactatgtttcaagtgagaggctttgttaaaagctctttgaggtgctccagaaagtggaaggatgcagatgcaaagtgggtaaaacccttgttcccaggatacatgttgacattttatttgctatggtcatttggaaaatgttaacatttaaatagaaatatattcataatgtgtttagcttggtatttttctgtagaattagggcttttttttttttttttttttttttttttttttttgagacagagtctcgctctgttgcccaggctcgagttagtggtgcgacttggctcactgcaacttctgcctcctgggttcaagcagttctcctgcctcagcctcctgagtagctgagattacaggcatacgccaccacacctggctaattttgtatttttagtagagacagggtttcaacatattggccaggctggtctcaaacacctgacctcgtaatccaccccccttggcctcccaaagtgctgggattacaggcattaaccaccgcgcctgtccggggccttttaaatttaatgaggaatccagatttttggcttgcttttgaaattacgaagccagttcaagtttatctaattttccttctgttacttaaatgtgtttagaaaatggtctgttttaaaagaaaagaaactgtatgcttcacttgatttaggtatctaataaataattgttataatttttctgaggtgcctcttgttattgaagaattactgaaaaatataatgtgctttttgggactctcatgagaaccaagtaattcagttacgattttgtctttttttcttttgcttcacttaggtatggagaaaatgaaaaattaccagactacatcaaacagaaattacagtgtctgtcttccatccttttgatgttttctaatccgactcctaattttcattgattaaaactcctttcagacatataagtttaataaataacttttttgttgactttcaagtaaagtgattttttttaatttaacataaagtcttcagaaagcctttctatgaaagaattttaacctataatgtaaaggatgtattctgagagaacaaagcagaatgaaacttgagtcacttactaaatatagtggatataaaatagaacacctgactttgctcttagaccataacccccgaacttactatgttcatatatttgtattgaacaatcttttaaaagcaaaaatgtaaatgatgtgtagtttatttgtgcttttattgttttccctgcgtctcagacatgttgagaatcatggacaaaacctgctggaattttggaatttttgaagatgtaaataatgtgtatttatgttataagtaacatatgtaaacatgtatatttgttttatatttatttttgtaacaccagtgtctgatgaaacatttttgcaaatgcattttataaaaaaataaatatagtgataagttacattatcttttgattcatttaattaaatacttatttttaaataacttaccagtaaactcactttttaaattttgttgcctgttgaggagccaattaaattttaaatattaattttgcaaatgttaaatacattgtttctctattatctgaa

SEQ ID NO: 350 - DNA, 32742 bp, Homo sapiens
  source 1..32742: mol_type = other DNA
ggtttgtaatgatagggcggcagcagcagcagcagcagcagtggtggaacgaggaggtggagaattgagagcacgatgcatacacaggtgtttctgagtagtaattagatcgctgtgaaggaaaaagcacacctttgagttttcacctgtgaacactatagcgctgagagagacagtctgaaagcagaggaagacatcgatcagtaacaccaagagacaccaaagttgaaagttttgttttctttccctctgttttatttttcccccgtgtgtccctactatggtcagaaagcctgttgtgtccaccatctccaaaggaggttacctgcagggaaatgttaacgggaggctgccttccctgggcaacaaggagccacctgggcaggagaaagtgcagctgaagaggaaagtcactttactgaggggagtctccattatcattggcaccatcattggagcaggaatcttcatctctcctaagggcgtgctccagaacacgggcagcgtgggcatgtctctgaccatctggacggtgtgtggggtcctgtcactatttggtgagtgcgactttttctctcgtgggggcgtggctgtggggctggaaagcttgctttctgggaaagcaaatggtagtttttgaggagtgaatggatggcaaaggccacaccaaatttttaaaatttttgttcgggtacgtgaactacccagatgcagcatccgctgttggtgtgatctggaacaccctcaaattgcttcctacaggctgtactttcttttcctgactaagacaggctatcttctgacttttctctgtggtgatgagagcaaaggctaactttcatgacccagtaaaaaacatgcacactttctgtgccgggcagttgtacacttagcttgggcattctggcagctggcatgctgaatgagacacctgtgaagtggaacctggcatgggctatttagacatagaacggagtgttcagcagaagtcttactgactttttattagccaaacaaatgggtggcagtctttataaaaatattttttaagttcatgtgcttgtcacctcttaatatcctttcaaaagtccttgacatgggagagatgtatgatggcgcataactcaatccctatcataatggggtatattgcaatggcctgagcatatttcaaattacttttcaacctttcatctcttctcaatacccatacacttttgcaatataagttttaaaacttcagttgggcgttagttttctgtacttgcccagatctgtttttttcattatatttcacttgttctccagggacacagagaatttgtccacctgttcactaaattaatctgaagggaactggcagaagtataattatgaatttttcttcaaagtttatgtctcttctattgatctgagaattaatagtaaagaggtaaataaatgcccccttatggagtaggcaaattactagagagctacctgagtttgttgtaaagatgataaaaactggtgaactgtcaaacattaaatttgatttatgctatgaggatttatttactcttcttgggaaagattctgtactttaaagttgctctttgtcttaactctgggactaacactaactaacaagtactaacgctaactctaggactaattaacaagtactaactcctgttcccatgtgtaccaatcaattcattctttctactcaggccttgtgatgttttaaatcattggtttgacactcatctagagaactcaaattccattttttttttttttttgagacagagactcgctctttgcccaggctggagtgcagtggtgtgatctcggctcactgcaacctccgcctcccaagttcaagcaattctcctgcctaagcctcccgagtagctgggactacaggtgtgtgccaccacgttgggcttatttttcgtattttttagtagagatggggtttcaccatgttagccaggatggtctcgatctcctgacctcgtgatccacccacctcagtctcccaaagtgctgggattacagatatgagccaccgcgcccggtcctcaaattccatttttaggaagaagttattttaaatagaacttgttaaaacaagtagtatagaaagatttatagaggaattatttggggtttttagagagagtttgtggtattatttataactaacttgtgctttattaaatattcagtaacaattgtgtatcattatttcccagtattacttcccatctttataaaataatttggagtaatatcattatgaaaaactctaatagtacccttagccactattaatattaaaatagctctggtatatgcacttatagaaaaagagaaacctaattgttgatcatcttaaatgattttgtgcaccctcagcctttaaatcttcctacagcactttatatattcagaataaatcaatatctaatcagaaaaaccacaaccagtttactggactttgcgtacttatgtgcatgcagcttccactatgtgattcaatttttgcacataataaaagattattcagatgtaataaaatagatcagtatgagtattgaactagttaaagtgtgttgacttgcactatgaaaatatgcttatgcataagtattacatatcatctgaagcaaaagctcaaaaaaaaataaaaagagagaaacagctaaggagactagctaacattacacttgagttggtattctttgattagtaattgcagggagtgtgctcttgtattaatctacttatctttatttgcattgcatttgtcacttaagttaccagaagcttttggacaggagtgcctctgtaacagcaagcaaagcaaaatctgaagaaaaaataatccttctttttaaaaagactctagaactttgggaccaactgtaaagaatctgtacatttggtttaatacatatatatactttttttttaagtgaagggtcaatacatggatttttacatcttgttttgaacttttttcatctgggcaaaatggttatgaagcttgagacctttaaatgaaaatcattcccccagaactcagtttaaacctagggcaaccatcctggagtttcagtaaagcatatagaggtctaggtattgattctctgacaataaattctgaggtacttaagactcttcccaataacattttatattggatccttttctggacagcctaccaacatggcgaatgtttccccatggagagtgagttgcaactagttaaaattagttataggtagatgaaatacatcagtgttccccaaatattagtctgcagactcgttactttagaattatttgtacaaattttaaaatgatagagattcttgaatttctcttgtggacaatctatactctcttgattagagtctgtttttggtttgagtgttttcgaattaaaaattattcccagactgagcatggtggctcatgcctataatctcagcacattgggaggctgaggcagacagaccccttgagcccaggagttccagaccagcctgggcaacatggcaaaaccctgcctctacaaaaaatacacaaaaatttagctgggcatggtggtgtgtacctgtggtcccagctacttgggaggctgacgtggaaggatcacttgagctcaggaggcagaggctgcagtgaggcaagattgtgccactgcactccagcctaggtgccagagtgataccctatctcaaaaattaaaaaaaaaaaaaaattattcctaggtgactttgatgtcatgataagtttagaaatcagatataaaatatgtaacactaagatttcactgaatatccaaattatatttatattgagcagttctgtctaaattattactaatcagtagtacttttctacacttttattctcagaagtagattggaaaaaaattgtgttcttacatttgagcacttggcagtacagatagaacttttcacataatgacaggatttttttaaattttcttgttaattactcaaattaataagtatagctatatttcatgtggtgcttgccatgtgtcaggccatgtactgtactaggtacccgctgccacatttatacacacaactcctttatgaggtagaagctgagatctccatttcacagagagtgaaactgaggttttggggagttgcatatttgtccaattttatgtgaattgtatcgttaaatgttaaaaatttagcttatagttaatttgatctaaagtacacaaatataaattatagcacctcattttaaaaagtatattctgggccgggcgcagtggctcacgcctgtaatcccaacactttgggaggccaaggcaagcagatcacctgaggtcgggagtttgagaccagcccgaccaaaattgagaaaccctgtctctactaaaaatacaaaaaattagccaggcgtgctggcaggcacctctaatcccaactacttgagaggctgaggcaggagaatcacttgaaccctggagacagaggttgcagtgagcagagatcgtgccactgcactgcagcctggggggacagagtgagactccatctcaaaaaaaaaaaaaaaaaaaaaaaaaaaaaaatatatatatatatatatatatatatatatatatatattctggctaggcgcagtggctcacacttgtaatcccagcactttgggaggccgaggtggatggatcttctgaggtctggagttcaagaccagcttggccaacatggtgaaaccctgtctctactaaaaatatgaaaattagccagatgtggtggcagccacctgtaatcccagctattcgggaccctgaggcaggagaattgcttgaacctaggaggcagaggttgcaatgagctgacagcgccattgcactccagcctgggtgaccaaaaattccatctcaaaaaaacaaaaaacaaacaaaaaaaaacacccagagagtacacttcaaaaaacatccaagatagccttttatagaaacagagtcagaattcattttgttgacaaaatatatcctacaaattaaatgaaatcttggccgtgcacagtggctcacacctgtaatcccagaactttgggagaccaaggcgggcagatcatgaggtcaggagattgagaccatcctggctaacaccatgaaaccccgtctctactaaaaatacaaaaaaaattagccaggcgtggtggcgggcgcctgtagtcccagcttctcgggaggctgaggcaggagaatggtgtgaacccaggaggcagagcttgcagtgagccgagatcgcgccactgcactccagcttgggcgacagagtgagactccgtctcaaaaaaaaaaaaaaaaaaaagaaatcttgcaagtcagagagtccatggttttctaaagagtggatacagcttgttcattttgattttccacagaaacataatttattaaaagggttctcaaaaaataactcaaaaaacttaaaagctaactcaaacatttggactaatgccttgtcttggtgtgaggttgtgttcttctaaaaataggtcaatattattgacatctctctcctctttttcccctatttccaggttttcagctcaaaattctggaacacatgatattgttgcagacatgtatctttgtcatttcaagtaaaattatagtgttcaaatagaatacactaaatctcaactgtgaggatgttagaaaaggaacttggcgggtcttagcaattagatgatggttatttgtcttgagtaaggatgccattcagaccaaaggaggcagttacatctcaggcaacatataaacattattgtatctattctaatgctgggtgtcttgaaaatgtattaaattggtaccattttgtgacaaatatttcacaggagctttgtcttatgctgaattgggaacaactataaagaaatctggaggtcattacacatatattttggaagtctttggtccattaccagcttttgtacgagtctgggtggaactcctcataatacggtaagagcatagtagaaagaattaagaaaaaataaaccaattcattcttatgaatcaccttgattatttttaactggttagacacatgcatgtcatgtgactacatgataaacatgtctacctcaggatataaagcctgtgataaagtacctttctgaattaagatatttttaatgcaattttatcactgacaagcagttcaccagcaatgccaaacttttagaaatatctacctttctttgaccctcagctattctctttgacacttccaggagaaagatgcttacttgaaagaatatgaacatgaaaattcacctggataccttttgaccaactagaccaaattaaatattgaagttttctcttattgtagattatatcattaaggcatttaactttacttagtcattgtgaccaagacacttctgtgcctcacaacttagttggtcaccaagtcttatacttcataaaaaacagagtttgcatgacagagtcaaatgactcatttccttatattaaacagattaggaactacagttccaaaagtcttttttgattttattgttgtaacaatgtgtttacattcctgcttgtcttggtttaaaatcacactgaatagtgctaagtcactctgaatagcaaatttccttcgactttgtgggaagcttatgatgtcatatgagcatttcagagtatcacagttccttaaggctaactactttgataaaatgtgatgtgcacagtctgattacagaatttaatggatattactagggaaacttgctcttatcaaacttatcaaacatatgtgattgagagttcatgtgagcttttatggctaagtgccaaatacagtgctagtaagtattgacaacactaatcatgagttttacagtgttagaagtctttttttttttaaccaaaaaaagatcttcaaagtagtatatgcttcatgaaggctttttcattttaaacactctgcattatttaaaattgttataatgaaataataataagtatttttttcctttcctgaaattcctctatcaggaatgcacttctattccttttggttatctcaatcttatctgctcttcaaaggtcatcttaaatcctttctttcccacaattaatttcctgtttattctaatttatgttatttctttcatctctaaattcttctgaaaattctatctctgcttcacatttggcattgagcatgataccttctattcttccttaatattttaggtgtctatattttgtttcccttttaaaactgccaacatttcaagcatacaaagataagatctttttgtaacccatatactacttaggtcagtgccctttttttggcatatattaaattatttttgaataagtaattgaaagtttaaagttacaatatattgtgtacaacatactcagcattcaaatgcatgtactacttattgactgctggcctgtcaggctggcgggctttggagcttaatacagttggacttgactccgtcttcagccatgtattagttgtgtaactttggctcattgcttagcattatgatgaacatgatcattccatataaatatagcttatatcttacagtagcacagataaaatattcatatattaatttatttattccacaaactgctactgaatggtaaatggcaataaaaagagatctaaaatgaaatcagccacaatttctgctcccaggtagcggataatcaaatgttactttaatttaaaaaaaaaaactacttttctctgtgtgtgtgtgtctgttgacagaggaaagtacctttgtattctagaagcttttaaaatatgttcatatatctctttgtcataacatactcatattgctgagttggccttttaaataggcagaataacaaatgacatgaggagggacaaaatatctaagtatgtaaatatttctcttcttttactaatacccatagttcctaagtacttcccattaaaattatacctttagattaagttagtattgccagaaataatctgtaaaacacagatttcaaggacagaaatattatctatctgtacacagcaggggtcattaaaccgaatttgcgtgtgcactatatattcaatatatattgggtttccactatatgatagacactgttctaaacactggaggtaaaactgtgattaagatagatatgattttgtacccttagagctcagagtcaagtgggaggaaatcattatcaatcgagaaatcacataggtaaatataaaattgctattgtgataagcactgtggaagacaggccaagggcttcagtatgaatatactccaagagatctggcccagtcataggttggagaagttttcccctgggaaaggaaaattgaactaagatctgaagtataaaacatagtcaattagttgcagaggctgcaggcagagaagattcatatccttctagtgggaagaagctaactgaagaagtagggagagcttagaccagatggagccttgaatgcaatgtgaaggctttttgcatatcctgaacatattttgaaagcactaaaatgacataatcagattttaaattatacataaaaaattgtataaatgatggagaataggataaacagttttgtttggggaagatgggagggtgtctaggaaaagaagaaaatgaaaaaccttatgccgctctccagtatcagccggccaaagttgggaacatgtaatgctggttggttttctgataatctatggatcgggcatgaatgttgggtaaccacgagaagaaagagaagctaaaaaggaagtttggcataagaaattagataattgctgccgggcacggtggctcacgcctgtaatcccagcagtttgggaggccgaggcaggtggatcatcaggtcagaagttcgagaccagcctgaccaatatggtgagaccctgtctctattaaaaatacaaaaaattagccaggcatggtggcatgcacctgtaatcccagctactcaggaggctgaggcaggagaattgcttgaacacgggaggcggaggttgcagtgagctgagatcgtgccactacactccagcctgggggacagagtgagactccatttcaaaaaaaaaaaaaagaaattagataattgcacagacttgcatgtttatggaaaaaatatgcattcatatatacatacatctaaaatgaaaaggtctgtgcaattttctcataaaaatatttgaagaattaaaatagaaagatgtattacctatatttctatatacctgaatttatttcatattcttgtctcatttatattttcttaattgtatcagattataataaatctattatttttaaatttatattttatatctgaatgttactataggattaagaataatcacttgactttgagtttttgtctgtacagaaaaaataaaacaatgtcaaatatttaggcatgtatttgcagggaacacttaatactaattttttaggttgagtgttgtgttcattcttttgactatgccctgacacattagatctgtatggcattaattaattcataatatggctgaagtttacttactgactttttgagaaagaagatggcttcctgtaagcctagctctgtcaagatctcatgtaataaaccagatttttaaggaaaagtcaaatatgggagagcaggggaaaagttgatagtacttacccttgttcccaagaatatgtgaagtttaaaatctagccaccagtgttacaggaagtacttcatttggaatgtctatggcaacctaatcaagtacggaattctgaaaactatggactttcatatttaacatgttccatatgctaaatacactcaaggtagaaaaaattaatgaaaatgcagttttttcccctgtggttaacctaaatatatacatttttttttagccctgcagctactgctgtgatatccctggcatttggacgctacattctggaaccattttttattcaatgtgaaatccctgaacttgcgatcaagctcattacagctgtgggcataagtgagtattatagctatatatgtgaaaaaggaaaaacaacacaaaaatgattgaagacaaagtgtctttagactttttgcattgcgggattgcctctcacatcatgttctttttgcttacagttccaaatttctactggaaggatttggagtgggatccaatactgtattccatgccagttttgtatttggtcaatagatatgatggctaatctttttaaatagtaaaaatcaccttactagtaaaatattaagtctattatacatgaacaagacttttaaagagaaaaccccaattattttagagactacttgaattggaaattagctatatattgaattatatctcatgtgtaatcatggagttacctttatgtagtgggtgtttaagttgtacttatacattttgtagtgttagcagctgtcactcccagtgttataatgtcagctgcctgttgttggtcatgaaaagaattttcttttaagattgattattagtagtattttctaactagatttctttatggtctccaaattaagaagttgttcatcttttatcaatgggcacaaatattcattgattaaaaaaagaaacaaaaagaagaacatgtacaaaattgcatgagtgatatgaagccatatatgactctaattccccaaaagatgccaggtaccaaatccttaaatatgggaaaggataacttaattctaggtgccatttgaatcactgtcttaagaatcaatatgatcacatttaaccgagttttagctactcataaagagaaagctacacaggaataactcaactgcataatcgtggaagaatttttagtttgtatggctaaggtgtttcaatgggacaatgcctggggtattgcctgtaatttacttattgcctgtaattcatttatttatttttaattaaaatttaaaaaatagatttagggggtacagtgcagttgtgttacgtggatatattgcgtagtggtggagtctgggcttttagtgtaaccatcacccaaatagtgtacatcgtagatattaagtaattttcatcccttatcctcctcctaccctctcatctctctgagtctccgatgtctattatttcacactctacgtctatgtgtatacattatttagctcccacttataagtgagaacctatggtatttgactttctttttctttaattccacttaaaatagtgacttccagttccatccatgttactggcagcaaagacattattttattcaatttattaagaagacaataaaaaatggtaactatttatacttttggaaaaacatcatttgatgttccaggagactagagacctattcattgctgtatttccagcccctcacttagctcctagcatgttgttggtggtgctcagtaagtatttgttgacttgattttctgagaagtctaagaattttttctccggcagaaaagtctatagtctgtttacttgttaaacttggaggattagatatcttcagtatatttccaggcagtgggaaaatgataaaaatgaaatagagtttgcttcatattatgttcagatctagcagtctaagtttttgagggttgaaccatttgagcatagtggttacagtttaggctttggagggaaacaacctggaattgaagcttggtgttacaattcttagttttgtgatcttgtgctaatttttaaacctatttaagccccagttttatatattaggaaaatgcctatgaaaagataatctattaatatcttgaatagctgaaggaagatgaagttaagccaaattttttgtttgggtcacattctttttcattattttttctttttttttttttagctttcattttgagttcaggggtacatgtgcagtttgttacataggtaaactcgtgtcatgggggtttggtgtacagattgtctcatcacccaggtactaaacctggtacccaagctatttttttctgattctctccctccttccaaacaccctcaagcaggcccagtgtctgtagttcccctttgtgttaatgagttgtcatcatttagctcccacttatacgtgaaaacatgcagtatttggttttctgttcctgtgttagtttgctaaggataatggcctctagctctatccatgttcccgcagaagacatgatcacagtcagatttttaagacctttaacagagtgccttgcctatagaaagttcttgataagtccactgttccactaagggactgaactaacagccattgttatattcaccattttcttgtcccttgaatgactgaggcagaatcatatcacaattattatatttaaaaaagagaagagcaggggtggcatttttgagagctctgtaaattaacaatgatagttattaattaaaagccataaccagaagactaagtagattgcatgtaaacatttataaatccacaaattttactcactttggagttaaacttatatgaatactaatgctatatttatgtttttataagtctagataactcttttcttgtttatcccaattcaattaaacattttaaagggaaaattcgtatctctgaggattaaatgaaaactgctcaaactaaactttaaaacagttctaggaaaggataaccatattggggtttacaaaacctctgtagtagacattggtgacggaatagttaacaaggagcctgaggaaatcttagatgaacccagacatttccttctatttttgccataagttattacattcatttttaaattttgatgttccttttgcaagcttgaaattcggagaaagaaatgtgtacccataatcagcaacagttaaaaagcaaactggatatccttatgactcagtggtaggtaatgtaaatcagtgccctaattgggaaagtcaaactgtctgtaagaaaaatttagctttaatggtgcaacagcgggtggagatggagatagagaaggagaaatttatctaggggcaaatctctcacaccctgctttcttcaaagtgagtctaggtgattttctacctgttaggggtggaaggttaaccaagatgtagaaaacagagttgaattgcatgaattgcttccctgtgatccctggggaaggaaacagttcgtggtcatttgaaatctctagttaagcatagaaaaagggcaaacctgaagggtcttgctacatcatagaaaaaaagaatttcaaattttgtgaaatgttagccaaccatttgagagatgataatgggataagggtggggggttaagtaaatactaattcacccccatttttttaagtactgtatttcatttctgtcaaatttaatgaagataaaaaagtttttgcttatacaaatttcatccattccagtaaacatgtcaggtgcgtggaagttaagatggaaaatcttatagatttgcatttggctgctctcttatagctcaatatttaattactttcgtttgttcttttttttttttttttttttttttgagacggagtcttgctctgtcgcccaggctggagtgcagtggcatgatcttggctcactgcaaggtctgcctcctggtttcacgccattctcctgcctcagcctccagagtagctgggactacaggcgcccaccatcacgccctgctaatttttttgtatttttagtagagacggagtttcaccatgttagccaggatggtctcgatctcctgacctcatgagccgcccgcctcggcctcgcaaagtgctgggattacaggcatgagccatcgcgcccgacctgtaattactttcttcaccttctgtagaagttcatgaattttcactgcttttatagattcaataagcattgaagtatgctcaatatttaaaatatttatctgttctgtattcctgaaattggaccctatataattatacacttgaatgtcagaatattataataaaaatattctccttaagatacgagatctagtcccagatccatccctaacaccatcaattgttggatgtcaatttccttgctagtttattttatctatataaaataaagatgagttaagaaccccatcctaattctcaaacttttgaaagtaattgggaggaacaagcaaaaataacatttgtgattgtattgtgaaaaaaattacccagttctgcaaacgtattactttatattctttttgaaatctatattttcctggcaccattaaattacataaaagaaaatctaggactatttctgtgttaacacttcaaatacagcatatgaagtggctctgtttaaatctttgaaatctggctatacctacttcttttctaccataagtaacttagcaacacaaccaattcttaggtaaataaacatagtattaaaatatacaagtactgcagaacaactatcacatactttaggaggatgacatgcaaaatgtggaaacaaagggtcctgtagctaacataaatgtgaacttttgcagagagaaagagccatcaagagtttaaaagaactaggtacaccaaggggatcatgtatgtcttttgaactacttcctcattgttgcctgggaactaatggtaaaagtgtgggctccagagttagattacctgggctccagacccatcttcactgttactacctatgcaaacatgcgcaagttaaacaatatcttgagtctcagctgctcatctgaaaaataaagccaataaaatgactatgtcatagagatatgaggattaaataacattattcatgtaaagtctttgtacaatgtctgccataaaataagtttatatttatatatcacttaacatttttattcccaatagtgagatcctagatacaaactgtcactctgctttttaaagggtttgttgctacctgtcttctctaaaattaatgcatccaggagatgaattctaataaaaagataaaaggaatccaggcagtcattacaaaacagcagtgaaacaacccactttatctcaacatgtaacatacatacacaatatccatatattttatcagttaagcacaaagtactcagaattcagaagccaagaagaacctgaccctgggagaaaacccaatatatctagactctgtaatctcactcttcaaaacccaaagacagacttgaattacatagtgcagaaagaaatacttgccagtccttaaatcacagcttcagtccttaacattcccctaaacatcctcttcaaatatagcttccttcaaatatgtatttcttatctccaggatttatagatatcacttccattgccacatttcagttcttaggaaactgcatcataaataagtaaataaaaactatatgtccctgtatttttattttggtaaaatttaaggggagcatacaaaagaatgcccagactgatataattatttcctcatgtgtgaaattagcaaattgttattcaaaggaagtaaaactaggaccagagagctggcccagatttctttcattattgcaatgtgggtaaggtagtattttttaaaagtatatattatttgtttcagaaacttagaaagctcttgcatttagtgaatcccaagtcccttttcaatattgttggagaagcaacatacatagacataaatttcactgtaaagacacgtgatgaaacagcagttatagccaccggagaagcttcactgtacctctcgctggctgccttgttacttgttaaactgtgccttcagggtaattcaggggcatctcagctggaatttagtgtaccaaataatgagtacaatgtctggatgctcagataaagcagggttttaagaaccctttgaaaaaaattcatctttttttttcttaaaaagtttcattgaggtgtaattgacatacaataaaccacacatgctttaaatgtacagtttgataaagtgtgatgtatgtattcacctgtgaaactatcaccacaatcaagtacccagcaatgggattgctggatcatatgatagatttatttttagttttttgagacacttccatactgttttctatagtggctatactaatttacattcccaccagcagtgtactagcatcttaatgagaatttttgttaagctatctgagaggaaagcagggtgagatgatcaattcataatatctgtttaattttgtcttccatttgcctaagaaaactttacaaagtattttttaaaatcccaaatacccagtttttttaatatttcaatagacattaggtacttatactctttatgaaagtaacaaaacctctttcttattttcaaacatatagttagttgttccaaaaataagaatgcctctctctctctccttccttcctccctgcctgcctcttttcgtttttatccttctcctttcctctcctttctttttctctctttctctctatataacagttcttttctactgtggaaagaactttcataaatacagagtgctttgggttttaggagccctatttgaaagaaaacactgcccttttgttgctggtggccacatgagacaattttttcacttttacaccaacgttgaacctccttaattaaaacaataatcattattgtgtaatgactcatcacacagtcatttgcatagaaaaggaaaggaatcactggatgatggagcagggagcagagttacactaacttattttccatatataagtgccttatattggggagagataaataattttatttttgtgattcctctgataaaataatgcactttgtcattgacaacagacctgtctatcccttcatgttttcagcttccaacacagatgaaataaccccccttagatgcccctgtagcttattcaggggtttggcctttttgatcattctcataattactcctttgaaatatttcttcgttagtaaccctgtatttcactttgtatgagatcttctgatcccttatttttcccatcttggagttttttccaaaaacaaaatgtattttattgcttcatttacttttgaaaattttttcatctttattgaggtatatacaacaaataaaattgtaattttagggtgtacaatgtaatgattttatttatatatatatatatatatatatatatatatatagtgaaattattgtctcaatcaagtgagttaacacctctgtcacatcatttagttacccctcttttttttgttttgttctgtggtgagaacatttaagtatatttcaagtatacaattcagtatttgaaactatagccaccaaaatgctatatgttcatcataaaatttattaaactattcctaaaaataaatttaaaaaattgaaaattatttagtgttctatcacttataaacacctgctgttgatgttttggtaaatatgtttccagatctatttctccttccttccttccttccttccttccttccttccttccttcctttcatccttccttccttcttttccttcttccttccttccttctttccatccattcctctaacttgctgtattgatcagtaatatatcatgaatatcctttcttgtaataaatatttaactgcctcataattttaagtggctgcatataaactattaaaatgatataccttaattagccttcctttaggaggtttaggctatttccatttttttgcctttaaagattatgtgttgctgacatttgcattgattgttaaattctgaagtgagctagtaactatatcaggcagtgaaaactgtgaggcggactcattactatatataaggaaaacttccaatttcaatttgaataataagaattctgtaggagttttgtttcattctttgagaaatatctttacattttaaatatttgtttagggagaatatacctttataaatataaaggttatagttaataactgtaaatgtcaggaataaagtagtgttttgggttgttccaagcataaggttgtggaaagagtataaagttgaaaaccactgtctagaataacctcagtcatcccagcagagtaggggagaaaggtcttagagcatcaccatttcccttgtgccttagattttctaactgaggatccagttcattcattcaacaaaaatgtattaagttacctgggccaggcatggagctggataccagcgatacagcgatgaataacccttgctctatccttgaggttttcatggtccacaaggtgtcgaaggtggatagttattgctgcttgggaaattgtagacagcatcagtaagaatgaaaaattcttctggctttgaacccaatgtgcattctagcctggttagtcttttgcactcatcacttagaatattgtgctgaagccctgaaacatatcttgaaaaactatacttgtacggtgggttgaaagtcgccccttgacatgctaattagaaagaagacaaccaaaagaaaagtgctgcctgaggctagtcctgagagtgaaaaataagatctgagccaacttctacacttcttgctccttcttgagtgtgatccacattggcaggcataccatcatagagacaggaaagagttgtcacatcaagctagacagtgaaattcagccatctgattggatgctgggtttggttagaagacatttttatgtgattgttagagtactacaatatatgtccactcttacatacaaagaacaagagaagaattcttattgtccagaggctttatccatgtttctcaaacttcaatgtgcataaaaaccagctggagaacctgttgaaatgtagatttgtattcattaggcctggggcagagcctgagattctgcatttctaaaacacttctaagtaatgtcaacactgctgcctcacagattgccctttgagtaacaaggacctaaaatgtctttgtgccagtgagaattcaccttttgtaacttcctctatttgtttgcagctgtagtgatggtcctaaatagcatgagtgtcagctggagcgcccggatccagattttcttaaccttttgcaagctcacagcaattctgataattatagtccctggagttatgcagctaattaaaggtatggactgaaaagcaaatgctttttaaaatacgtatctgcttttggtcttttttaacactaacttttgcttgtactaacagaatccttaattagtctctgcctgtggaacttaaactctatattgtcatctaattgatttgaaaggctgctacattgtgagtgagttggtttttacagttgaatggcagaaagaggattaagaatgggccatgcaacaaaataaggcatcagtgaattttctaggtttaatggtttggagtgaaaactcgaagtggaaaaaaaaaaaacctgccacttagttttaattaaagataaatatgtcttttttttactttaaaattgtccaataatagtaataaaaattaaagagaaaaaggtatctggaaagtgataaaagatgatcaataattctttgactttctggttattattccttttaaattgagagtggtatcctcaacagaggagtcaatacgggaacagcattcctaaacaccaaaattatatcacaataaaatagttgtaaaaacttaatttttattgttacattatttttaatataaaattcgcatttctgcgattacttgctttatagagtttaacatttaatttaaaaaaagaaattgagaggtgacatttagagtttttgttttaggaaagaaggcacatgcagttgcttggattcagtggaaattgttggaggacagagattcacatgtggtatttaattagcaacaggaatatagcaggaaataaagtgagaagaaattgtaaaggaatgacataacttgggcatgttaagtatttaatgtttacattgatattgtctgttccaagaaagggaatctagagaaatttaatgacgttgcagaagaattacacaaggcaaaaggaaatgccagcgtttggtaaaatcatcactgttggtagaagcattaaataatgacaaacactgaaggatcagccactctggagctgggaaagggagctgctgttgcccatttaataagcctagtgggagattttagagccctgctggcggaaatgcttttatgaaatccagcaacagcagccaatgcagaataaacacaatgaagattttgaccgttagagcttgcactgaagagaagacaggagcttgctcttctaatacaccttggcctccacagagctagcctgctcatttctatcttattcgttaggaatgtaggcacaataatctgttttgttagtgctttatttttctgagctaactcttcagtcttctgtaaggagtttcttcagtatttgaaaagtgcagaatctctgggtcattggctgttctttaatactagtttagattccaaaagattatatgctatcccttgaaactaagatttattttcttcttctttttggtgtaatgtaagatactataggtagcattatagactttattcaatttttaccaggtatttatatatgtatatgaggaagggtttggttgcccaaatgttgctctattgcaaattccttgagagcagaggtcatgatatatcttgaggtttttttagtggctaaaatacagagacactttaatcaataatcatgatatcaatgcttaatgtgacaggcttattcagagatctcacacaacagagaaattccctgagaatattaccgcatttaatgtaaatttaacattttagagaccattattagcaggtatatttgctcgattgctgtaaaattgtgattttcttcatctctaacatgatcacacatttttcacattaatctgaaactctagtaggagactttgttaatacagattgtgcttttatttctattctaatcatatcctgaaagtagttgtatgttatgtattcacttatgagagtttgttgaactttcctttgaatattgcctttaatcttcatgagacctctgttatatagccaaaatattcctgaattctagaaacaaaatgcctctcttttgtaatattctcaaaatggcacttttgaagatctttgcttgtgacccagtctttatagaatttggtttttcttatggattatttggtgctgcactctaagaaatattgtgcctttatgccaaagagaccacagattatgataaaagaatattcaacagatgcttttatctgaattccactatttatatttttctcctggaaggacacaatgatgttttagtaaaatgggcatttctgaatttatcatgtcatttaaaaagtgagctatgtttgggaatcatttgagagaaaaattgtttagtatataattcaacattctccatttttggtcttcatactcacacatattatatttatatataagttatgcctgggcaatgaatgcaggaaaaactgagatttgacttggaagagagagtgtctcatacacatcatccaccccctgtcccccttctgtttatttacatgaagttttattttaaaacaaagtctcacttcccatttgggtaatctcatttgctattttctttgggtaatagaaacattttttctgcttaagcttgaatattgactgactaaagtaaatctgaatttctaacttttaaaactattcaaaagatataaaagaaaaagctccaatgtgattcataaaatagagaaaaaggtgaagtgttcaattcacatgctgctgcaaaatttgttgaaacctatttattttagagttcattataatatcttttcaatatttctaggaaaaaaaacatgtcattctctaggacagggtcacagagtgagtggactttctctgtaaaggacaagagagtaaatattttcaatttttcaagctagctgtatggtctcaactctgctattataggttgaaatcagccataggcaatacttcatgaatgggtaatacttcatgaatgggcatttttaacttatagataaagaaaactttatctataagaaaggcttgcagccagacgcagtggctcacacctgtaatcctaacactttgggaggccgaggcgggcggatcacaagatcaggagttcaagaccagcctggccaacatggtgaaaccccatctctactaaaaatatgaaaattagttgggcatgatggcgcgctcctgtaatcccagctactcaggaggctgaggctggagaatcacttgaacccaggaggcggaggttgcagtgagccaagattgtgccactgcactccagcctgggccacagagtgagactccatcttgaaaaaaataaaaaaagaaaggcttgcagtttgggttgacacacatggtcttcaggattttccaacttctcttctaggaggtaggcatctaatgaacaacatgggataaacagaaagcagaaaggtaaattgtgtaggaaaggagtcctgggatttatttccatctcctcattaagggtagaaccttggatacctctccgcattttcttgccaagcaaaacattatctttttaagaattctatcttttaagaattctatcatattcataaagattataatttacagaaaaccctttagtcttcttttatggtcacaatagaggcatactcaaacagaggattatttttcaatgccattttcatctttgttataaatttattaaaagagaaatatgaaatagtgttaatgatcaatatacttttgggaccccttctatagaatgggtacagtattgataaagatggtaatcaacagagagtaagaaatctagacttacaacagtatgtttctccgcacccccatgtttctggttaagagtgaataagaaccaattctttgaaaaatcctaaaatcagtctattctaattacaggtcaaacgcagaactttaaagacgccttttcaggaagagattcaagtattacgcggttgccactggctttttattatggaatgtatgcatatgctggctggtaagttgatagctccagatctggtggtttgcgtagttcattaatcccattatgcactcagattaagtgccaagcaaggtgccaggcaaatgtgaatagccataatccagtgtgataggctttacttgaaatgagaaataaggtattatcccctccaccaggccaattactttgcacatgacaactaaacataacaggtttccagtcaaggtgactgctagatttagcctgatgtcataaaaaacaaacaaatgctgggtcttaagatccaataaaaattacttataagtatgtaccagtaaggacataatagtgccgtaaggtactaaagaataatacttcgcttgtcaaaaggcctttcagctaaagctccaagggtgtttacaaatagtgattaattgatttttttttccagcttctcgtgagagaagtaactcagatgtagaaataagtatgacattcccagaaggtaaatggtaatctaaaggcagagaaagagaaaccaagataatgcagtcaactcttctagacagtctattacatttaaaaggaccttacatgttccttaaaatgtccccaacatctgaaaatttaaaaaagtgaagatgattaaaatcatgatgccacagatatatttcctttgatgtatgtccacctgtgatacctacctttctagttaaggcattaaaactttgtatttgtaccttatttgttcagatacttgaaaaacagtaatcatgtaatcatggataagagtgggactttctcttcagtaaattttattgaccttgtaagatttagttgagatgatggttgcaagaaagcctacaaggtattatttaattatcaaaatcattgtagtaagattaaatttcattgttttgggataaatcatggcaatgtttattttttaattatctataaatctcattgttatacagctttagctgtgagaatgatctatgagcctggaagtaatattaggaaaccacactagctaaaaaattatatgaatgcatttccaacacaaatataattccttttgtttttttagtttttaagatcttaccttctagccgatgcatggaatatggatatatttcaaaatgaatggagcgtttaccctattaatctcattgaattatgaaaatatggtattagaggataattagggggtatgggaacttaaaatcttaacatggcctttgaggcaaaatatgcttgaagattgttagaagattatagctctaaggaaatcagtgtaaaatatttgtatattcccagaatatttttataaccattatatgtaagcattagttttgaatcactcagtatttttgaagtctttttgcttttgtctgaagcacaatgtggtgctagacatcaaaagaactgagcgtgatcacagggttaaagcagaatcaactgttctatggctattcagcctggatcagagctctgtgccctggggctgaagccaagctactgggagggtcactgggagacaccagagcaaagcggggaggtagagaaagctttcagctacagccaagtgttgggagccgggcaatatgcaaccacgagtgtggaatgtgaagatagtcacaagggaggtttgattaattctgttgaatgaaatttcttttgcctgagagtacgatagatctgttcccatgccatcttaaaatattcttttaccctcctcacttttctaatacccagaactaaaaattcaggtcacttgctttatgtagagcaaaatttctccgcttatgtaggcttttgagggctgatgaatttctccatggatgaagacccttttcattttgaattattgtactaatatttaactttattgatgctgaccccaaaatgtttctctgattacaaggtaaaaggggtttacatgaatcttttttaatacttttacccatataatcctcatgtctactccctatttgaaagaccaaaaaccattgatttctttatatccttgagggttcaatcacagtattggaaaataagtccaggatttaaaatggaatgttatctgatacaagtggcttatgtaggggacagataagtaaccgtgtttctataacaggttgttgtgctacctgaatgctgctttgtgaagacgcagaaataatctggctgttaatctatggtcatcagtcttagaaaaaggaagctgtgtttagaaaaaatatagtctgttggtgtggggttctagaggaaaagttattatctggatgtaaatgaaacaagatggaggctaaaagaattccaaagagaggggcatttattcacttgccaaatgtgatctcgcctttctgacctttctctcgctttcaagatataattacaagactgggttgtagaattatcagtgggtaagtgtaaatgattctccactccctatgctgctgctatgacaatgtttgatacccccctaataaaagggcattgaaaatgagtaagtcagaagcaaaacagctattgtcatcagagcttaccgcccagcctgttagcctgtaagtaaaagctgcaagaccattgttgtcctggagaccttgctctgctagcaaggaaaaagataccaccaagcccagggtggggatatgaatagtggaggtttttgtctctgaggaatgctgaaactttctagaatgataaagctacttcacagaaacttgagtaggggaaaagaaatcattaacccagtcaggtcacacagttgggtcggaacaatgttaataacattgccaatgtctgcgttcagagaaatacatctgccagtcccccttgtggccctggggaactcagtcccatatcctgatccaaagctaaacattgcttggtagggttttcttttttttcaattgtgtgatagaaaatcgtttttagtgtctttttctcttccttttaaatcctatccccctctatggatttagtctttctaaagcacttgctgggattattttgtactgttgtgtcaaatctaatctaaagaataagcttcttttaaaaataattcacatagttgggtattggaatgcattgctagcattgcagtaccttttatgcacaatcatggaaaagctggaacaatagatcttatgagcattcgctagagtccttgaagtgttgtaaaccaaagagaatatcatggtcattcctggagactagaacgtaaaggtggatttcccacaggatgtgtgaatgtttggactaaaacaagaagctttctccttcctactcaccatcctgctccaagccctttccttttctctactccctggagctgtggcaaatatttgaaattgtgttctatttttcataaatattttctttcttgctttaacattgtgggaaaagactactttctaaaacaactgttaggaaggaactggctatttttgacatgagaagcctaaaaatatttcttggggtgtgtgatttttcattggtggtggtgtttgttttttagtgtgcatgtgtttttttttcttttttctttccctacttcccattgcctcaggcttatagcaaacacatcaaacccctcttggagtgcatattgcagatataagtactgattgttgcttgctttcatggtgtaactacaatctctatttatagaaacttattttctagtcattagaaaaatctttggttgctgactttttagatcaccgttactgctactgttctgtcagctcctcaattatttctacttaaaacagtccttaaaattgtagacactttaaccttgaacatcaactgactacttgtgaatttaggtggttttataaagatggagcaagacaggtttcttcatctttgttttagctggtgagatacttaaagtatattaagagctgatggacttatattccagccacttgattttcgattttagagaatttgtacctatgaatctgtgctcctgcatacctatgtaaaaggttacttttaataataataagataatggaagattatattgaatatatgattttttttatttcacaaaaattttctaagcatagaaaaggaaaaggtagaaaagtctttgccttcatatgtttggctctttctatagtaatccctctgtcacacttgtactgcagtgtacgggtgctcattttcctgtgcctaacccctctgccacacttttgtgctcgtgtgctattctcagtctggaatggcctcacaccacctcaccagggtaagataaagcagttcttaaaggttcaagttgggtgatgcctcctctagaaaaccccctttgacctaccaggttgggctagacctgccctctggctcccacgtgcttgctccagtattggacctgcactgtatcacactattctgtgggacattctatgagctatgagctccttaagactatgggcttaccacttgtatatttctgacacatgataaaaactccacaaatatggcttaatagaaaaatgacttatgggagtatttagttgttagatattttcatcttactataagtattgttatagttttcataattctgggttcaatgttaaatatttaaaatttgagactttggataatggtaaaatatattaatagtttataatttatttatctatttttaggttttacctcaactttgttactgaagaagtagaaaaccctgaaaagtaagtagccagatgtaccctgaaatttttatgaagaataaaatttaagattacatagtttaaaaagcagacttgaagaaggaattcagtgtgggctagtcaaccttaacatcgtcatcatcatcactataattctcttagataagatttatttgactttatcataaattatatacataattatatttataattatatacaaatagcttaattatatagtctacattcaatactaagttgtcttttaacctgaaaataggaaataataaagttatattttaggtagcctatcccatataaacacatacatataacttaatacggactctaaactacccacgggatagcttgaactcaaaaagttaattatttctaacaattcatgtaatcttttttcataactatcgaattaaagtgagtaatgtaattaatagacgactagttacaaaagcctagaaatacctgcagaatgttataggaccttataaatttggggagctggataagttttactctttctttctaggtaacaacttgataagtagatgatttgatgatgatttatgtaatattttcaaaatgaactaacttagggaaaaatgaattattcttataatttgttcataaacattggatttgctacaggaaaaaataattcatgggcaaaagagggaaaatgtaggaactgtagtatagtataaaatgtagactaaattataaagttatttaattcattttactttattgaacatctgctatgttccaatcattgtgctgggaacagctttcatgatgcataagacttgtcttgaagtattttattgactagtcaatgagtcaaatgtgtaaacaaatagatgtaacagtgtgattggtaccaaaatagattatttatccagtttggcaaaaaggaaagaaggaaatacttgtgtatctagggagatgttgtttataatagtgtctcaaatgatgagtaggtgttccttaggtaaatataaatgagagagaagaggggtatgggaggagagagagagagagatagagagagagaggagaaacacaaacacaaacaaacacacactgatttctaggaaaaagaacaagtacaaaggtgcatcagtatgaaatagcctggacatcaaagaatatacctaagggttgacaattcacactaagatagactaggaaattctggcacctggtatcttgggaaatggtaaactgatgagatctggccaagtaccaggaatgtcggagtttagaacacataagccagcaattggtatctgattcaactgctatgcaaatcaatatgtaatttaaacatgtgaaaggccattttattaagaaatatgaccaatttatgccaatattgtcatatctataactggaattgtaggtcgagaacacatatttaccaagagctagttctttctaagcgttacttggaaatgacaagctaccttacgactgtaaacccattgattacagagataaataggttggcctgcctttttagtttttgagaataacttgtatgtaagcaccagcatagagaaaagacagttagtactggatataatataaaatatgtattgaatttctattacgggaaataaattactatggttcgtaactatgtatgttaagtctaaagacattttaaagacatcaattactagaatttaacatgagaatatttttataagcaaatggcaaattgtagggttgcagacaagacctataacataacatttattatatgattcatcagtggtgtagatataattcatattatctttaatattatttaacagtttaagtgtgatttttgtttgacacatatatagtaatactattgtgtatattaagcatatcttgaagctagttatgccgttattacctcaacccaaatttctgatgtattctactaaactgtgttccaattaaggattgtctccttctcttcttaaattaaagggccttagttgcacactactgataatgtccatgatttagtgcacacagatactaaggaacagtgatggtgatgtattgattcagtgttttttttttttctgttgcaaagaaattcccttatctaaaaaatggaaataataataacacatacttcactgggttgtgttgatgaattaatatgcataaagtgctttagattagtgactgtcactttttaatttctacataattgtttggttgtcattactactattactgttatatactttattagagcaaggtaaatgttattcacagaatagtgttttctagaattcaatattccaagcaattatttttcttcagagcttttgaaagaaatgtgaaaaattacaccattttgaagcttactttctaaacttttagtgtcaaacctcatatgcatttttgatctctattatgcattcttgatccataaaatatctttatgggatatctatgctatctcgatgcatgcatacgatgtgtaatgatcaaatcaggataattgggtactcatcacctcaaacatgtatctttttttgtgttgagaatattgcaaatttctcttttagctaatttaaaatatactatgtttttgataactacggttactttactatgccactgaacactagaacatgttttatctaactgcatttttgttttcaataaccaacttatcttcattactttctccttatactttataacctaggtaaccatcattttactctacctccatagggtcaacttttttttagctcacacgtgagtgaaaacatacaatatttgtctttctgtgcatggcttacttcacttaatataatgtcctccaggttaatctatgttgcttcaaataactgaggatttcattcttttattgaatgaatagtattctagtgtgtgtttatatatattttctgtatccacttatccatggatggactcttagattgattccatattttggctattttgaatagtgctgcaataaacatgagaaagcaggtatctcttcagtataccgatttcctttcttctggatatatacccagcagtaggattgctggatcatatggaagttctatttttagtggtttgagagcctccatattgttctccatattgtctgtactaatttacattcccactaacagtgaattttagattcagggggtacatgtgtggcccctgaatttaaaataaaagtttttttatttgttatatggatatattgcatgatgctgaggtttggggtatgaattatcctgttactgttgggtatggggcatagtacccagtaggtagtttttcagcttttgccccactcttgccgtccttactctagtagtccccagtatttattgttcccgtctatgtgttcatgagtacccaatgtttacctcccaattataagtgagaacatgcagtatttggttttctgtttctctgttaatttgcataggataatggccaccagctgcatccatgttgctgtaaaggacatgatatcattcttttttatggctgcatagtacatgtatatgtaccacattttctttatccaacccacttttgatgggaactaaagttgattccatgtctttgctattgtgaatagtgctgcaataaacttatgagtgcatgtgtctttttcatagaattacttattttcctctggatatataaccaataatggaattgctgagtcaaatagtagttctgctataagttctttgagaaatctcgcaacttctttccacagaggctgaactaatttacattcccaccaacagtgtataagcattcccttttctccacagccttgccaacatctgttattttttgactttctaataatagcccttctgactgatgcgagatgctatctcattgtagttttgatttgcatttttctgatgattagtgatgttgaacattttttcatatgtttgctggccatttgtatgtcttcttttgagaagtgtctcttcatgtctttcatccactttttaataggattatttggtttttgcttgttgaattgtttaagttctttatagattttggatattaaacttttgtcagatacatagtttgtgagtaatgtctttaattctgtaggttgtctgtttactctgttgatagtttcttttcctgtgcagaagctctttagtttaatgaggtcccacttgtcaatttttgtttttgttgcaattgcttctgagaacttagtcataaattctctcccaaggccaatgtctgtagtggtacttcctaggttttcttcttgggtttttagagtttgaggttttacattgaaatatttaattcatcttgttaagttttgtatgtgatcaaagataggggtccagtttcatccttctgcatgaggctggctggttatccaggtataccatttattgaatagggaatcctttccctgttgcttattgttgttgactttgttggagatcatatggttgtaggtgtgtgactttatttctgggttctttaacctgttccattagtttatttgtctgcttttgtacctgtatcattctgtttgggttactgtaaccctatagtatggtttgaggtcaagtaatgtgatgcctctgggtttgttctttttgtttggggttgctttgcctatttaggctcttttttggtttcatatgcattttagaatagttttatctaattatgtgaacaatggtgttggtagtttgataggaatagcattgaacctgtatattgctttgggcagtactgccattttaatgagattgagtcttttaatccataagcatgaaatattttttcgtttgtttgtgttatctatgttttctttcaacaatgttttatagctctccttgcagagatctttcacttccttggttagatgtatttctaggtattttttgttgtcatttgtgtggctgttgtaaatgggattgcattcttgatttggcc

SEQ ID NO: 351 - DNA, 32742 bp, Homo sapiens
  source 1..32742: mol_type = other DNA
tttaaaattatagagcttttcatcactacggagatgctcttgcctatgataggaacgatggctacatctgaagctgagcaaatttatcttttctcttcgtctgcatcagggtgacctctggaaggtaagtgaaagattttcacttagctgggcacaggctttgttcaaggcatctgcttgtaagagccagtatttaagggggaggtttgggcctaggggagagcctggcaatctgtgtctctgttcttcttcagagtttctttttcagactccaaactgagggcgagtcatctgagctctctcacggcggtgaggagcctgggttgtgtaaatataggtcagttatttaacctgtctctgcctcagtcttctttggggataataatagctctcataagttcattgtgaagattgaaagcatagaatgtgtgaagagctcagcacagtgcctagtgcataataagcacttttaagtgccagccagcatcatgatcatgactgtttctatcctcccgtttccatgtggcagccttttgctttgccaggtccctagaactgctggaggaatccatacaccagagatgtcgctgcacttctggctacagtgccatgactcttcatatcagtctctgcctcttgggcaaggaacaagcacaggcggaattggtgacaagctggcagaaactccaatcccaggcatgagtggggtcctcagacagttcttgcctcttctttccactgctgactgctgttcctcacataggtcgtccggctgctcccactctcagcctgccacacctgcacagcatagtggactgttgccagagcagtctgcggaggtgctctttccaccctccgccaagcacttgagctccattgagtctttctgcccacacagctctagagggcccagacccagggtggaaataacccccattttctggctgtgatgagatgtttattaggtagttatttctccccagattttacccatatcaaattggagaattcatcttgtccccttttccagaagtacaacctcatctaccattttctgcagtgttccttggttctccttgaggccagcttctgtttccaaatgtataggagacatctctattcctatctccgtcaaacactggatttttttgattaagggttaccctaagacattttctaccctcctccagataagacacactccatgtaattaggccgtccttaaccaaagcacttgcccttctctctgggatgggaggtgaatgccatgccaatctctctctcctctgacctcaccacttaaagttccttatttaccagagattcattcattgtagaagctgaagaagcgctttagattgtgtctgagttggagcacagtgaatcttcctccagggcttcagggtctgctttctcttctctttctgagttgttgagtaagccccaagaatagcttgcattttcttcccttaggaaccaaatccagtgtagaaactatagttccattttttgaaatgatggcgtatcatatgtgctgacatttcttccttatcatggttctcccaccatgtatctatctatcaattgatctatcatccatgaatggcttcttgctggctacacacttacctctgagccagagtattttcactaaaaagcagatgtgccaagatatgacttaccgctgaacaatggcctggttttcaccagattctgtttgctctcaacaagtggaattggacgtctctttcatagcagcatttaatacagaaatgcctagaaatgcacagacagggttattactgaagctaatataagtcaagggaaaaatgcatgggcaaggctcagaaacagaggaaacacctttgtctacaaaaggttggatatggctaagaggtgatcaatacttacaagatgaaaaaggatgcccatctttgattcctctctcttttgcaaccccatgtccagttggtcactgagttttgttgtcctttcttcacttcataatatctcttgcatttctttcttgcttttcgttcctactgtgctccaaccctagttagactctttttatctcatgtgtggtccattgcaatagctttctcattgtctacctactgcacatattttctcttcaaaaatcgccctacagttgccattggattaatcttttaaaagtactacttttcggctgggcatggtggcttgcacctgtaatctcagtgctttgggagtgcagtcaaggcagaagttcgagaccatctataaaaagaaaaaaaagttatccaggcatggtagtgtagtcccagttactcaggaggctgaggtgggaggatggcttgagcctgggagttccaggctgcaatgagctatgagcacaccactgcattccagcctgggtgacagagtgagaccatgtctccaaaaattaactagctaaataaataatgttttctcaaaacttacttacctgtaatcctccaatttccctctaagaagatgcccaaagttctcatcgtatagcattagaaccctccatgaagcagctcttcaatttactcatctatttcccgccattcttgattaaacctctactcgtgtcaaatgggtttacctctcctcatctaaaatttgttcatgccattccagttcctggatacgcccttccttttcctttctgcctttccaaatcctcccccattccttgaggttgggtcaaatctcactcccagcttgaaatgatcactctccacagaataccctgagacattatttttatataattaattttgagcactcagcaaacactgtcccatgacattttccctagtgttttgagttgctgcctaactttcatatgcatacctctcatcatatgtcctgtgtggtgaactcctcacagatctcacagatggttgattcatattctaacttccttccaaagccttttgcatgagccttgcactaagaaggtattcaataatattggacttaattaacagaagagaaagcaactgaaaaggaagacaaactagcgaagccattttcatcaccagcaaagaaatgacagttccagagtttcgttcctgtgcatgttgaagttgcacgtgttgaaatgatggcgagtgtgtttttcataacattacatatctggaaagaatcttgtgaggtcatcttgaccagtttcctggctctgagtcatcagagactaaaagatctatcatatgctcgaagaacctggagagaaaattcctcaggtattttgggcaattgagtctcagggctgtatcagctcttcccataacagttctctcacttgtcactctagaccaatgtcctgaaattttagtgtactcaaatttgctgaacttctacagtgtatgtttaaaatgtaggcttccaggcccactccaaagaataacattcactcattctggagtggggacacatgaatctgaaacatacatattctatttatgtgtaatatatcccaggtgattctgatgcaggtggtctgtaaaacacactgtgagagagaaaagaaattgttctgatttatttttttttaattttagtttaagcatattcattccaggaccatttgccatgaacattaaaaaacagctgattaatagtttttcttaataattgcatttccttacatacatatttttagcctcatgtatattaagagctctctatgttaagttgaactcgatgttcaacacattcattgagcacctatgtgccaggcatcatagctatcaagatgaatgagttaggtactaaggtagattgatcctcattcttaggaagctcatagtttagtgggaaagtgaaaaactgtgataatggtggtgatgacctattacctttcatccaaagtttgtagacattatatatgtttgtggcagtccagcaggagcagagacttggggtttgttgtccgtggcactaggcagaagagtatgtaacatgcccccttgctctggctcctgactctgtgcctttagggctaatgaaaagaaaatgccatcaccccaccactccaacagctctccaagagcagtgagcattggtcagtcagtcaactatgtcttactgaacatttggaatgaccagcactctgtaaggcatttgcagaggatgttgctcccttcccataccccagactttgccacaatagtgctccatgccttccccattcatttgggtccctttgatttccctgccaccaacagaaaaggctgagtgccctctgcattcatgaaatatttagtgagtactccaatgtgcaaggcacttgctaaatgatgtgatgaatacaaaaatgaatccaacacagattctactcttaaggagcttacagtctagtgctgagatgcatcatgtaccagttacaaagtagaatataagcaaatataccatggggttgcttccagccaggaatgggaaagggggctgaaggtacagagggataaggagtgaggagtgttgtgcaaaggggaggtgagtttgggctggaggtgttgaaggatatccggtgaagatgaccagcaaggagttagagaatgtgtgaccagggcttggaaggagggaaaggcaagggacactggtgtcatatgaagcaggactggattctattgtcaaaagagtgcagcaggccagagaaggagaattaaaacacaagagaggtgtctcagatatgccatcttttcttattagacctcaatttaatcactgagaagttgaatttagtgtttgaaagatgaattaaaacattccatttcctgatgtaactcagaaaatacattttcattgtttccctgccttttcttgggtgatgggctttgaatatttccatgtagtttgaccagggtctctattagacctatgaaagaaaggctttttgtactagactagtgcctccgtgtttgttttattcaggaaaaaaatggaaggaactacagagggaagaaaggaaaaaggagaaagagaacaaggtctctgtttatgggcacctttgtttgctgaagattgaggagaaacattgtggattctgattgtgacttgcttgaggtgaaatgtgttctttataaggccgggcttgctctcagggctttgaaggactccatgttgaagacctcctatctttggcacattggattaaaactataatctccaaaacactgccctacagtccttttgtgctgtgctttctctctttgcttgtctttctatatcttctcctgtttctgctatagagtgttgggctcaatgatagtggctccttgaataggagcagaggaaagcgaggtgggggaagaaatagctatgagagaacgtattagtcggttctcacactgctataaagaactacctgagactggctaatttataaagaaaagaggtttaattgacacacagttccacatgctgtacaggaggcttggctggggaggcctcaggaaacttacaattatggcggaggggcgaaggggaagcaagaacctcttacatggcagcaggagagagagagagagagagagtgaagggggaggtgcttcagaatttcaaacaaccagatcttttgagacttctatcaggaaacagccccaggtagatagtgctaagccattagaaaccaccccatgatccaatcacctcctgccaggccccccctccaaccctgaggatcacaactcgagatgagatttgggtggggacacagagtcaaaccatatcagagaataacaccaaagtgttgatttgaaaattttcttagagtaactgtttaggcacaggcaaattaaaatcctgtgcataatcctgtttgggtgcatttgcatctctttaaactatctcatacagctggatgtcatccttggagggaagtctagtggagctcatggccagagtacctagcaaattttcaaagaccttgtgacttatgtttacttgcttggcaatgatgttcctgtgagaagcatgagaccttgtcttccacagagcaatttaggaccatcagtgttacagagactccaaccaacttgcacaggtaagccaactagaatttgctgatgtacagctaaaagaagggtgagcatgaggccggggactctgcattccacatctgtgctcagagactctccctgagccacgtgcagagcagctgtgggtgagaggtgagctgctcgctgctgaaacaccccatttggtgaagcaggcctttgtttgagatgacaccgggagtgaaagcaggttatcatcactatacccagtggtctgacagagcaaatggaagaactcggtgaggtgaggagaggtgagagaggtgaggaaaagattagcgaggctcaaatgggataattggaaaagcaggggcaggcagtaaattatgccccttttacttggcttagttatcatatcaccccgaatgggtgaaataggtcagcaacccatgggtgaaaagcaaactcaggaagggtcacagaggtgagctaagaaccgagctccgaggacactttcaggagcctgtggaaaccgtgttgctggattttcatgcttagaaagagaaacaggacagaataagtcaatagagtcttctgggattgtctggaggtctttttcatcttgtcagaacctagacctatcagtaggaaacaggttgaaaagtctcacaaatgaagaggcaaataaagcaagggagtggtaattgttttgttttttaagagacagggtcgcttgctgttgcctaggctggagtgcagtggtacaatcactgttcacttcagccttgaactcctgggctcaggcaaatctcctgcctcagcctcctgagtagctggggctataggcatgcaccaccacgcccagctaattttaaaaacatgttttttagagatgggggtctcaccatgttgctccggctggtcttgaacttccagctccagtgatcatcccttctcagcctcctgagttgctggaattataggtgcctgccaccatgactggaaggaagtggtggttaatgtgggttctggactgcttacttttgcctcccaccccaacttgcaaccttgttctgtgaccttaggaagttactttacctctttgtgccttggtttccttatgtgtgacagggaaataataattgtacctagaccttcatacgtataaagatcttagttcctagcactcttaagttcctagcagttagaatacattcaaaaagactagctgagaaacacttgagagaatggtttcgatgcccttgaggtcattttggacattggcagggacttcttttggtggttacaaggatagggatactactatcatttagtgggtggaggccaaccaaaacaattcatcctgtatcccacatgacttttgagtgttctcatctgggatgtacacatcccgataggtgaaaaacctaatattattggaacttagaatctaactcagttttaaaaaatttcatgagttctttttgcattgttttcacatacactgaattttgaatgatcataccaatcaagaagattatgctctgcttcgtttagagtgctgtcaggagtggttccccatttcagaaagtcacctcactgatgacaaaaacaatgacctgtcggagctgcatttgtaactattatgtttctaaggcctctacgcatcatgaggcctcatgacttgattgtgacttctagcgtagctatgcctgggcgtgaatatatatatattgaaatgcacatgattttattataaataatgttgtgtctcttttatatcagttagggcattgtgttgatttcttcttgaaatgtatgaggatgagttatgcatattaattttattgaggatattaaaaggccattataaaacagttgttttaaaaaggaggtttagctgtgataggtttttggagctaagctcagcataatcataatggttgtagttcccaaaagtcggtccctgagtcaaggaaatcagaacccaaagaaagggtatttcacttgctctcagtttgcctgttctcttttagccgggtatttaaatgcttatgtggtggtcagagcatttcggtatattgcatgtatcttctgttaaaagaaaaacttcagtggcactaaaattagaagagttttattgaacaatgaacaatttgcaaatcgggcagcctcctgagccacaataggctctgagacttcagcgcagccacgtggtggaagacttatggacagaaaagggaaactgacttacagaaaatggaagtgaggtccagaaacagctggattggttatagctcagcatttgccttatttgaacatggtttaaacatctggccacatttgattgatcaaaatttggtgattggcacaagagtagactacagtttgtttacttccatgtaggctatagttcacgatgtacagagcaacctttagctttaggttaaacttgatttaacactaccctcaataatcttgaagtctagtttctgattaagatgtggccatctgtcccatctctgtagcacacttaacttcaagaggagaccatcttttgtgcatgtgaactcttctctctcccgctgtgggagctagatcacaccagaaaagcctcttttccagggattggtggaaagactaaggcagccagggctggaggacctactttggcagaggtgccctctgctctgtccagggctgtctccccagctgaaccatggtctcaagggctcctgctctctgctgggtaggcctggtacaattaattctgaggcccaatctttgatttgattgctgttaagtcctgttgtttagggagggagagcgtctatttactccctgacatggccaaagatggaaacggagaagttgcagaaaaactttgtgggtaataatgtcatacctagaagatgattgtgttgcctgatagccatggggaagatggcaagtagagacagctttcttgggggtgtgagtcagcttgggctgctgtaacaaaaatatcatagacttggtggcttataaacaacagaaatttatttcttacagacctggaggctggaagtagcagatcagggtgctagtatggtcaggttctggtgaaggcccttttctgtgttggtaactaaaaagagggctaagagctctcaggagtcttcgttttataagggcaccccagagagtgaggtgctacaccttcattacctaattatctcccaaaggctccatttcctaatgccatcacattggggattaggaagaacctcaacattaaatttgagagggcacaatcagtctctaacatggggatggggcctgagttcagtttccttctattaatatattagaatatattagtggtaaaggtgttagagtctagactgacaaaatcaagacaaaataaagagccattaagtctttcaaaatttaatctataattacgctgtattcagaaatgtgctggttcccaaagattaagttttcctgtgtctaggtactaaaagaaaataaaaagggaggaagggagaaagagaaaaagtaagggagagaggaaatctttgagaaaaactattaattagtattgaggagatctataaagtctcttcctggggctcgttgtattttcaaagttgtccacagcaatctctctcaccctacaagctcttctgcaaagaggtggagtctccctcccttccctcttgaattgggcctatcatgagagcaaaacaccatcttctgctggaaaagagaaaaggatagaatatttctgtggtgagaaagaaggttatttgataccaaacccagaccacacccactagagctggagttcagcttacagaaatggatctaagatcaagtcaaatcggtaaagacactggtgagtcagcgggaaccacagtgagctaaaggtagcactgggtgggaggccaaaggagcgggttgactgatgctggagatttgatgggagcggagccttcatgagaaaggctggtatcccacaaggttgcatcagtgttgtcagcatagtcgtcagtggcttgagacctttgaacgtgagctaggggtggatgtgtgcaggggcctggagagactgcggagatctgagtgagaccagctttgcggggttactggcagtgcacattctggctctgttttcctgggatctgtttcttgcccttcctctaccctgttctaaatcaaagggttctgacccttgtaggttgcttttctaagatcggaggatgataggaggcgctgacaggctggatggtggaggtagagagggagaaacgaggccttctcccctccttcccagccgcgcacctctcccactccatttgttgccagacaggtccactaagggtccagcctccacccagtgacgtggagactccgcgaggcaccctgagctccgggaaccccctcctccctttcctctgccccgaggtggtgtcagcttcctgtctttgcagtctggattcctcaccccaccctggctggcctctcggctcctccatcccttgtgtaattgatccctgcctcaaagtcctgtctggaattccctggtggtttctgtttcctggttagatcccgaccgatacactggcctccggagctggtcagctctgattcctagaagagagctgctaaggaccggcctggggacgccttgctgaaagaggtttgtagggaaaccaaccgacttcaggacagtccagtatgtggcttacttgaccccattctctccagaacgacataagctgttatcttaagggagggactttaatggaggaattgatttgggatggggtgaaggattcactaaaagagaggcatcagtggcaccagagagcagagaaagctcatgtcctctcagtttagaaataaccaagtgttctggtgggggcttatgcatcactgaattactgtcgcattcttgggccccatataacgtttgtatcttgtgtctggttcaaatagaacagagaataagggagtgagtgcctctaatttaatattcttatgtttccatcacgtcaaattcccactaggacaaatgtatacaaatgaatcattataattttttcccttttaccctagctgagccacttgggcctctgctaagaaatgatgataaaagtgatgaaaacaaagcataacattataatgtcatttaaaaaatgaaagatttccaggagatcctttgttgtgctggaagagcacgagctgcatgtttaaatgactttttgttttcccttttggataatcacagagagtaatgtaaccaaaataatcttggactgctgctgaggtcatcatttagttcctgctgacatgttgtgctggtcagaaagcaggggatctcaaagggagtacagccctggagacatgagagaaggcgtcattcagactgctggtgcttccctcagagacaacaggggcatggggtttgaatctggctgttcattctcccatcccaacactggagacacagatgaggagcacacctgtatcccaggcattgtagattacagcgggagagagaaatgccaactgggactgtgtccttgggggatgcgatttttcatactgtataatgaacgtgcaatagggaagagcatttcattgtgggttttactgcactaggcgattctgacgggtatatggatactcattccaacttacagtcataagatgaagacggtcatggggaagctgcctggcttccaatgaaatattggggaagaggattcaatatcaaaagttcagaacggagaatagcagagtacaattataaagccctaggtcatttgcttacttgttttattcccttcactagacacagggctgcaaccacacattatgggatagtttagaaatgtggcccacaaattctttgacactcctcctatgaaaatgagggattcatatctcctgctcttgaatctggggagagagtgggggaagcttgtgagtgttttgacgaccaatagtgtacagtgaaagtgacaaaatgggatttctggggctggatcataaaaggccatgtagctttcatcttacaaactgaaacactctttcgtagagccctaagctgccgtgtaaggcatctgactacgctgaagccactacattggaaaggtcacatggaggagctccagctgacagtctcggaggagctcagcttcaagccatccctgcaaggtatcagccatataaatgaatcagcccagctgccagtcaagtatctttgcatggcttccatcagtgcctcatgaaacggaagattgactagccaagacttgcccaaattcctgacccacaaaatcatgagatataataaaatggttgttattttaagccactaagcattggggtgatttgttatgcagcaatggctaacgagaacatattcctaactagacaagttcctagtctattcacaaaggtaccttttttctttttttagagacagggtcttgctctgtcacccaggctggagtgcagtggcgccatcataactcactgtaaccttaatctcctgggctcaagcgagtctcccacctcagcctcccaagtagctaggactacaggtgcataaccacaacacctggctaatttttaaaattttcgtagagacagatcttgctagcttgcccaggctggtctccaactcctggcctcaactgatcctcctgtcttggtctcccaaagttctgggattacaggcatgaaccaccatgcccagactagtcacaaacgtatcttaataggtagagttcactatttagtaagctttagtgtcaaatagccttcagcatcttttattgagtgcctgctgcaagcccctttgatatgggggatacaaggtataaggtttagtttctgacctaaaggaactgataaaataataattatgggataccattcactgaagtattactatgattaggctaatgattctcagagtatggtacctaaacaatacatcagcatcaccttggaatttgttagggttatttatttttaatttatgattattatttttttagagacagggtcttgctttatcacccaggctagaatgcagtgacacaatcatagctcactgcagcctcaaccttccaggctcaagggatcctcccaccttaccctccctagtagctgggactgcaggcacgtgccaccatgcctggctaatttttaaatttttgttttctagagatggtctcactatgttgtccaggctggtactgggattggatagtttgaataattttagcaggctctgaggcatagggtctacccctcattgcctgctacctggccctggcaatgactaggatacaggactagtgacccaaatgtgagagcccagagaaaggaggtaatgggtgggtatgggctttagattggttggtttgcatagaaaggcacattcacagatcagttggttactatctctaggagttggctagttttgggagcagcaatctctccagggtcagcaaggtcccacacatcaaagaattagaataaaaagacctgcttgatacagatagatacaattaccctatatttcagatggcaaagttgaaatcctgagaagtaagtcatatcttcaccaaggggaggacctagatttaaacctgagtctgctggaccccccaaaccatgctcttaccaatgtgctattctgttcttcatcgagctaattaagcatacatgtgggcatctataattgtataaaaagataatttacagagcaaatgaggatgctgagtaatttctatagaaaataattgcatgaagcaatgagaaggaggagggattgcttgtagtggtcacagaagacttgtggaaaagggtcattcagactgctgctgcccccactcagagacgatggatgatgggcattgtgtttgctgggtgggtcttgaaagttggatagaatgggtctgggcaaaactggggagaaagaacattctgaaaagatgggaaatgatgtgatcacaaggctcaaaggcagtagtgtgcaaagtctgatgaaaacaccaagtgttaataggctgccttggttatttgaaagtagattaggaggagacagaagttggatgcagctggatgccacctattttaatgagctaaatgcatcagaagcagtgcatggatgtgcaaaaggtttggcactgtggtctaaatatcaagaaagtatctccatctaaaagtagtgccataatctaggtgcctgagctgggtaaaatgtagagtaagaatctagctgggaatttccagcttggcatcttgtgagataatatgttaggctgggaatctgtgaccaacagggagcacacagacaatggaagatgtttccatgtggactaaaaagagcatcaaagcttttgggaagtgaaactgacagccaggctttcgtttagatgcttctgagcactcacattgtcccaggcactgtgctaggtgatagggagttatacatcattagtcatgctaatcaaacagggtctctgccactgaggtactaaaaagtagtgagctcacagtctttgcacactagagagagcagaggaggcgtctgtgcagcccagccttggaaaggtggaatgaacgggcgcctgtctgtgtggtgaaattccaggaggcacccacagagattatggcagcgcaaggtcgaccctcctatggcttagcttgcaagcctcccacttctgtggcgggagtcacactctctatcatcactttttttttttttttttgagacagggtcttgctctgtcacccaggctgaagtacagtggtgtgatcatggctcactgcaggcttgacctcctgggcttctcccacctcagcccccatgagtaactgggactacaggtgctcaccaccatgcccacctacctttaatttttttttttttttatagaccaggtcttactatgttgcctagggtggtcccaaactcttacgctcaagggattctcccaatctggcctttcaaattgttgggattacaggcgttagccactgcgcccagcctgtgtcatcacttttatactttagtagggtccagatcaccaagggagcttaataatgcacattactgggccctacccctcaccaaagatgcaggttccctgaatgataaaagaacaccaccttacatcctcgataacacctttaatacctttgttatcagttaataacagagcagccagcattgataagaatctaactagaatgtaagcttcagaagggcagaggtatttgtctattttgttcactggtatatccacagcgcctggccatattaggcacttagtagctctttgttgaatgaagcatattgaaacatagatgtggagggtgcaggggaggggaagaaattaagtcaaaaagatgtgtcaacaagaagaaagggatacttttaatacgggaagtggaaagatattaagtgcaaatttggcttttccaaaggtctgctatatttgggtggggaaggaaggcggggaggggaaggctccggtcttcactctgctgaactaaaattataagttgaatgatgcctcctaaaccattggtctaagaaatgttctgattatggaaaaatatccattcagtgcctttcaaattctccgaaggcccctcttttcttactgtttctaaccttccgccatgttcagagaaaacaaacacccagctcttctgagctacagaaattctctgacgggcccacgtgctcatttttatcgacgttccccaggtcactgttaattcaggccccagcaacagcacaggaatgccctggcatccccacagctccttcctgaggagatgagcaggtcggctggaaaacacaatagaatacaaagggaaaagatcttggaaaagatgaaggagaaaaatcaggacccctcaccaagttaaacaaacatctggactgaagggctgtgtaatcaggttttataaaattattttcaataggaaatgatgttttactctatatctatgagacatttagttttcaacattcttttccctctaaattcatatccttagttctaattcatttctctgtttatacatcttctttggaaagatatttttttcttttacacatctttttttttctttctgatcatttctgtatttggcctaattttctccttttgctttggaccagcagtgtgtgggcctcaacaggtaggcaggaaagcagctggtctctgaaagaatcaagcagatcacaaaatgtctgtgaaatgaacatgtctgcctcaagcttcccactctgacggggctcagtgccgagctctgatttgctctggtgaaaaaaaaaaaatcccctaatttcactgtcaaggttttgagaggcattctcatggttttaaagagattattgcataatttgttcatgtttaaagaattatattgttaaataaatttagctctccagattctaaatgacaaaaacaagagaagttacatcatttgaattatgaagtgataatgtcttccaattctgccccaatcaaaagtgtaacagtttaaagcttataataatcatgttcaaacatattcagattataattacttttcttctgataatgatagcccgtctgattggatgattacctatttgactttgataagtctcagaggtcaaaaaagggataattgcagacatctgttttctatggaaaatataatctcagaaaatagtgtttaaagtgacatctgcaaatatgtgttttagaaagaaactcgttgtacatttaaaatcatagggaaaagaagcaattcctaagctactatgtatcaccctgtctttgtaaatagatgagcgagtttaacttactagtattcatgtatgcatgagtaattacaagcaggcatgattatattttgtacaggtagaattagaaatagacatagattatgagaaaggaatttgaaagtgtctacaatatggaatgatatggaagactttcgctttacttttgtttgttttagttcaatctaggcatatatagctgtaaccattttctaggtggttttttatttggaaattggaggtggaaggtcttatttctttgatttctccttggagatgaccttctccagttatgagggggctcctgatgaaggcaaaaggttcactcatggctgccatgcttctctatgtagaagaggtgccagtttctctctcggcaggtgcatcagcttcccaacctcttagggagatgccaagaacctctccctcccttcagccagcagctgtgttctgccgcaaaaagggagaactgtatttaatattcccttccatgcatgataaaacttccttggctttaactaattaactcagaatcttctctaattcatgcaagacctgggttatcactttttctagattcagcttcctaaaatacaactttcaccctagcacttcccttctcaaaagccttcaaccactcctcggtgtctaaggaaggaattccaagcttctcggcaattcaggatctttcataatttgaccttagcctattttttcttctctttttcttctacataaagctttccttttttgttaaatccatctaatgctaaagggtgttaatctttcttgcttctaatctagatctttggtgatgctggtacattcgcatggaattttatcttccccatctctgctaattaatgttttgttggtggtggttggttggtttttgcacctcagattcacagaactggataaaacgtaatcgtaggttcataacaaactagtatgattggtccatgcaaggcttcttttatatttatccatacatattacatttttactccagtctatcttaaatcctctcatttcaataaggtctttccctatatacacagatataatgaccctgttaagagggctctttctgtctctgaactattacaatgtttattatgcagaatgtagaccaccacctgcatgaaacatatcacatgctgcctggtactatcattgtctttgcacatagctgcagccagctagtcacatcctgctatgctgtgtgtgcctgagactttgccatagatgtatgatagcctttaccaagttgtattgtattacatattatctgtaacatccgtcttccccctaaatcagtaagctccttgtggccagatttggtctttcatttatgtttgcatcctaagtgccaaccacagtgcctgacaagtaacgtttagtaagcagttgttgcatattttgaaaaattagattattaacttctaggaagcaatcagggagtcacagaatttcagacaagggatggagctcatgagttttataccctttttatctttcacagtgcctagcagagtactgagcagacataagtccttaataaatacgtattgagggattgatgcttaaattccttcagaaaattaatgaactgcatattagggagggtacccaacttatctcagtttcccctgaactcgctcaggtttgtttttttttttttttttttttgagagggagtcttgctctgtctcccaggttagagtgcagtgctatgatctcttctcactgcaacctatgcctcccaggttcagacgattcttctgcctcagcctcccgagtgcttgggactacaggtgtgtgccactatgcccggctaatttttgtatttttgttgttgttgttgttgttgagacggagtctcacgatgttgcccaggctgtagtgcagtggcactattcggctcactgcaagctccgcctcctgggttcacgccattctcctgcctcagcctcctgagtagctgggactacaggtgcccgccaccacgcccgtctaaatttttgtatttttagtagagatggggtttcaccgtgttagccaggatggtcttaatctcctgtcctcgtgatccgcccacctcagcctcacaaagtgctgggattacaggcgtgagctaccgcacccggcctaatttttgtattttttagtagagacagggtttcaccatgttggccaggctggtctgaaactcctgacctcaagtgatccgcttgccttggcctcccaaagtgctgggattacaggtgtgagccactgtgcctggccaaactctcacaggtttttgtttgtttgtttgttttgtttgtttgagacagagtctcactctgtcgcttaggctggagtgctgtggcacaaactcggctcactgcctcgggggttcaagcaattctctctgcgtcagcctcctaactagctgggattacaggtgtgcgccaccacacccagctaattttttgcatttttagtagagactgggtttcaccatcttggggaggctggtcttgaactcctgacctcaggtgatccacctgtctcagcctcccaaagtgctgggattacaggcgtgagccacctcggccagccactctcccagttttaaagcaaaaaaaaaaccatgtctgggagtccccttagtcccaggcaaactgggacagttggtcagcttagttagaagtctcacacacatatcaggagggggtatagctctgaggcagagtattggactgcagatcaagaagtctcatgcacataccaacaatgtaaatgctaataatattactctctctcctcatggaggtcttttaaggatcaatttgcaaacttaaactgaatttctgtgtatttgatagggaccaaaagaaagttcttgtgaattagtctgaattttaggctcttcagaatttaatttaaaaaaattatattgttattcccccttgtaaaaattagtaagagtttgaaatgcaactagatttcacttctcagagtgtgatttctcttttgtgagcttaaagagacagagcttaacaaagactcaagcctatgacctacaggccaagagggaataggccaagagggaatataactttcaggtagaggccacccacaactaggctgcagacccccctccccactgtatgagttggggggggcagggggtaggggagctgttgtgaatcaccaagtctcttttgtgtaaaaccagcctccttgggtcctctcagaaatcttttattaaaactctaagaattttcctattcttcgtgctattccattgttattccattccacatccattgttatggagggaatatttacttgctattgaaggaagtcttgtgggatgtatagtcaataatttcatcaaggagtaacttatctttctacttctggtggaaaagggagggaaaaagtttctcttaagtagcttataagcttttgaagaatatgtacaaagagatatttttagacaaagagagtattattttccaatttttagtaaaaaagcagcataaaaacaaacaaagtctgaaacaaaaaaaacaataggggcatgcccagagaatgtgatggccactgatttctgcattagtcacttaacaaatacacacacagaggatgcatgtttgtttctagggaaaggcccaaatgggaattatcctggatgtaacttataggattagagatttgttggctctttcactaccaaggagaggaagaagaagaaggtaaaacaaatgcaaaaataagaaaacaaaggtggcaaaacttctagcaaaagcaaatctttgccatagtggattctggaagcttgaaacatttgcagttcacacagtttatataattctatgtatatttgcttcttctgacttatctaggtgaactaagtatagttggctaaaggtgttgccttagtctgctcctgttgctataacaaaatactatagactggataatttataaacagcggaaatttatttctcacagttctagaggctgggaagtccaagatcaaggactaggactcaagatttggtgtctggtgtaggcttacactcctcttccaagatgatgccttcttgctgtgtcctctcacagtggaaaagtggaagagggaggcagctctctgaagcctttttttttttttgagatggagtcttgctctgttgcccaggctgaagtgcagtggcgcaatcttggctcactgcgagctcggcctcctgggttcacgccattctcctgcctcagcctcctgagtaactgggactatgggtgtctgccaccacgcctggctaattttttgtatttttagtagagatggggtttcactgtgttagccaggatggtctcgatctcctgaccttgttgtccacccgcctcagcctcccaaagtgctgggattacaggtgaagccttttttataagggcattcatccttcacaagggtggagccttcatgacttagtcacctcccagaggccctaccttctaatactatcactgtgttgattaggtttcaatgtatacattttggagggacacatatattcaaatcatagcaggtgagattcccttttatgccaggacattggcctccagctgacaactatctccactccctgccatacctccggcccaaatgatcataatgttttgcctaggcagttgcaatcactcccccgtattcactttgcccccccaaccccatctgttcttcttgatacaaacagaaccaatcatgtcgtcctcccctttcctctcattctccttccccagggatgaagtattctgaggtgaaagaccaagattcttaatatgctcctcaagatcctgtgtagtttggccctacttacctttccacctcatcttgcaccaatctctccctgttcctctgcacttcacccagcctcatctagttcctcacacttttcatgcagcttctcaccacagggcctttgcacaagctgttgttgccacctggagaatattctctctcattctccactgtgtttagttcttctattcctttagggtgcagttcaagcacatgagctcaggaaagcctttgcagagacccatccaggtcagatttctttatgacatattctcctaagtccatgtttgtttcatcaagagaactcatatggatatgtaatagtatactcattttttgtgattaagcaacctctgtcaccaactacaagggccatgaaagcagggactttgtttctgctttgtatttcatcctcagtgctcactgaagtgattggcacatggcagccactagtcaactgcttggaatttttttaaagaatttgtttcaaggactatccttggatactggacacgctaaataataagtactagattggaacataagaggaaaatttgagcttcgattcgattcttgtgactttctggaagatgtaacgtatttgccttggtttctatgtctataacctaagaataaaaaggcctgctgccaccagcctcatcccatgaactgtgctgttctcccgtgattcagtgcatttcacagtgtattagtttaaaccttaggtgctgtaacaaagagacctaaaaatgcagtgcttaaacaagacagaacttatatttttttctctctctcatttttctctctcccaggccagtattccagggtaggtgtattggctcagtggtgtcagcaacccagacttcttgtatcttcttgctctgccatcctcaatatgtggcttctctcaagggcccaagatggatgctctagctttcaacatagcaaatacattttagttattgtgaagggagaaaatggaagggaaaggttttttatttccctttaaggacgtgaactggaagttgcacatactacttccaatttcactcctttggcaagagctgaatcatatggctacagtgagttgcaaagtccattgtgtcgtgatttttttgtcagtttgttttgagacagggtctagctttgttgctcaggctggagtgcagtggcgtgacctcagctcactgcagcctcaaactcctgggttcaagtgatccccccacctcagcctcccgagtagctggattacaggcatgcgctagcatgccctgctaatttttgtatttgtatttttgtttttttgtagagacagggttttgctatgttgtcccagctgatcttgaactcctgggctcaagggatccacccaccttggcctcccaaagtgctggggttattgatgggagccactgcgcctggccatgttgtgattttttactcaccactgtgttttcccattagactgggtttcttgaggtcaacagtattgtcttgtttctctttatgcttctctctccctttagtgcctacctgagagcctgctacagagcagtccctcagtcattgcttatttaatgaaataaatcaaacttggtatgcgtctagaataactgaatgttggtaaggcagatgtttgtcaaatgcctgtgttttcatggactcctaaaaagagctaattaagtctttttgacttgctctgtatatatcaccttataaaattcatcatgaaaacacatcgggtagattttaactgagatccacatatgggctttaggaaatgtgtttttctgaggagacgcttcatgagatttttcaaagtaatttgcgacctgaaaatgtttaagaacccctcacatggatgtggagatttgagggctcccaatacatttgcggaaattcagaatggagaaataaggcaaaagacggaggcagatggaggtcaaatttcatctatattgctacaaaagttactactcaagaaatatggcttatatgttttgacaagtggtcttctgatattgaatacaagatttatgcacatttactcactcctcagcacgtggtctgggcatcccatctcatcctctctctataggagagagagtctgtcctggagcaggcaagcagagcgtgttcctctgggcaacttgttccccacagaagaaaaagagaggaggaagaggcgaggtggcactcacctaggttttttcccccaagtccccatcatattaggtcactttttcttcccttaaatgaggaacaggtgtggggagagaggccaggaattttacgctaatgagactccttctacctggagggacacatcaggtgtgcagaagaagggttctcccttaacagtgaagattgaaagactgatttctggtaatgagtccctcatatgttcacagaaaaatgaataggttagatgaaataagctccaaagccatcccaaggctccacatatgggaaacatttccagtcctaatactcatggcttacatttttggttgtttgggttatgtagggggcatacttaggcagcgctgttatttcttgctttgtggcctcagtctttttcatcctggatcccagagaacctgacctggcctgcaagttcctcatccagctggaagcaggtgctggggagcaggtggcctcccccgtatctccaactcaggaccacctggggcagggggagtgtggcgtttcacttgagccttctccttgccacctcactagcttacttaggaaaagcaagagaaatgggaaatgggagttggaaatgcagccaatcagcaacggaagagcctctggggaactcagggggcgaggggggaccctagtatctcagcctctgaccttagttatccctgtttgtgggggaaaatgcattttcctgttttgagggctctctacaatgcatctcaggcaaaaagtgaggaaattgggtatcctatatacatataaataacacccttaatcatcatcgaccaaataggctacactgcccccttatgatgtttcaggaaagcaatccgggcattcccatggcctttggagggattttccatgattctgtaaatccttgagtaatattgaagctctgtaataacaccaagctacttttgcatttattctagtcttaggtttgaacattataatattagttgtttaaattttcatagagtccatggttcagaagagttctggggaaatcatttaaattcatcctcctgcaggtcccttgatagggctgcaacttggctaacaaagacaaatggccttctatctgattctgaaaggtctccaggggaagattccataatgaaccacagtaatcatgaattgctaacatgaatgtgccccactttaagaaaacctgacatgtgaaagcctatgtggcaggataatttattgagatactaatctacgctttgttctctgtaatttgcctcccctgtcccaccccccgtccccatgaaggtagccagttctgtttcccttcctgtggaggtgatagagtttacttgtgctatattcctattgttttattagacagatgcacagagaaagagaatacgcttgctcatgtgctaatgctaaagtcaaactcctcaagtaacactataggggggcgatgctccttagaggatgcagctccacctgactcttcatcgtcagctgtgtgttcttagaaaatggcttttatctctttaacctctgtttgatcatctgtaaaatgaaaggttgatttaatgacattcaggtacctccctgctcttgaatctgtgggattatcaatctcttaagctccgactcccaggacagctgtggaacatttgcttaaaggttttggagttgggtggccaacttcagcaaaggaaacagtatatgcaatatttgtgacatgcttatacaaaaataaaatttgctctttgaaatcacatttaactgggtatcttatattttatctagcaaccccatttggggtcacctgcatttgggagatggaaggctgagggagaagaagtttgtttcttttcattgccatcaagattggatctagcattcaagaaacaggtttatacattttctttctctgtaagcatgtccatcttatttttaagctatcctagcacaattttcattgaaatcttcaaaattaatatttaacatgaaaaaaataaatgagacctgcccattttactaaaggccaaattttctataccttataaaaattagagagcagaccaataaaccctaaagcaagaagagaccagctgctcaattgatcaaaatgatagaagttcttctacatcacctctcccagcgagggtatgactggtgttactggtgggagttatatttttgtcctgtcctcaacatttctatgacacaggaaagcaaatggagtcaaagttctgattactttttcctataacactacaagcattttttttttaaatgtccttctgaactctccattccttaattttggaattgcattgaatgtcatcatgctatgatttaaggaaatcatctgtaaatcaaaacaatcttgatgatacaggttgggctccctgtgatttcttgacacaaaacaggtcaggatctaaaactgaatgtggaaagaaacatgatttatattttgtccaattagcccgtatatgaccttcatgtgaaaggaacatggccttggataaaaagactctctcattgatttatcccatttttaatcaaagtaaggtaccaacacatgcaggatgtagtaattcacagtctcaagattaaatgctgataaaaatttgtagcagttttagcatcaaatatatcctcacccataacaaggaggtcactctattagtgagcaagtctgggcacaaaatggggaagtccattgtccagtttgaataatgtagtggaatctaaagctttgtggataagaatgactgaccctgtaatgtcctcggtgcatctgtacttgaagtgagattaacataagcgtgatctgcaggaaataggtaccctttaaagataccttcagctgtgtgtgtgagagagagcagggccacggggtgtcgtggggtagggggaaaggagagaggacctaagagactgagtgaaggcaatttacttatcaatgttcaattttcctaaatgtcaacttgatctctctcttttcgtacgttacagttgagaaataggtttgatttgagtcacaggaaataataattaaaaaaaaaacccaaaccattgattactcttaatttgctttgtcaagaggctttgctttacttgcattcataggaagggcaagtggaaagtatttcggggctatgaaagaatgccagtgtgatgaggctgggaaattcacgggcatggttcagaactctgcttctcagatccatttcataacaacttaatatgctcaagtattttctgaggggcaagactgtcctacagcatagattaagtggtccaatttttgcctctgggagaaggaaaaaaatatccaagtaggtagacaactattcaaaagaaacattgcatagatgcttagctttggcaatgttctgatgctaagcaggggtggagagggtggtgcagagctgcgctctgaagcctggggaagcaggctgggctgaaagctgggaagaacttagatcagatgcgatgctgcctaatcaaggttaagacttagcctgttaccagggagaagaagaaagagccagtgaatctgactacataattgctatttctttcaaaaaaaaaaaaaaaaaaaaaagattgggaaaaagggaggaaggaaaggacaggcttagactctgtaggttatttctgaataatggaaatatttttaaattcttgttataattaatcaaatctatgttctttgggagtagaaaactaaatgaatgcatcattaatggcttagtgtaaaagtacaatcatgcaaatttaagtctcctattcattccaattgaaaactctcatgataatggttaacgtcttgcactttcactgtgtgccagccattgtgttaaaagctttccatgcattatttccctcacaacaacagatgaggaaactgaggcttagagaatcgaggcaaactcatcacgtctcaaagcttgtatatgaagcaaacaggagttgggtcccaaggtcttactccaaagttgtgttcgatagacatcctgttgtatttcttcctctgcctccctgcaatcgacatatccttgtaatcaggagcaggtttttcttaaggagccaaaagagagaagagataatttagatgataggaggaaaattgtggtagagcatatctttgtcacaaacaggtctttgaaaataccagatgactgaactaaaataaatgggagagagtgtacttatttgatgtggggtgtggtttactgctatagaaaaccagcaatggccaaggggccagtatctcaaagacaaagaccaatgacagagctggcaggacaggagcttttgctcactgtattctaggatggggtggtaaaaagctagggcattttgtaagcatctctagattgtaacttttgtcttttggattaaggagatgccaagagaagtagtacagaaatagggcttttcacaatttcaggagatacttaagtgagaatgcagcatttctcttgtaatacaggctaggtaggttagaaatctcttccccttttcaatgaaccaagacattgctaagcagttagtatagtggccctgtgtttaagtgacacagagggaagagcaacagatggttggaaacagacctggtttccatccatgcatctctatgaaggcatatcctccaatctcccagactcagtttccttatctgcaccacggtgttagaatgcttacattgctgggctgggtgccgtggctctcgcttgtaatcctagcactttgggtggctgaggcaggtacatcacctgaggtcaggagtttgagaccagcctggccaacaaggcgaaatcccatctctactaaaaatacaaaaattagccggatgtggtggtggatgtctgtaattccaggtgctcgggggctaaggcaggagaattgtttgaacctgggaggtggaggttgcagtgagccaagattgagccactgcactccagcctgggtgacagagcgagactccatcacaaaataaaaaaaaaaaagaatgcttaccttgctggcttgttgtgaggatcagagatcacatacaattgtggctggcatagagtaggtacttgataaatggtagttattaccagcccaccgtttttactgggtaggtgaaagaaggctaagccaagaaagggaaaaatgttaaaggctgaaaaaaaaaaacacaaaaaacaaaaaacagagggagggatagggtggtggcatctggcttgcgaaccccactgttgcccctcccaaactctgtccttttaacgagccatatgcagcttccaacagatgagatctggtgtctgcaaagacaaagcagagccaaaaggcgatgtaacacggaattagagactgcttttccctctaatgagccagcctgctcatttaaaatgcagtgctgtttggagcccagactgggcggcatgtgcagccgtgtgcccgcgccgttcctcacgtgcacatgggtggcttgagcgcataagcatgactgccaatatcacggttggttagcttgtggcccaatactgggcggtgtggtgtgtgcgggaggcggggcgctggagccgctgtcaaggacgactgtgggagtcacgcagcctctaagctacttgggaaattgactctcatcagccaatactctcaagatcttgctgagtacagaggtactttgggaggaaagtgagagaaagaagagatactagctgttcccccagagggctccctgactacccagctggaagaccacacacacaccacgaacacatacgacatacacacatcatgtgcacccaccacacagaccatacacatacatataccatataccacacatgtgtacacacactctacacacacatcatatgcacctgccacacagaccatgcacatatagataccatagatcacacatatgtacacacatgctacacacacatcatgtgcacatgccacacagaccatgtacatacatataccatgtacacacatgctacacacacacatcatgtgcaaatgccacacagaccatgcacatacatacaccatgtacacacatgctaaatgcgcaaatcatgtgcacatgccacacagaccatgcacacatagataccatacaccacacatgtttacacacatactaaacacacatcatgtgcacatgccacacagatcacgaacatgtagaaaccatagaccacacatatgtacacacactacacacactacacagaccatgcacatacatataccatgtacatacatgctacacacacatcatgtgcacatgccacatagaccatgcacatacatctaccatacaccacacatatgtacacacactacacacacatcatgtacacatgccacacagaccatgcacatgcatataccatatatcacacatatgtacacacactacacacatgcatatgcacatgccacacagagtatgcaggtacatataccacatgtcacacatatgtacacatacacacaccaaacacatggacacacgtgcatatcacacacaggccacaccatatgtacaccacaaaccacactcatgtgcatgcactatacgtaccatgcatgtaaacatacatactctatacatataccacacacatagacacacactatgcacataactatgacacacagaccacagacatatgcatgcacacatatcacacaccacatacacacaacatatgtgcacatactacctgcaccacatatgtgtgtgggcacatgcataccacacagagtgcacacataccacatgaacacatactacatgcaccacacatgtacatacaccccacactttacacacataccacacacatatgccacatacaacacatatatacatatctatatttatcacacacatatgcacatatcaaccccatgctgtactcatgcaccacacacagcacacacttttatgtatagataccacatagatatactacacatgcataaaaatgacctacaccacacatcacacatgcacaccccatgtacatgcatgtgtcacacccacaattctatacatactatgtacacgtagacaaacacatcatataaatacatacctcctacagatcacacatatacacctacataaatattacatgtcacacaaatatatatactgcacttacagtgcacacttgtatacacatgcaaacaccatgcaaataccccacacaaaacacacacaggtacacatcacacatgtacacatcacacacataacgcaatcctatacactacacacataagtacacaccacaaacactacacacatacacaaatcctcctatgcacacacacacatatccgtaccacaaacatatatacacatgtaccacccataccactcacatatcacacatcacatacacacacatcatacacatacataacaccaagtatatacacacaaaacaccacacagcacacatgtatatataccacatatacatacatgtgccccaacaccctacacacacatatacaagttacagacatgtacacacaccacacacatcaccctcatgcacataccccctacgcataccacacatgttcacacagtacacgtaaatacccacatactacccacatatatcacaaatgtctatatacccctcatacaaaacacacccccataccacatacatacacagctccaccatatatgcataccacacatacatcacatacatacacatgccacacaccacatacctgatcacacaacacacacaatgcacacacatgcagaaatctcttccatgtccacacacatgacacacacactcactactacacaacatacatgacctcacacacagaccattaacacagatgctaggagacacaaatgtgtcttgctatgtccccttgcaaaagtgtactcctttggggaccagaactctaacattgcagagcccagagttgtgtggcaggaaataccaactgaaccagtagtcatagagagtgatattaaggagggtcactcctgcttgtacttttcccactgggacacaacaccacaaagcagcctccgaattaatgcacacactgcgtcctagagaatgatgtcccatctcctctgagccagcatatcagccgcccttttcaagtgagttttcgggatttcaaggctggctgcttttggatggtgtgacaggtgatagagtgagtgtgtcccatggctccaccccctcatttccttcactgtgaagtgggtctcctgttggatgctgtattacttgagatgttaagactgtggatcagggatactgtaaacccttggagagtggtgctggctgaggctctgtgggcagacagggcaaattcgttttgagattggtacccatacctgtgaactgctgactgttccaggatggcagggacccagtgtaagtgacttgtcaccaaatggtccattgggctccttaagaactagtgccaacaggttgtgcattcaaaggcagcagtatccagatcagccttttcaagtggaagccagcagttttgggtccatacacagcctccatctctgtccctgtggcgattccattcatgtgcttatcctgccagctcagagaaagctgataacaaagactggctaatagcagctggctgcatcattttgtctacttggttgttcagtacctcttctgtgaggattataagtaacacccattacttttagtgggtattaaagtgtggtgcagcaatcttgacacttaatgcttaatgctatatgtccattgacatgcctctaccccaggactcctcaccaatctttcagt

SEQ ID NO: 352 - DNA, 32742 bp, Homo sapiens
  source 1..32742: mol_type = other DNA
ggattggctgttcggagcggcgaggggcttggcgggagcttccagtcgctcgagagcggagagcggcaccatggccccgcgggggcggcggcggccgcggcctcacaggtctgaggggtaagtactgccgaccctcgggagcgcggggccggagaccagcttgaactgcttcctcgcctgccgtggtttgcgcctcccggcgctgttggtgctccactgtggaggtcgcccgagtggccaatcgcccgggtccccggcttcctcctcagtctagtggggataacagtgatcccacctgcacgggcctgtcggggcctaacactgcctggcgggtgggagagacgtcagccagtgtcgtgtcgttttgtggggagggggagtgccgtccaaagtagtgagtctcaaagtgctagcttgaaagcaaaatattcagcaaatacgtattgcctgcggtttgccagactttgttagtggagttttattctctgactgggaatcagttttcttattttgaagaccctggtgttttcttactgcaaaccacagaccgtaaactggagcataaatccggctgggggaccgagctgccgcttgcggttctccaggatggctcgagcggtttttgtttaccaaagaaagcgagcgtttggtcggttgcaaaacgcgctctagaatgctggtcgctgattcgttggcgaatggccatccaaggcccggcctggatctggcgggaagggtctcggcttgctgcagacggtgcacaaagccatacgccaagacgatctgaagagaacaggagttcccccgggcctgggaaggctgcctggaggaggaggtgctggtagatgcggggttagggtggaaaagctggagcaggacaccgcaggtgggtggggaaaccgagaccagacttctgtggccagtggaggagaatgaagactcccccagtgcaaaaaaggattagaagagaatgtcagccttcaatgtcagctgaaaagagtttatctgaaaggctagtggtttttgttgtctttttttatttttatcttttaacatttttgggtttgagactcatgaaatctgttcatgcctcctcccaaaacacacttacgcacatacaacagaatttttttttttttttttttttgagacggagtctcactctgtggcccaggctggagtgcagtggcgcaatctccgcctcccaggttcaagcgattttcctgcctcagactccagaggagctgggattacaggcgctcgcccccacgtccagctaatttttgtatttttagtaaagacggggtttcaccatgttggccaggatggtcttgatttcctcacctcgtgatccgccctcctggggttcccaaagcgctgagattacaggcatgagccaccgcgcctggcccagaaattttacctgtgggttgtcacagaggtttctgtctctcagaagccccaccttgactccagcgtaaggcaaggaggaaccttgactttttttcccccccaagaaaggacaagacagctcaaagagtttaggttaagaagtttatgtggtctagtgtgtagctgggtttctgttacctggctatgtgacccttgataagtcacttaaattttctgaatcccggaatcatcatctataaaattgccataaaaccaatacttgtcttacctgcttccttaggtttcatgaattaaataaataaatcgtgaacttgttagaaatgcagaatcccagacctcaccccagagggactgaatcagacactcctggggtggtgccaagcaacctgttcaacaagccctcttgagaattttgatgacactcaagtctgggaaccaccgctctgaacagttttctaactttttttttttaactgtgattcacagtaatgatgttttacatcacacttagtacacgtgtgcacacatccacacataaaacaaaaggcttgtgaacatagtatatccagtgcaatgcttcattttatattttccttttttattgtttgtttttttaaaaatgctggcctggcaatcttaaaagacattataggacaattgatgtgatttgggtatggactgtagattagattatggtatcagtgttaaatttcttgattttagaaattgtaccatgaatatgcagtataatgccctcttaggaaagacatattgtagtatttaggggtggaagtgcacagtatctccagacacacacacacacacacacacacacagagcacatgagtaaagggcatacagaaggtccttgtgctatgtttgcaacttttctgtgagcttgaaattatatcagataaaaggatactaaaacattggtttagactaagctgattttgctgtctacaaatgagaaaaatatggctgcaatctgcatggcatattttaaagtctaattatgtactgtattctcctggagtatcccccccgtacccttgtacgatgcctggttggtggaggatagtctgtacatattcactgactgctggcactattattagtaataatgatatataatcctgccactgttatttcccgtttttattcttgtcaccattgttacatttgttttcttgaagcttgttgaagatatatatacaactttatcatttgaagctgtggtccaactgagagagtgtcaagggaggtcgagggcaggccctggatttgaactgatgtaaattttaatgcaggcttgtctccctcctggctccgtgttgctgtgggcaagcacacatctgtaacatgggattcacttctaccttataggactgttagaattaaatgagaaaaggacgtaggagagccaggcaccggatggagcaggtgtcggggcttagcgttagcctacctcccctttgttcagctgtgcagagaaagtcaatcactgctgattgattaaggcctcagggaaaaagttaacagcaggattccaacttttccatgtccctgagggggagaggtatgttattttatacattggtgataggatttgacctataaaaaataaatttgtggaatatgggttcttgtttttttttttggtaaaaatgcgcggaaagggtcataactatggtgtttcctcagttattttaactatttcctaactcttgtgtttttttgctgtttaatagcgcaagacgttcaaagaacactttagaaagaacacattccatgaaagatgtaagttacctttttgtgttgtggttttctcaaaattgacagtacaaaataacattttttgggtacctcagttttgtagacttcacttggcaagttcaatgtttattgtagtgaaaaagtgtgttcattttcctcacactttttccggtatagtggataaaatgacttttgttaatgttttagaatttcctttatttctgagccgagtttggttttattttcgtttagataattgacttcatgtaaaaattgtacagtgctgtaagcttttttcacttaaagccatttctcctcattgtacttttcaagaattgttttatgatttcatgatactccacttagttcacattacaggtttacttttctttagagtcttagaataaatgtatgttaaaggcatgtgcatttctttaacgttcttgatagctaattccagtttttttttccagtggcttgtgtgattgacattgtaatctcacattaacagtgtatgacagtgccaggcaccccggaaggagttccttctgcttgttctgccctgggctttctctgtcctgcatagtccttaaccccagcctgcagacgatagctctcttcccctctgggaaaccctgggatccccctgcagggttttgctcagcgctctgctcccaccccggcattacttcacgggttctttgggtggatttctctcagctgtcctgccttgcccctgccattggtagccaaagtacagtgtgcctcggagggatttctctaagctccagccttagctggaagcccagagtgcctggaatggattcagctttcctgtccttccctctgcaaggcagtccctggtggaggccccctatgccttgggaggggctggaagacctgccagctctctccacattccacccccaagcactccaggaatgattctttcactgggggcatctgaatggtcaagtttttatatggtttgccaattttatttgacctcctttataccttccagaattttcttatttttgtatctgttaatagtacccttccacattttctggaactaccatgaaagtttttctcattttatgtatgttttcatgtttcattagatttggggtagcagacttcatgggtgtatcagtatattgaactctaaaccctggtgtcctttagtcaggagtttttacacatgtgtacccttaaaactgtttatgaacttttgggtatatgggcatatttccggagacaggacccatcactttccctaggtcagaggtttaggcaaactggcccatgggccaaatctagcctgccacctgtttttgtatatccctgcaagctaagaatggtttttaccttttttaatggttgaaataaaataaaaagactatgtcataatatgtgaacatgatatgaaattcaaattgcagtgttcaaaagtcaaattgtattggaacacagccatgctcattcttttctgtgtggttactgtctgcattcatgtgacagtggctgagttagtagtcaaaacagaaaccttacggcctgcaaagcctaaaagaatttactttcttgtcctttatagaaaaagtttgccaatccatgccttaggttatcaaaaaattctatgtccccaaaaagtgttagcttgcttctttctttttattttaactgaaacattgtaattgtacacatttgtggggtctgatttgatcttgccatacatgtctatgttgtataatgacccaatcagggtaggtagtgaatccatcaccccatgcataaggattgcttccttaggcagcagtgattacaagaatattcttgctgtataaatcaacctattgttctttgtgagagccaactcaatgactcaactttattcacttttagaaagctggtcaaaagtgcaagcctattgacgtgttcgactttcctgataattctgatgtctcaagcattggcaggctgggtgaaaatgagaaagatgaagaaacttatgagacctttggttagtactttaaatctttatcctaacataactctaaagcaacaacatttaggccagatataataaaaaatagaagtatcttcaaatataaaaattagttgcctgcatgtaaatataatgttctctggggagtacttgataatttgaattaattttcctcacttacgggtacattgaaactaagaacattatcaaagcggcactcgtctagtagtattcattaacaatctggtcacatgaggacgcttactatagtactctgtaataaggggaacatagcatacatttctcacttcactctaccatttgatagagccattaatttagggaggagaagagtatgggtaattttcctttgtcctaaactcatggaggcaggggatgcttcgggagagccagtgggagagcttcacctgtgttccttggagtgtgaggtaaaaggccagtaccaggctggccaggagtgtgtgagttgtcagggtgggctgcttgtgtcactgggcactccagaagccagaaatgacagagaaaatgccatgtgtccccacatctagaactgcagtagtcaggcatttttgctggaataagttttaagagaattttgaaggcttttggtttaattttttgtttaaagaaaatattatacattttataaggtgaaatgtattcaccagaataatgtcttttattatgacttgataaaaatgtcctatttgtctaaaatctaaatctaaaagatctgaacctaaaaccccataattttaaaaatggaaatgaattcacataccataaaattcacccttttaaggtgtacatgtcattggtttttaatttattcacaaggttgtacaaccgtctgcattatctaattccagaaaattgttatcctgtagagaaccctgtacccatgagtggtcactccctcttcccccttccttcaagcccctggcagccatgaatctccttcctgtctctacagatttgccatttctggacatatcagtggaatcctagactctggtcctttgtgactggcttcttttacttagttttcagggtttgtccatgttgtaacgtgtatctacctcattcctgtaagtttttatagctcagtgatactccattgtttggatataccgcagcttgttacccatttatcagttacatttgggtggtttctattttttggccactgtgaataatactgctgtgaacatttgtgtaagagtttttgtgtggacttttttcacttctcttgggcatatagtgggagcagaattgctgagtcctatggtaattctatttttaactttttgaggaactgttttacaaagcggctgcaccactttacaattccatggcagtatatgagagttcccgtttctgcacaccttcaccaaaacttactgagttttttattctagccatcccagcacctcattgtgggtgtgagtgtgtgtatggggtatgggtggtaaaatatagtttaccatattaaccttttttaagtgtattaactctgtagcagataaatacattcacgttgttgtgcaaccatcatcaccatccatctccagaactttttcatctttcctaactgaaatgctccacctattaaacaacttcccattcttccctcccctcaactcctggcaaccatcattctgttttctaggaatctgatgtaaaaggaaacatagaatagttggttctttggtaactggcttatttcatttagcataatgtcttcaaggtttatctgtgttgtagcctgagtcagaaattttttttttttttttttggagacgaagtcttcctctgtcacctaggctgaagtgcagtggcgcgatctcggctcactgcaacctccacctcctgggttcaagcaattctccctgcctcagcttcccgagtggctgggattccaggcgccccccccccccaccccccaggaccaccaccaccacgcctggctaatttttgtatttttcagtagcgatggggctttgccatattggccaggctggtgttgaacccttgacctcaggtggtccacctgcctcggcctcccaaagtgctgggattacagacgtgagccactgcgcccagccagaatttcctttttaagctgaagaacagtctgtatgtaccacattttatttttatctactcatctgttaatggacccttgggttacttctgctttttgactgtgaataattctgctattaatactaacatgagtgtatcaatatctgtttgagtccctgctttctcctcttttggacatttacccagaaatggaattgctggatcatatatattttatattttcaggaatcaccatttccacagtgcctgtgttcccaccagcagggcccaagggtttcagtttctccacatccttgcctacacttgctattttctgggtgtttgtttgggtgtgaagtactatctcactgtggttttgatttgtatttccctaattactaatggtgttcagcaccttttccgtgtacttatggctgaccatttgctttttttttccctttgaccttcttatgtatgattattggccatttgtatattctttgaagaagtttctgttcaccctttgcccgtttttaaattggattatttgtctttttattatgaagttgtaagaatccagtttatgtgagtggttatctgtggacgtttgggattgttctatttcttttttccccccttgttattcacagcaatagagtaaataaatccctttgcctcgtggagggcaatacaaagtatactactaacttaaaaattgtgcagttgatatgttcattatttaagcagctgtttagttgaaaaaatgttgaagtttgcactgtcatgctaaactttgagcatgaagaaatggttgcttggctcttaccaggcccccttacagcagttcagctctgtcaccactggccacctcttcttctccaagctctctacccctgcgttaagtcctgggtctctcctgttactcctctttcctgagcacccgctaggagcatctttctcctcttagcatctcctttctgtgcctttccaccaagttcatttgctctccttctcttttatcttcttcctcattcaaggtatctttttatgttatctaaaggctctggcatcccagagtaaagcagagaggaagtaagggaggcctggaatctccccaaagggcttttcattcaaaaatactgagggcccactatatgcagggtactttgtgaggtgacctctctaggcctgttgagtttatagtttaatgcagtggtctctcatgcagagtgtatgacgcctgacagggatgaggaaagaaaatgttggacttccgatttatatttttatttcattaaaatttccccaacctgggcaacatagtgagaccctgtctctacagataattaaaaaattagctgggcatggtggcatgtgcctgtagtcccagctatttgggaggctgaggcaggaagatcgcttgagcccaggtgcttcaggctgcagtgagctgagatcgcactactgcactccaggctgggcggcagagtgaggccctgtttcagaaaccaaaaataattccatgtaagtgcagtaataaaggtttattattcataaatattcatgtatttattggtgatagggtttacaatttttattgttgaggtgtgagatcaaaaacatttgggaagtggcctgtgtaattgattttgattttgttagttgaacaaagattgttttgtactccattgtaagggaataaactacagtactgcccaaatagccagacttttaaagttgtgcttcttttttgtcttttgaaagatcctcctttacatagcacagctatatatgctgatgaagaagaattctccaaacattgtggactgtctctctcttcaactcctccaggaaaagaagcaaaaagaaggtactggtgtatttcaagcaattgtttattcatggttaatgggatttctgagaaactctttaagatagaagctaataaaacaaaagcatttcaagatcctttgagccaacttgttatgctttttctcaagagaactgaggcataaaaactttattaataattgacacgataattataatagctgtgataactgacagaattcacacctgattatcctagaaatcatgcctgggaagatagtttagctttgagtcaaataagaaaggagggaaagattttacaagcatagaatgttaggtgatttttgggaggtctctttcatttacaaattctctataattatcacaaatgagatgtttccttgtatatggtaggtgataattacaaagcaataaaaaggctgtttcagatgcactgtccctgaagtgcattggtttgagtctttgagatttatgtgaagctataggtccagaaaatctctataaaaatgatttcatagagaaaacttgggagcaagttatataatgcagaactcttcgataactgtagtactcatttaaaattatctagagcagctctttgacttagggacctctgttgggtaacaggtcagttctagttactaaatgtatttagcaagtatcaaaagtgcagtgtatttttgtttggttgtttgtttgtttgtttttttgagatggagtcttgctctgttgcccacgctggagtgcagtggctcaatctgggctcactgcaagctccacctcccgggttcacgccattctcctgcctcagcctcccgagtggctgggactacaggcgcccgccaccatgcccagctgattttttttgtatttttagtagagacggggtttcaccatgttacccaggctggtctcgatctcctgatctcgtgatctgcccacctcggcctcccaaagtgctgggattacaggcgtcagccactgcacccggccaaaactgcagttttaaaacaaatatcccagctgggcagaaatctgagaagtcattttgagattgtctacactagggaagttttatagtacttggttattttggagactccagcttatttttttttttttttttttttttttgagatggagtctcgctctgtcaccaggctggagtgcagtggcgcaatcttggctcactgtaacctccgcctcccaggttcaagcaattctcctgcctcaccctcccgagtagcttggactacaggcacgtgccaccatgtccagctaatttttgtattttttagtagagatggagtttcaccatgttggccaggatggtcttgatctcttgagctcgtgatccgcccgccttggcctcccaaagtgctaggattacaggcgttagccaccgtgcctggctgactccagttttatatgttactgaaaatcagtaaaagtcatacatttggaaaacgtgctctactttaaacagtggtgaatgtaatttttaaacaggaatattttgagtaggtaacaccttcacatggtttaaaaatataaaaaggtgtatagtaagtcttcatatcatgtctactatccatctagctcctagaacccgattcttccctctcccttattattaatttctcatatgtccttccagaatttcttggtgcatataaaagtaaatatgaatacacattttaacccttttttgtctacaaaaggcagcataggttgctacctaggttttttcacttactacatcttagagatctttacatatcaatacacatggagctttctcattcttctaccctttccacagcatgggtgttccttagtgtgattatccagttctgtatagatgggcagtcaggctgtttccagtctgtgctgtcactcccagtgccactgggagtgccatttcacacttgtgcctgtgtatctataggatatagtcataaaagttaaattctgagtcaaatgaaacgtgtttgtcctttttatagttattgccacattgccacctaagtgagatcaaacttggatttttgccaatgtgataggtcaaaaatgctatcccagcctagttctaatttgtattcttaggaatgattgagcagcaatcatttaaaagctcttgaatttctctttctgcaaactgtttatatcctttttcctattttctagttgatgttggtcattttcttcatgacttcatttaaacattagtgagattagccctatgttacagtttttttttgttttgttttgttttgttttgtttttactggttcatctctcttttgacaaaacacctaatggtggtggttttttttttcaacatagaaaatgttcagttttatttagatgcagcgatatatttatcacttttagcatttagggattttgagtcataggaagacatctcccttcgtgttttcttttagaacttctatgatttatattaaaatccttgatcttttctatatataaatgcagcttttctcattatttttaataatgacttttaagagctacttgttaaaagcaaagttgctatctttattgggttgaggtaaatttatacatttatttataaaagctgatctttattagttttggatttggtttgttcttgcttttctacttcttcaagatgcatcattaggttatttatttaaagtttttctttttttgatgtaggcgcttatagctgtaaacttccctcttagtactgcttttgtggtatcccataggttttggtatgttgtgtttccattatcatttgtctcaggaaaattttcagcttccttcttaatctcttaattgacccactggtccttcattaacgtgttgttttatctctctgtgtttgtataacttccaaaattcctcctgttattgatatctagttttattccacagagaagatacttgatatttcggtttttaaaaaatgttttaagacttgttttgtgacctatcacgtggtctgtacttgagagtgatccatgtgctgaggagaagaatgcgtattctgccgctgttggatgaaatgttctgtaaatatctgttaggtccatttggtctacagtgcagattaagtctgctgtttctttattgattgtctgtctggaagatctctccagtgctgaaagtggggtgttgaagtctccagctaatgtattggggtctgtctctccctttagctctaatattagcttcatctatctgggtgttccagtgttgggtgcatgtatgtttcaaattgttatatcctcttgctgaattgacccctttgtcattatgtagtgaccttctttgtctcttcttacagtttctgtcttaaaatctagtttgtctgaaataagtatagctactctgctctttttggtttccattgacaatggaatatctttttccatacttttattttcagtctgtgtgtatctttataggtgaaatgtgtttcttgtaggcaacaaatcattgggtcctttttttttttttttttttttacaatcagccactctatgtcttttgattggagaagttagtccatttacattcagtgttattgctaagcagggacttactcatgccattttactatttgttttctgattgttttgtggccctctcttccttttcttccttcctgtcttccttttagtaaaggtgattttctctggcagtgtgatttcttgctctttttatgtatttgttgtatttattatttgaggttaccatgaggctagcaggtactgccatataacccattattttatgccattaacaacttaaccctgctcgcataaacaagcaaaaagaaaactaataaaaactacacctttactttgctcccccactttttaactttttgtttttatttttattgtactgtttatgttttgaaaagttattatttttgattggttcatcttttagtctttctacttacaatgagagtagtttacatgcatcagctacagtgttatctttttccgtgtacttcatattaccagtgagttttataccttcagatgatttatactgctcattaatgtccttttctttctgcttgaattactccctttagcatttcttttgggacaggtctggagttgataaaatttctcagcttttgtttgggaaagtctttatttctttttcatgtttgaagggtattttcaccagatatattattctagggtaaaagtttttttccttcaacactttaaatatgtcatgccactctctcctggcctgtaaggtgtccactgaaaagtctgctgccagacatattggagctccattgtaagttatttatttcttttctcttgctgcttttagattctttgtctttgacctttgggtgtttgattattaaatgccttgagggagtcttcctttgggttaaagctgcttggtgttggttgtataaccttcttgtacttggatattgatacctttctctggtttaggaagttctctgttactacgtttttgaataaactttctacccccttttctctacctttctttaaggccaataactcttcgatttgcccttttgaagcttttttctagaccctgtaggcatgcttcacgattgttttttcttttttctttcctttcctctgactgtattttcaaatagcctgtcttcaagctcactaattctttcttctgcttgatagattctgctattaagagactctgatgtattctttagtatgtccgttacatttttcaactactgaattgctgcttgatttataaaattatttcaattctttgttaaagttatttgatagaattctgaattccttctctgtgttatcttgaatttctttgagtttcctcagaacagctattttgaattctctgtctagaaggtcatgtatctcctgtttctccaggattggtccctggtgccttatttagttcatttgatgaggtcatgtttcactggatggtcttgatgcttatggatgtttatcagtgtctagacattgaagagtcaggtatttattgtagtcattggagtctgggcttgtttggatccatcatttgtgggaaggctttccagatatttgaaaggacttaggtgttgtgatctgcattagggggtctcatgaccctgactggtgccctatgctactgtggctgagctcgtatccaagatggaaaacaaagtcctctccactcttccctctcctctcctctcacagaagaaaggggtctcttttggagccatgggctgtgctgcctgggcctgggggaggggtgatgccagtacacccttagccacaccagttggtgtctcagtaggtcacatgcccctacagtccactggctccaagcccagctcagcactaggagttgccatccttgtggcctagactgcccgtcaggctcacctagggccccagagcactttagcccatagtggcaaggcttgtcagagctcaagctcctgctgctaagatgggcgattcccctcacaccaggactagtccaaatgctccctctgtgtgtgggcatcagtttagttcagcctggttctgctttccactgttacaggacagcactgaattcaaagcaaagcttcaaaatcactgtgctctcctcccaagagcacagattctctgtgccacgcagccactgctgggagatggggaaggggtggtatcagcgattgtagactctttcctaccctcttcagtgcctctttcagcagtgggaagtcaaaaccaggcactgtgagtactcagctgacttttgtttcctgtgaaggtgttccctttgtgtagatagttgttaaacttggtgttcctgcaggggacaatcagtggagccctctgttcagccatcttgctcctggctgtttcctctcctgtttttttctttatgtgtaggtgattctgctgtcagccccctcttctccggccctctcttctccatccaaccccagttcacgctcatggttttaactacctgtgtgccaccgtttctcaagtttcttgtccagcccttctcctgagttcccggatgttttgcacattggccgtatttctctaaatgcccacaggcacctcactcaacaaaggcaaaactgagcttcatccttttccttctcatctagtgtcagtgaacttctttggtgttctctaggttaatagtcttgccattcacccactcccctccgatccagcaatctgggcaatcagtcttggtttgttctgtctggccagtcctatttttctggcccgtgactgccttgaaaatccgtttctcctctccacacccctgccacctccctgtggctgccatggtttggggacctcactctcaccagcgttcctgcggtagtttcctgtctggcctccttgtcccttatgccagctctctctggcctacccgcccatacaccttccagagtgatcttttgaaaccccagtctcatctcactcctacgtccacctcctggtagggctcccctttgcctgtatgcatggcatagagggcccctgtgccagtttggatcctggggtgagtagacactgaggcagttaggaatggaaggggtttattagtgttacctgtgaagggtaaagttggaagaagcaggattgggcagaggtggcctcagactgcactgcagtgcctacggttctgaacaacccactgcggagctctggaggaatgagggctgttaaaaggaggcctggcctgtattgggcagaaacgtcgaggccccagacccttgctgtgcttacttgttggctagagactgcccacagctgtggcctctgcccagctgctgcagtggatccagaaggcgctgcagtgggtgcagaaggtgctgcagctggaggctggcactgaccataggagatccatgcagcatgcctatgtgggtgccctgcagcccgtcagtcatagcctttgactcttccctagcgttcgttattttctcttagaaaatacattctatctgtgctctgttgcatgtttcttgaacatgctgggctgttttacaccaccaggcttttacattaacttttccatctgctttaaatgtccttcttcacacttgttttcctgaaaaaggtttttttacctgtcagcgccaagtgtcataactgtgatgcttttcctaataccccagctgtgtctccacatcatcttctctgtcagatgcttgccaggtcatcactctgcaccatctttggccttcccactagacagtgaaccctttgaaggaaagcctctcaattttaaagtaattttattcactgtgctttgcattttgaggttggtgttaaataaatttgttgtattgaacagaatgaaaagatgagttttcatctcccatcagaagttagggctatttttttcctctttaaaggataaaagaaggtgttcccttttctgtcacctaaggatgggcctagtggattagcttttagtacaaatgatggcccgtattcctgggactggtaacttggagaaaagtgcagttctcagacatcaccacaggtgctgcagtaatggaacaggttacttgcttgcctgggataaactcatgtggcctgggtatgggaagatgtgggaggcagcagtaaacccaggaaggtggcagacttgtatgtgacaaataggatatttcctcattaaattgagtctgttttcatgttgaatgagcaagttagagaagacatgtgaatataaatggaatgtgtacaagatattgatggcttgtactttttacagttcagacacttctggaaatgaagcaagtgaaatcgaatctgtaaaaattagtgcaaaaaaggtatgtaggagtattcactcttctactttaatttgtaatatagtttgattggatgcaagtacagaaaatgttctgtaaaatatttcatttcctctttagattggatgcaaatagagaaaacattccgtagcaccatttttcataaagttctatttttaggatatacttttatagtaaaaaccaaaatatttttgtaactgaagtgtttttcattaaagaggtctcacatctctatgtactttgtcaattttcatagcattcttgtactgtggttaggttgtgattttaaaaggcagagtgaattgctgggagtgattattgtaacctttgatttaggtttcctgtcctatccactaattaagttgccgtcttcctattatgttcaattttgaagtgtagaagtgagaaatgtggactatatatatggttttctactattacagtaagaattataagcatttctattttctacataagtactgctgttttttctttcacacagccaggaagaaagctcaggcccattagtgatgactctgaaagcattgaagaaagtgatacaaggagaaaagttaaatcagcagagaaaataagtacacaacgtcatgaggttattcgaaccacagcgtcttcagaactttcagagaaaccagctgagtctgtcacttctaaaaagacaggaccccttagtgcccagccctctgttgaaaaagagaacttggcaatagaaagtcaatcggtaagaacgtctgccatcccctaggagggcaaaaaaagtttattgaaaaattttggggaagaaaatgaagcattttctctttccttcagatcttttcaaagataaattttatattttccttaatgtaataaagatgtttgttttagaaaatctagatggtatggccgggcgaggtggctcatgcctgtaatcccagcactttgggagaccgaggcagggggatcacctgaggtcagaagttcaagaccagcctgggcaatatggcgaaaacccatttctactaataaagtacaaaaattagctggatggagtggtgcatgcctttaatcccagctactcaggaggctgaggcaggagaattgcttgagcccaggaggtagaggttgcagtgagctgagattgcgccattgcactccagcctgggtgacagagcaagactccgtcttaaaaaaaaaaaaacaaaaaaaaagctagaaggtatggaaaagaagataaaatcatctgtaattccataacccaaaataaccaccatgttttttggtctatgctgttcagtcctttcagtgagctttaattaccctaagtgagatcatatacttattattaagtattcaacaatgcataacattccattcatggatatgccatagttaatctcttactaatcaagaattgctatttaaaaaattataagtgctttgatgaattttgttgtagctaaatatttgtgcattccttagatcatttccttagaaaaaaactgctgataagaattctgggtcttaggcgggcacggtggctcatgcctgtaatcctaccactttgggaggccaaggcaggcagatcacgtgaggtcaggagttcgagaccagcctggccaacatggcaaaaccccatctctactgaaaatacaaaaattagctggatgtggtggcgcgtgcctgtaatcgcagctactcagaaggttgtagcaggagaatcaccttgaacccgggaggtggaggttggagtcagctgagaccgtgccactgtactgggcaacagagtgagactctgtctcaaaaaacaaagaattctgggtcttattggtgctaaaattcttgacatataatatcttttggtcaagttcttaatatgtgattaattcatttgggcttaattgaataaataatttatgctaatgtttgaaaactttttgaagtataataagttgtccctgccaccctgtcttcttcacctttccacctgctaaacatacacacaggtaaccgtatagtttcttatatatccttcaaatttccttttgtacatgtaaacaaatatgaatttttttaatttttatttcctgtctttacacaaattgaagcaaactatgatctctgttgttgatctgtcttggtgaacatcccatgtgcacttgtgttctgtaaatgtcagttgaggtcaagttgattcagagtgtagttcagagatttggtctccttacttactgttttgtttttggtgatggggcatggtctgcttgatctatcagttacatagaggaggtatttttttaacttctgctaaaagtccattgacttttgatgtaattttaaatatggtgaggtttacatctaccatactgtgttttccatttgctcctattttctctttctcttagaactcattttgcattagttgaatgttgtttttgtattccattttattttctctattggcttcttagctataccttttaaaatttttttcagtggttgctcctgggttaaaaatatacatccataaattagcaaagtctctttagaatcagtgtgttatcacttcatacattctacttaacaattaactaccttccactacatacatgtaattacataacaatattatgtataattctatttatccatccccatcctctgtgctgttttgtcatatgttttacttctgtgttacaagtctaaccttacggtattgtcatttctgcttgaaagagttgtttttttaagaaaagtatgagaagcagcagctctatagtcttttacctgtccctctctccagttcactgattgcctgcctgtagatactagtttccatttgttatctttttccatcagcctacagaatatcttctagcatttctttcatggcaggtctgctggtgacaaattctctcagattttgtttctctggaagtgtttttatttcaactctgtttttgaaggatatttcactggccgtggaattctgagttgacagatttatttcccagctctttataccattctgttgtcttctggttgccatggtttctgatgagccgtgagttgtctctttcccatgtacctttaccttgtcctgtgcccccattgctgcttgtcctttgttatcagttatgttgttatccccatgatagtgcttctggtaggctttatgtggtctcaacctggcacatgggcagtactcagacaaggactcttaggacaccccccacaggcacctgtgctctcctgagcagcttattccaggtgcctctcagctgggtaggattgtcatgccctgcttagacttcagctcactataccccatctagaaattgtatgtgtgtggagtgggggtggtagtcatggggttcaccttccaagtttcccctttctccaggaactcagtcttgtgttgcctactgtccagtgcctgaataaaattgccacccatattcccccattttatggttgtttatggcaagagagctagtttggaagctgttacttcaccatagctggaacagaaatttgagctgattccacatgttgttatcttaagtaataaaagttcagcttttccatcaaggcaacaattgttaaaagtcaactgaaagttttattttctcttattttgtgatagttttgtttgcaatgcttccttgtattactgtagataatttatgtaactaatctgttttagaactaaatgagaattgtagctaaagttttttttcttcttgagacggagtcttgctctgttgcccaggctggagtgcagtggcgcaatctcagctcactgcaacctccgattcccgccaggttcaagcaattctcctgcctcagcctccccagtagctgggactataggcacgcaccaccacaccctgccaatttttgtatttttagtagagatggggtttcaccatgttggccaggctggtctggaactcctgacctcaagtgatctgcccgcctcagcctcccaaagtgctgggattacaggcatgtgccactgtgcgcagctaaaatattgaatgacagtttggtgacagtcttaatcctaatgttttaagagaaagaaaacttttcttaaaaacttaatgctttttttttttgtagaaaactcagaaaaaagggaagatatctcatgacaaaaggaagaaatcaagaagtaaagccataggctcaggtagagaatgatgttttatactttgtcactcattcaggaatttcataagagaaataagaccctattcttaatttgttatagtagtaaattgtaagtacataaaattgccacttttaaaaattaggaatatgtgactttggagtaacatttttttctaacgttttgtcatgaaaattttcaacatgcaactaaggtgaaaaaaatttatagtatatattcatatacccactacctagattttacagttaacattttattatttactttattagataggtagtaaagcaagtattaatccattaatccagtttttaaggcattttaaaataatgtagacatgagtacttcctctggaatacataagtatgcacatgattaactggagttcagtgtgtgtttacagttttttctttgaatgtaaaatgtacatacagtacaatgtgtaactcaagtcactgtcaacatgtaaagtctttactccagaaagttcccccatgcctctttcatgtcagtccccaccccattatctccagaggcagtggcttcagggatgctttttctgcccatggattagttttgcctgttctgggattttgtataaatggaatcacatagtgtgtactcttttgtgtaaggcttctttcactcagcatagtttttttgcaatccatctatgttgtttggtgtcatttttattactgagcttattccattgtgtgattacactacagttgatccagtctcttattgatggacaactgagttgttttcaggttttggctatttgaataaagctgctgtgaactttttttttttttttttttgagactgagtcttgctctgttgccaggctggagtgcagtggcttgatctccgctcactgcaacttctgcctcccaggttcaagcgaatcgcctgcctcagcctcctgagtagctgagactataggcccacgccaccatgcccggctaattttttgtattttagtagagacggggttttaccatattggccaggatgatctcaatctcctgacctcatgatccgcctgccttggcctcccaaagtgctgggattacaggtgtgagccaccgcacccagccagtgaacatttttatacacatttttttgcgaacgtatgttttcatttctcttgggtaaatgaaaaggagtgaaattgctgagtcatagggtaggcatatgttaaattttacaagaaactgccaaactttgcaaactgcattcccaaagtggttgtataatatagttttatactcctaccagaagtttaaatgtttaagtgcacagtttaaatgttgctaagaatataatgaataacttcatgtgaataaatttaaaatagttaggggaggctagtggggagcaggggagagggggaggctggtcagcaggtacaaagttagataggaggtataagttcaggtgttctgttgcacagtagggtgattatggttaatattacacatttcaaaacagctaaaagaggatttttagtcttcttaccacaaacaaatgataaatgtatgaggtgatggatatgctgaataccctaatttgatttttttacacaatacatacatgtattgaaacatcacaccatacccataaatatgtacaattactatgtgtcaattaaaaataaaattttaaaagtgaatccacccacccccctaaaatagaggaaaaggagatattaaagaaggaattaattacggaagaagagtagactatcctgccaatggcttatgttaacatacagaaaattgggggccgggcatggtgggtgcacccgtaatcccagcactttgggaggctgaggtgagagattgcttgagcccaggagttcaagaccagcctgggcaacatagtgggaccccacctttacaaaaaattttcaaaactagccaggcatagtggcgtacacttgtagtcccagctgcttgggaggctgaggtgggaggatcacttgagcctaggacttcgaggctgtaatgagtggtgagcgtgctactgcactgcagcttgggcaacagagtgagaccctgtctcaaaaaaaaatttttctaagaaaaaaaattagggtatgctttgcaaattgataacaccttacagatgtatagtaatttatagtttttgtaaatgcattcacagatattttcttgcttgagtctcaataaaagggagagcattgttttattccatttatcattgaggaaacagcctctggaaggttaaatggcttgcctgagatcttagactagtaagaaagaagctcaaactagaaccaaggtcttcagattcctgtctggtatattactgtatattactacaattatttaaattaatacactgagtaatcttgctgtatcctacaagtggcctatcagatagattaaaattcagaaaatacagctaacaatgaagagcttatccccagtaatgttaaataacagcacaatactaaataaagatgcagtaaggtgattaaaaggcagcaatgcttttggttgctttagcagaaataggagaaccagcgagacagcagttagagtgaaagtgtatgtaggggtttgcgagactgtgcacagggataagaagtgagtacggcacctcctctctgattgttcagctgtagctatcttttacaatttggtgagactatttttgtgtcaggctttcagaaccctggacctacagccaaaatatgaataaccagcatgttaacttatcttaatattttagatacttctgacattgtgcacatttggtgtccagaaggaatgaaaaccagtgacatcaaggagttgaatattgttttgcctgaatttgagaaaacccacctagagcatcagtaagtcttttgatgatgtgctatatttacctaataaatttcccctgaagcaccatttttgctcatcctacagtttttgttatgtactattttcattgtcattgttttagatatttttacattttattataattttttctttaattctttgaagaattcatatgtttttatttgtcccaaatatgtagacttttaaatttatatttttgtattaaccttctatcttaaatatgttgtggtcaaagatcatggtccagtgatacctttttttttttttaaattttgaggctttcttcatgacctggtacatgatctgtgtggaatttctaatcattagatctagatagaatctctaattattggatctatgttcagtttttcttggtacttctattcatttgtgctgtatatatttagagactattaggaaaatcatgtttaaaattgctctgtcttgcaaattgaacattttagttggtcacccactctattcctaaacatactttgtcttaaaatttattttacctgatactaatatgcatcatagttttcttttgctagcatttggcagattttttttttttttgagatggagtctctctctgtctccaggctggagtagagtggagagatctcggctcactgaaacctccacctcccgggttcaagcaattctcctgcctcagcctcccaagtagctgggactacaggcatgtgccaccccgcccagctaatttttgcatttttagtagagacagggtttcaccatgttggccaggatggtctcgatctcctgatctcgtgatctgcccacctcagcctcccaaagtgctgggattatagacgtgagccactgcacccggccagattttacattctttttaatttcttttacttccaacctttttgcgaccttaaattttaatttccttattagtctttttaaatacagtgtatcagtctttgaatttcaactgtttagtccattaacatttattgtaatatcgatatatcttgaacaatatgttgatatattgttacttctttaacttttttattctactttttgatgttctgaattttttttaacttaaaaaagttgtatttataactccccacctttaattctaaattaaggtagatagaatttccccttctgttgtgtgtgtctgtctctgtttttaagacaacaacaaaattcacttaggtatttgatcacttttatctcatatattttcttgcaatatcctgtagataagtattttctcatatttaagcatttcatccaacacctcagtgtgactctttatgttgcaaaacttctaaaccttctgattattttgattatacccttgaatttgaatgacagcttagctggatataatactttaggttctaaattattttcttaaatactttggaaactttgtattcttttacatcaagtgttgcttttggaaaatttgatgtctatctaattcttatttctttgaatgtgatctgttctttagctctctaaactgttattttttttctttgatattcttaaatttcactatattgagtctgaccttttcattccaaggttttttaattttttatttttttattctattgctgctgaacaaatttttttaattctaagaatttaaaatatttttatcctgattttcttttttgttctcttatcctttgcttcattcactgggagatttcctcaatctaagaaattagatttgctaatttattcttagaaatatccattctgccatttgtcccatctgttgagttctttatttaacttagcttttatattaatatttctgcttttttttttttttttttttttgagatggagtctcactctatcacccaggctagagtgccgtagcgcgatctcagtccctgcaacttccacctcccaggttcaagcgattcacctgcctcagcctcccaaatagctgggattacaagcatgcgccaccacgcccagctaattttttgtatttttagtagagatggggtttcactatgtcggccagtctgctctcaaactcctgatctcaagtgatccacccactttggcctcccaaagtgctgggatttcaggtgtgagccaccgcgcccagctatttctgctgcttgctttgtgtcttgtattcatgttttatgctgctaatatcttccttagaatatctgttgggctaatttcaaattactggatcagctattctaaaatacctgcttctggtaaggtttcggatataatatgtgttttccgtttgaaatagttgggttcctccagcatcctgttattccagcctctgagcttattttcccctgggcctgtcagcttctgtcagacagtatgtatagaagaaggccaaaccccagtccctgttagtgcccgtcagtgcagggggtggggtaagccctaggatgggcagcctcagcgactcatctcacaaaacagcctgtcaggtcagcacttcactcctcgccctccagagaggagcagcaggaagaaaagatggactctgggtcatcattctccagcatgggggtttggctggggaagggtgaggaaacagctgcccaaagtcagtcagcctcccatgtttttctctaggccccacaagtccaaccccagtttcagtcttgaggacacagggacagaggtctcagttgctgcagggggcaggggagcgggggtgagcaggcacactattgatgagatcggtgatgggaagaggcaggagtcagtttcctgcagctctctattcctgccctggccacagcgccactccttacagcagttattctctctacatgaccttcccctcagggttttcacagctttctccattttcttggtattccctctgtagttctgggtgagcttggggaaaggagccagcctgtcatgccaactcatcattatcattgtgagaagtgcctgttttactcttctttatattccagagccagtttcctgttaaaactaggacagttctgttaacacacccaagaccatcttgcttgtgttatcctttacctattcacaaatctcttataggaagcttattatagacttctgatgttttagggaaaatggcattgtccccttctaaatcatttcttatatcaagaacttaccacccagtgggtagtaaggacacagggacagaggtctgagttgctgcagtgggtagtaagttcttgatataagaaatgatttagaagaggcatagtattttttcttagacttattgcagtacaaccttgtgtttttgtcataccaaataagaattctggtgaatcactgatctcattttgtttccttgacaatatggtgttctcagccacgtgaaacacttcactctttcaaaattaagtcaacaactgtttaagggtctgtttgtaatatcctgtacctagcactcacacctgaatagcttcactgtcatatcagtatgaactgatgataagcagtttatgtataagtagggaagtatgccatgaaatgcaacattacaaactcttagaatattctatagctgattcaattaattgaattttgccagatgttttaagttgctagaatttggaagagctgtcttgtgtagaccatcacctttgtgattgaaagaatccattgatttatcattacaagccatatgcagagaggcctgaccagtttttcttatttaaaaaacaaaacaaaactttctttagatggggggtgtcactgtgttgcccaggctggtctccaactcctgggtttaggggaccctcccatctcagcctccagagtagttgagattacaggcatgtgccaccatgactggctatattttaaaaatattttaacatctgaaaataatgatttgatattatattacattagaaattcttttttttaaagtggggcttatgtaaatttttaattgtgctaaaatacacataacataaaatttgccattatgcgtttttaagaacacaggtcaatagtgttaagtatattcacgttgttgtgctatcagtctccagaacttctttatcttgcccaactgacattctgtacccgttaaatcacaattttctattctccaccccatctccagtgcttggcaaccacccttctactttctgtttctatgaagttgactacttcgaatacttcacggaaatgaaaccatccagtatttgtctttttgtgactggcttatttcacttagcatgtcctcaaggctcatctgtgtgatagcttgcatcagaatttccttctttgttaaggctgtgtattgtgtatatacagataaccattcctccattcattgtttatccattcattcatcagttgacacttgggttgcttccacctgttggctgttgtgaataatgttgctatgaacatggatgtatagaaatacctcattattcatgaatttttttgttcaatgtgtaataacaagttacaacttttttttttaattaaatgtcttcttttgagataattgtagaatcacgtgcagttgtaaggaataatatagggattttatcatatgcataggtttgtgtattgcatcacctccaggatccttgtgttctcgtgcccccgctgtcttcatgttgcccttttataactacacccacagccccaagccctggaaaccactaacccgttctccatttctatcatttcatcatttcaggaatgttatataaatgaaactgtatcgtgtgcaaccttttgggattagcttttttccactcagcataatgccttggagattcatccaagctgttgtatgattccattccacttcattgctaggtaacattctatggtatggatataccatggtttgtttgacattcacccattgaaggaatttgggttgtttccagtttggggctgttaacacacacagtgctgtaaacatttggatacatttttttttgtttgaacctgagcttccatttctctgggataaatgcccaagagtgcagttgttgggttatatggtaattgcatgtttagttttgtaagggactgagactgttttccacggtgtatgatcttatttatgatccagattctctacatccttgccagcatttggtgttctcactaatttttattttagccattgtgataggtgtgaagtgtagaaatattttctttttattgtgtgttaactgtgtgcaacttgttaagcagcccatctctagaactaaagccttaggaaacggtagctttgtacccattcgagcaatgactcctcattcctccctcccccagcaatcaccattctactttgtctctataaatctaactgttctgggtacctcatatgagtggaatcatacaatatttgtccttttgtgactgtcttatttcactcagcataatgtcctcaaggctcacccatgtcatagcatgtgtcagaatttacttattaaggtggaatcatattcagtcatgtatacacattcatgtcacttaacaacggggatgtgttctgagaactgcatccttaggcagttttgtcattgtgttaacagtgtacttaaaccaacttagatggcatgtactaggcttaggtgtaagcctagtacatgccgcggctatatgatgtgttgcctattcctcccaggatacacacttggacagcatgttactgtattgagtactgtagataattgtagcatgatggtaagttgtgtatctaaacatagaaaaggtacagtaaaaatacagtataaaagataaaaaatgagcctgggcaacataatgagacctgttttctacaaaaaagttaaaaattaggcgtggtggcatatgcctgtagtcccagctacacgggaggctgaggcaggaggatcactggagtcaaggagtttgaggctgcagtgagccatgatcacactactcagtccagcgggggtgacagagtgagaccttatctcaaaaaaaaaaaagatgaagtatgttacacctgtttggggcacttagtaatttattacctagtattatgtagtatacctaagtatgtgtgctatacttttacacagctaggcaacactataggtttgtttacaccagcatcaccacaagtatgtgcataatgcattgtgctatgacattatgatggcaacagtgtcactaggtgattagaaatttttagctccattattgtcttatgggtctaccactgtatgtgccatccatcgttgactgagacattgttatgtggtcatgattttaacacatttcctttatccattcatctatcaatggacacttgagttgttcccaccttttggctattgtgaataatgctgctacaaacattggtgtacaattgatattcaagtccgtgctttcaattcttttgtgtatgtacctagaagaggaattgctggatcatgtggtaattctgtgtttaattaatttaatttatttatttttttggaactgccaatactgttttccacagtgactatatcattttacatttccaccagcaacacaagggttcctatttctgtactttctcaccaacacttgttgttttgtttttttttaataatagccatcttaatgggtgagtgagccaagccaggagaatcagagcctggccaccagatctcttctccccagtgacagagacctgaggcagtttctttgagtcagctttatagtttctgaagaactaacacctgatttatggctactttttggctagtccagatgtgttacacagttgctcctccttttgctaacaggcaaagagggagggaataaagtctgctgggtctatcagttagcagaaaaagattgggagtatccataagcatttctaccttacttggtatcacctgtgaggttggtcagtatcagggaattaagatgaccccgtaccagagggcttagggaataatatgtttgttctttttcttttgctgatacatgtttccggtgtttttttcaggctgaacattgccatcttagttatttaaaatggtgctctcatatgttcattgcagcattatccatgatagtaaagacggaatcaacctaagtgcccatcaactgtgggttggataaagaaaatatggtacatatagaccatggaatactacacagctataaaaaagaacaaaatcatgtcctttgcagcaatatggatgcagctggaggtcattatcccaagtgaattattgcaggaacagaaagccaaataccgcgtgttcttacttataagtgggagctaaacactgggtgcacatggacataaagatggcaacaatagacactggggactcctagagggaagagagacagagggattcaaggactgaaaacaacctgtttgctactatgctcgctacctgagtggtggggtcagttgtaccccaaacgtcagtgtcatgcagtatgcccatataacaaaccccttaatctaaaacattgagattattaaaaataagagattaaagatatttttaaaataaaaaaaggtatatgccaaattgtatgtgtatgtttgtttgtatgctaagcaaatgaaacacctttcaaaatccatcatggtacttagacttttttttaattcctctacagacaaagaatagaatctaaagtttgtaaggcagccatcgccacattttatgttaatgttaaagaacaattcatcaaaatggtaagctcacggacatgcatttgttggtctaaggtttttttcactaatcctgtagcagcatattgttgtcttagaaaagcttgcatttgctggcagtatggtaataaactcattagaactattcatattccacataactgtttttaaactaaatgtgacacatgtgaaactaattaacatttacttttggaaactgatgtacatgtgtattttttgttttgtgtagcttaaagaaagccagatgttgacaaatctgaaaaggaagaatgctaaggtaaattatttatgtgattagagtcatagagtcaaacacaatactaatgtagagttatgcgaagacttgactctgggtttacagcctttagagtgtgagtagatttcataatcttgtcaggcttttatttggttgatcttgtggttgatacggttggtattattaatgcaaggtaaggaatggggatcctagtcacttttgtttcctaaggctgcacgagtgtcaaaataattgtttttataattaaagacagaaatttaagccttttattaatgtcacaaaggtagctttaaaaaaactacccagtccaaaatgaccacttacatggataaatattaatatatatttattgcttttgtggatgtcgaaaagcacaaccttttagaataaagaactgtcccaggtaggacagcctgggaagaatactgggttaagggtcaggagacctcatgtctagtcctggttctgctgcttcattgctataccacctataagctgtataccactgggtctgcagtgggtgacaagccagccagcatgagagtctcctttgcttacctggaaatggttggaccaaatgacctctgagcatcagaggtgaatccaggagtggaagtccacctctacatttaaagtagaagtggacttgaaatacatacgttttccttccagtgattgcaagctctgggatgtttttg

SEQ ID NO: 353 - DNA, 32744 bp, Homo sapiens
  source 1..32744: mol_type = other DNA
gattcaaactgctgctcctccggctggcggggatcagcgctggcgcggctgcggccgctgctgcctacgcgccatggagcatcgcatcgtggggcccgggccgtaccgagctaccaggctggtgagtgagtgtgctggggcctgggcggagcacccggtgccgcgagcccccactcagcgcgcggacagagtgcttgtcagtcttcgcttccgcaggccagcggggctcgggtgtggagcatttcagctgggactactggggctgccttttagtggacgagcctcaaagaaaggctaacggggcccagagctcagccggccgggggttagtgcagctttgtccatgagatgttgactgggttctcggcagtagatggcgcctctctgtttaaagaccccaagaccaggctgttccctgccttttgtcctctggaatctaaccgacccggtcggtaacctgaggggccaccacgtaccccgtaacgctcagcgttcgcggcagtccaggcagggcgtgtctccttcctgagtgacacctgatgatacctgacggggtattcgaataaacggtgcccagaacagaggggcatcgcgctggccgcatttccggcccctggcgtttctgtttctgtcagcaccgatccagatgaagagctggccaggacagatgttttaggagagtctttgccgactctgagttcctgtttttttttttttttttttctgggagaaaagctttggtattgaggtgtacttggtctgctttgacttggaacaataaagggtgacagtttggtaatgtctgtggcaagtttttagaggactttctgtggaagtgtaatggtaatttgggaggacagtaacttgctccttggtctgccgacctctctggccacatttaacatgggaattactctcatagttccatgcattataatgaatacacaggaaaagatgggaactaacatccaaactcttactcagctagactcatggaagaggtgaggatgctgggatacagataatgtaaatagagtttccttttctttccaaagccagccacacactataccagtaagtcaagccagagctgagaaggccagcttctggaagagaaatcatagttggggctgatgggtctttactttttaaatttggctcatagatcgctttgagaatctgatgaagattaaggatcttcttcacagaaaactgcacatggcacatactcatgaaattttacatgatttaaggggatggatcgcttgaggtcaggagttcgagaccagcctggccaacacagcaaaaccccgtctgtactaaaaatacaaaaattagctgggcatggtggcatgcgcctatagtctcagctactcaggaggctgaggcaggagaatctcttgaacctgggaggcagaggttgcagtgagctgagatcgcgccattgcactccagcctgggcaacgagcgaaactccatctcaaaaaaaaaaaaaaataataaggagattgggagagtctgtgacattgttttatttggcataaagacaagcattttatttgctcatcctttggatcagtaatctgggctagactcatgtcaatggttcttttgtggaggtcactcatgtgccacaaataatgtgacttggctattactggatgatggaagatggctgcttgacttggtcctggctgttacctgggccagatatctctaacaggttatcggaggcatcttcacgtagtggtctcatggttccaacgtagctaaaaggaagtttcagcttgtgactttttcttcaaatctcattggtcaaagcaagttaaacagctaaatccagattctagaaattcaactccacttcttgatgggcagggtggcaaagccacagaggtgcatgtggagaggatgggaagaatcattgcactcatctttgcgaacactctatacagtatagacaccagaatgatctggggtcaagaatattgataagtctaactttagggaggaaaataaggcatttgatcattcccttcaccaatttatttacagcacttacacaaggaaaacatagcaaggctgtggttcttgacgtgactagtcttcattcttcctgcattagactaaaaaaaaaatacctcataattggaattgtattttagtctcatattcacagaattgtatgaggtacttcttttcatggatgcagagggtccatatatagatagtgctggattcttgagtcacattaaaatattatcaaaggaatttgtttaattaaaaaaaggtgctctctgctctctagaagtcttcagtccctaacaaataatattcaggctaaatttaggttgattaagttaagaagataaatgacatggataattaatgaaacaaacacctcagtttcaccagaatttcccaggtaatcaattcagttctcaacttcatagtgtttgaggaacataatattaaactaagatgtggaaaacagaaaacaatagccaattttttttttcaaaagtgagtattcctgctgtcagtgattgcagccaacattgaagatgcttctttccattgtaaagtctgtaattgtttccccagtgtaattcagctgtgacttaaagcttttgctaggtaaatcatatatttaatagtttgagactagtcctctttttacttgttggacctagttggcctttcctccctctatctgcagcatacaatttctcccttttcccatcatgctcattctaaactttcttcaggggaagcttggtaaaaatctattgggatacaaaaactaggcctttattttctcctttcatggctcactttactttctcaaagcatgtacagctttagaaaaagctctttggtgctttttctaaagcaccaaagtcttatttgaaaataacattttgtggattaggtaaaatgttatgacaaaagtcaaatgacagccccaactcatgataaatgtgaagctagttatccatttatacattttcactgaaataactttcatctttgtaaacttggtataaatagttcattcaagtagagagaaaaattttttttctagaaactgcttaaatctttgaacttattctgagttatatatatggtctgatgcaactgataaattttaaaagacatacagctttcattgaatctgagagttagaatggcaagatcacacaacgaggttgtggcaagtgcaagtagatctaggagtggttgtcactgaactcccagaccagtcagttttctttatagcaccgctatcataatatttttggtactaagaagaaatgaaatggaatatcctggagaaaagaacaggatgcacagcagtaggtgtatgtcttatagtttgcctcatcatgttaagaaaaaacaattgtgtgattttattttttcctgagaaactaggggactgaaattaataagtagagcaaaacaaaaagtgttttaaaatcataaaacaaatctgttttgttccatttgttgtaaagattctcttcaaatataatgtcatgaaaaaaaaactcaagctctttcttgttatttattgacagaggatattttgtttccaaaagtgactgagaatggtatattgttagattatttaaagatacttatttttctttctgagcagagtagccaaataaccccttagttatatttggaaataagtgggaacagagaccaaagtgacctcagtaggctttaaaaaatctaaagtatttcatatattaaggaaatataacccataatgataaatgccattcaaaatcaaaatgagtaaattcaaaagtctatttataaatgctctttttaaaaggggcaatgagactttgataaagatgttttattagacattttctagtatgaaataaaagtcagtagcaatagagcagttaatccattctgaatcctaatggatttttttttcctgtgtgggagaatgcaatgaattgaaagctcatgctgaagagtaaaattctgagaactgaaaaaagttttccctcacaaaaagaaatgaacttcacaaaaagaaattttcacgctgggtgcggtggctcatgcctgtgatctcagcactttgggaggccgaggcgggtggatcacgaggtcaggagatcaagaccatcctggccaacatggtgaaaccccgtctcaactaaaaatacaaaaattagctgggtgtggtggcacatgcctgtaatcccagctacttgggaggctgaggcaggagaatcacttgaaccagggcgtcggaggttgcagtcagccgagatcacgccactgcactccagcctgggcaccagagcgagactctgtctcaaaaaaaataaaaaaagaaagaagttttcacattcccttacaaagaagacaggggccttgtcctaccagggatttatacttggtattaattgactgtaatgacaactgtatggtattacacaggaacagatagtcgctcagtgggatagaaacaatcaagaagtgtgatatgtaaggttacttaataatatttctgttcatttagaaaagcatggcataattgactcttgatatggtttggacgtttatcccctccaaatctcatgttgaaatgtaatccacagtgttggaggtggggcctagtggaggtgtttgggtcactggggcagatcactcatgaatggcctgttgctgtcctcatgacaatgagtgagtattcactctgagttcatgtgcgatctgattgtttaaaagtgtggcaccctgtccctcactctctcttgttccccccttgctgtgttatgtgcctccttctgcctgcttccgcttcaccttctgccttgaataaaagcttcctgaggcctcaccagaaactgagcagatgctggcaccatgtttcttgtacactctgcagaaccgtaagctgattaaacctctttcctttataaattacccagtgtcaggtatttctttacagcaacgcaagaatggactaacacaactctccatccagaaaaaaatagagatcccctgcctcccaccatataaaattcagttaaaggtttacatattaaaaaacataccctctaaaatattaaaaggaaattttgataaatattttaatacctcaggatagggaagctttcttaagagaataaaccctgaactgataaagaaaatagataattatttccttataaaaacatcaacatctacaacaaaatcattgtatagctagagactatgtaaagaaattgataggctaagataaaacatttgtaacatataacaaaaaggtttaatattctatattcatcagtacatattaaatgggtatactatatgtcaggcactggtctttgttgtgaggatattgagctgaacaaaatcgattaactttcctgacttctgtgccctttaaacattaacagattaaacagttcttaaaattgattttaaaaaagagataacccaatagaaaaatggcaaatctcagaagaagaaatgaatatgactaaaggtaaagatatgaaaatgcaaacaaaatatggatctatcatttcttttacatagattggcagaaatgaaagaaatgataacatctagtgtaggccaaagtgtaaggctttaggctcccacattgttggtggaagtgtgaattgctacaactgatttaaatatgctgatactttttagaagtctatcaaaagtaaacaaaagccttggtactttaggttatataaacaagtataacttgtaacatatttgtaaaaattgaactgggcagaacttggatgaccatttgttagaaaatggcagaataaattatggcacattcttaagaatgggctagatctgcaggtatgacgcagggaggtatctgttaggtgcaaaagcgtgttttaggataacatatacaacatgattgatctcattttttaaaatggcaaacaacaataaatgacacacctacaaaggaaaaattctgtctatgtgtctgtatgtgataggtatggagtaagacatgcaaactcttttgtgtatacttctgtatttaatttgtttgtttcaatgagtgttattacttctgtaattaaaagaacaacagaactgctaaccagactgggtcaattagtggatatacctagtgatatttggaaatattgggtcccagagagccatgccttcattatgtttatgtaatgcataaggtattatgcattaggtaattttagttcatgattatgattgttcaaccaacataaacaaaaatcttttttattaccccttcccccggccctacatacttgattatgccttttcggtacaacaatctaatgataaatgaaagctaggtatcagggcatgtattaaaaaaatcaataatcaatgattaaaaatatgtgaaaattgtttaaaggtatggtaatatccataggtacttggtatagtgaaatgactacttgaagaaaagtccgtagcacaggattccagatcttattcacagactaagtacctgaatgacatttgctaagttgtgtatcctgctaaggtcttgattttgtcccaaagattttttccagctctagaatagattgaaccttataatttaagagatatcctggacattttatatattatccttaaatttgaggaacgcatttttaacaaaggacttttatagtcatgatctcatttgatcttacaataaccttgtaaagtgggtggataggtagagaagttaaatcagcgttcttggactctttatgggcttcctttctactattcattatttagcctttgctctgcttttcctgtttacatactttccctccttcatccactcacttggtttcttctccaacctccctactctcttccacatccagtttaccaccccaaccaaccagttcatatttgccaactttcatgtgggtaataattttagtatgtgaacatgtgcatatgtgtatgtatgtgtttttgtttttaggtgttaattaggcataatgtacagaaaaatgctcaaaaaatttgttgagttgtataaaaagtgtacaactcaacaaattttcataaagtgagcatcccatgtaaccaacattcagatcaaggaatatcatattactagcaccgcagaagtctcctttcccccacttggtccctacctccttatgaaggtaactgctatcattattttaaatatcatggatcgtttggcctgcttttgagcttcaagtaaatggaatcatatagtatttacttttcatatgtggcctgttcatctcaatattattttctgagattcatttatgttatggcatgtagcaatagttcgttcattttcactgcattctattggtgaatatattataacttattatgttgatggacatttgggttgtttctgcctattatggatagtgccattatgaacaatgtgtcttttggggagcatatatatggatttctgttgggtatatgcttaggagtagaattgctgagttataaggtgttcagatatttagcttttgtagatattgccaatctgttttccaaactggtcgcaccaatttacattccttacagcagtgtatgagatttctagttctttcacattcttaccagcacttagtgttgcctaccttttttcttattttttaggtctctaaaaaaaattttagttttgtaagttgtaaactgacaaattatagttgtatatattcatagggtacaaaatgatgttatgatttacgaattcaatggaataattaaatcaagctaattaccatatccatcacctcaaatacttaacatttttttgttgtacacttgcaatttactctcagattttgaaagtacattattattaatatcttcaccatgatgtcaagatatctcaaataaaaaagataatttcctgtctagttgaggctttgtaccttttgaccattatctccccgttccccactcccctcagcctctggttaccaccattctgctttttgcctctttgaactcaattgttttagattccacgtataaatgagaataggcattatttgtttttctgttcctggcttatttcacttggtataatgttctccacttccatccatgtcgttgcaaatgacaacatttctttctttttttaaaggctgaatagtattatattgtatatgtataccacattttctttattcatttatctgttgatggacttttaggttgattccataacttagctcttgtaaatagtaaatgacatgggagtgcagacatctctttgacatcttgacttgaaatgttttgggcaaatacccaaaagtgggatcagtagatccacctgtctttcattttagttattctgacagccatgttgtgatattgacttgtcgagttcttttacattgcactgataattaatgaggtttaacatctttgtatatgttataggacatttgaagatctttttttttatgatatacctgtttaaatttttttttcattttgtaattggaatgtctttttcttattgattttttttgttttgtttggaaatgatagatatatcttatcctactcagtggcttgccttgtttctgtgtgtttttaagttaaaaaagattttaaatttggactaacttaatttggagcatgactcacaacagtgtcaaaagaagtagaaagattaacgtaagaataaaaagctatttcagtttggccaggaggaagacatgactagcaattagtgggattaaatttcttgaggttgagaagttggttaaaaaaagtagaaaaagtgctgggtgtggtggctcatgcctgtaatcccagcactttgggaggctgaggtgggtgcattacctgaggtcaggagttcaagactagcctgactaacatggtgaaacctcatctctactaaaaatataaaaataagctgggtgtggtggcgcatgcctgtaaccccagctacttgggagactgaggcaggagaatcgcttgaacccgggaggcggaggttgcattaagctgagatcatgccattgcactccagcctggactatacggtgagactccgtctcaaaaaaaaaaaaaaaagtagaaaaagtgaaagatcgattaagcacttgcttattgactacctagtgtgggtcacacactgtgctacacatccggggtacatgcatacacaaaccccacttctgtccctcaagctcctgctgttgtatgctcaggaattatgaatgtggctgagaaggttagccatcaaaaataaaagagaaataggataatagtttctcaggtggttgggcagcagagagtatgaagagaaatctggaagaaaagtcatgattagaagggaaaacatgacccaaggttgggcaaaaacaaacaaacaagcaaaacaaacaaaaaacaactctgagatcagaaatacagtttaaagaaaaagatgacgtcagaaaaatctgatttaaataggaagagaggtgagagacaaaagattcggagtttataaagtgacagacttgaaagagaagagtaagagaaaatgagaatatgactatgaattttaaggactttaggaggactggcagggagcctacgttcctaaaaagatgttgaaataattatgtagaaagaaattagaaatatgttacacaataaaagttgccttatattccttcttcaaaagagatgactttcctttatttttaagtttgttgtatattcatttagcttttcatatgcatataccaaagcagataggatcagattatatatagtgttttgtacgtttttcttccactttgttatatttatggtatctatttctgtctggaactattgatagtattttgttttgtggctattccacgcttcagtcaattttattcaaattagttctagtttttctctgattataaaatggcaaattagttctaatttttctctgattataaagcataaatatacttatgtttataagtatataaaatgcttataaatgctttctctgaaaaaacacttcaggtttattaaatataattcaacatgtttaaataaaatttaacttgtaaatacttttatctttctttgagacagggtcttactctgtcgctcaggctggaaggcagtggtgcaatcatggcttactgcagtcttgacctcccaggctcaagtgatcctcccacttcagcctccccgctcagtctgccaagtagctgcagctacaggcacacaccactacacctggccaatttttaaattttttgtagaaatggggtttccccatgatgcccaggctggtctcgaactccttggttcaagtgacctgcccacctcatcctctcaaagtgctgggattaggggtgtaagccactgcacctggcctgtaaatgctttttaatccgttatatttctgcttctacatggtgaatccctaaaagtaaagtggctgaaaaaaaaaaagagatcacatcttatataagcatttattaaacaagtacttatgagattcttttctagagctagctttaaaacaatatggagatgagactattatttccctttaacatttttgtattttcagcagactgtaggtagaacatagatttgttaaaattcaagatacagatttgaatatacaaattggttctaccacttattagctgggtagatttgagtaaatttcttaattccttctgaaagatggttattatgaggattacatatatacaaagacacaatggggacacaagtttgggacatattatatatagtctaatgagaacaaaaaagtcatttatttgcttcctgatttcctcctcactgatataacttcacagatataaggagaaagaagctgaattgtcatgaagttatttgaaagtaacatttaagagagacatctggtttttgtcttcaaggatgctatgagacatggcagttcacctgccgcctagtggcatcttgtagtggaaggaaactggattttttttagttctcaaccatgtgccagggcctgtgcaaccagtatatggcagaactgggatttgaactcaagtctgactccatacctcttgttttccccattcctcagggattgattctgttatcctgaagtggtccagtgtttcttatacttgaagattaggatcattgtgtggtgagcatggccagcagtgtattacagtgagttagtatgtacttgatttgacaaaacgaggttcctaaataaagtggaagcaatgggatatatattccctggacttaactgacgtggatccaatcagtgtgtggtgtgctgtttcttagcagacctctcattttaatttccatgatttttgactcccaaaatctgagattttttgagcttctagggccatatttttatttaggacaaattcctagagaaaagtgttaactgcaccaaagccacatagttattggcagaggctggactaatggccaatggagactccattctggggtctttccaacgtactcactcagctctgacagccacatccaccctgataatattaataaatacagcagcaatgatgctataatggctaatgtttattaagcacttctttcgtgacagacactgtgataggctgcatcaacattatctcatctggtctttgtaacaaccctgtcatgtgggtactgcattacaccgggagtaatggaggcttgtctagcaatgagtcagtttgccctgctggtctgttgtagaataggcctctcaacccagcagtgtttgacttcagagcctgagctctctctacccagtctacttttcagtgtggtatctgaagatgtcatgcacacttaaacttctaggtcctttcaaaggaaccatgaggtagttttaaactaatatatattatttgaggtatctagtagctattctttcaaaaagctttgttttgcatgtaagcaaaaactggctcatcacttttcaaaggtttatctttgtggccttgagctgtttgacatcaggcactgtattatctttttcatctcttttcctcctcctcctacaatgcctttcacataataagcaacctagaaatatttgctgaatgaaggtaaagtcattaaacaggggactccaaaaagcaaagtttgcacagtgggcttagttttaatcattatttactgtatgttctttgtttatgtaaaaatccattaataggacaacttgatggcaatctcctcaataaataatatttcttgaatgaataaatgatgaaccacccttgaaaagctgcattttctttacagttttttttcctatcaatagtttctatttttgaggccgggtgcagtggctcactcctgtaattccagcactttgggaggctgaggcggctggatcacttgagatcaagagttcgagaccaccctgaccaacatggtgaaactccatctctactaaaaatacaaaaattagctgggcatggtggtgggcgcctgtaatctcagatactcgggaggctgaggcaggagaattgcttgaacctgggaggcggaggttgcagtgagcagagacacgccactgcactccagcctgggcgacaaagctagactctatctcaaaaaaaaaaaagtttttatttttgttttaattatggtaaaatatatataatataaaactattttaactgttttttatatatatagttctatggcactaagaacattcacagtgttgtacagccattgccaccatccattctgccaaacttttctttattagagtttgaagcctgtaaataaaacattttcaaggctctacctgttattaaagcagtttaagtggaaaaattgcattctttgctttaattatttgagatgtagtaatcttaaaaaaatcagttgattactaaatgccattctctttctttcccctagtggaatgagaccgtggagctttttcgtgctaagatgccgttacggaaacatcgctgtcgtttcaagagctatgagcattgtttcacagcggccgaagctgtggattggctgcatgagctgctgaggtgcagtcaaaacttcggccctgaagtgacccgcaaacaaacggtccagctgctaaaaaaattcctgaagaatcacgttattgaagacatcaagggaaaatggggtgaggaagattttgaagacaatcgtcacttatacaggtaatggcaacatgtaaacctggaaggtgaggaattggggagatgagtgaatctggtccaagtctgttgaagcttcctgatgtgtaagaatttaccttgttcactgaacagtgggtctagttgtgatttgttgagtggagaactgaatgtgttgctgcaataaaaccagctgggatttttcttggcttcttagagcataccagagctgtgttttgttgcagtgatgtttcagtaaggtaatcttttcatgccttttgctcacctgggaaatggtggccataacttagtacttctcctggagaatctgaaatggtgaaacagtagctctgggttcagcttttctgagcaatggggattggtatattcaggaggttagtagcagagtgtgtgtgatctttaaacagctcagggcccatgtgaagaattatgctagaattccctgatgtctcagattaagcccgacaatgtgagtccacttttctgcaaacatttttgctcatgtttcagtgctattttatcatgtggacacttaccgccagataatccaagggaaaataaaggctgcttgtcttgcacttcacttcttactgcatacttggcagttttattgctggaggtggaggagagcaacctcagatcaggtgtgggagaagactaaagaggaatgaagtcacacaggtccataaaggaattgttgagttatctacacggattaaaagaaggaatggagaatatggacccttattacgtgctttcctttactccagctgaaaaataagtgtgattgcagcatattcagtgagggcattccactgggacacatggctttgcacagagacaacctggctctttcatacctgaaccatttctttgtctccctcttggactagctgctgagaaaggcagagcagggtgagactgtctgtcgtgagtgcatagggtgaagaacagacattgctgtgcattaggatctaacttcctcatggagtttcatcagcagtctcttgagtccagatatcagtattgtcatctgggcaattagtcatctgtccacttggtggttagttttggcgttgctgatcccacttttaattaggatattggataatcttgacctattctgagaccttagtacttaatagcatcaggcagtggaaattttagccctgattctacatgccatactttattgggaattcttaaatgattatttctcttgggaaactttaattgcttgtaccctatcaagatttagctagaacacttctgaaagattctctggatgagtaacttccattctattctattgtgaccttaaattgggtacctcccatcgagtcccaggaggctttatgagtcccagcagagtaaaataggagccgactacccagcactaactgccagaacatgtttcacttcaatattaagacttaaccatgtatccccctttaaaaaatagagtacacaagacatattaaattcatccattaaataattattttttcctccagtttctctaatagaattcttgtgagtcataaatggagcagtatttttttttttttcaccatttactacctgaaagttcattatggctttccattttcctgagtggaagttgtgtaagttaaccaccaacttttgccaattacctagattaagctgggatgaaatccgtttagacatgtaaatcatttgttaaggtgcccgtgccttgaattgagagtgagctaatgagtgtacagccggccgttgcatacatgcaggcttctattacagtgctccacgaaagagcatttggtgtcctacctgctgtgtcttaactgctttccttgggcaaagagtactactgccaagttatgaaaacagaggaggagagtatgagcgagaggcaggttagatttgacaatagccattctaactgaagtgagatggtatctccttgtgattttcatttgcattaccctcatgattagtgatgttgagcatttttttgacatacttatcagccagttgtatgtcttcttttgagaaatatctattcagatcctttgcccattttttaattggattatttgagttttgttgttgagctccttgtatattctggatattagtcccttgttggatgaatagttttcaaatattttctcccattctacgggtttactcttcattgtgttgtttgctatgcagaagctttttagtttgatatagttccatttgtctatttttgtttttgttacctgtgcttttgtagtcttacccataaagtctttgcctagatcagtgtccttgaaacatttcccctgttttcttctagtagttttatagtttcaggtcttacagtttagtgtttaatccattttgagttgacttttatacatggtgagagatagaggtctagtttcattcttctgcataaggatatccagtttttctagcttattgaaaaggatatcctttccccaatatatgttcttggcatcttggttgaaaatcatttggttgtaaacacatggatttatttctgagttcttttttctgttcctttggtttatgtatatttttataccaacaccattttgtttcattactattgctttgtagtatattttgatgtcaggtagtgtgatgctgtcagctttgttcttttggcttgggattgttttagctattcaaggtcttttgtggatacatacaaatttcaggattgtttttttctgttctctagaatgtcatttgtaatttgataaagactgcgttgaatctgtagattgctttgggtagtatggtcattttaacagtattaaattcttctgagccatgtgcatgggatgtctttccatttttttgtgtctctcttcaatttctttcaacagggttttgtagttttctttatagagattttttcacttccttgttaaatttattcctaggtattttttttttgtagctagtataaatgggattgcttttttgatttcttttcagctagtttgttattggtgtatagaaatgctactgatttttgtgtgttgattttgtatcctataactttattgaatttatcagttctgaattttttagtggcatcttaggattttctctatataagtttatgtcgtttgtgaaaagggagtacttgacttcctgttttccaatttatatgtcgtttatttctttctcttgcttaattgctctagttaggacttccagtactattttcagtaagagtggtgaaactgggcatcttatcttgttctaattcttagaggaaaggcttgcagcttttctctgttcaatgatgttagctgtgagtttgtcatatatggcttttattgtgttatattccttctgtacctaagttatggagagtttttgttatgaatggatgttgaattttatctaatgctttttttctgcatctattgagtggtcatatggtttttgtccttcattctgttgttgtgatgtatatatatataagtaaatctttatttctttcactgcattctctctttctttttgagacagggtcttgctctgttacccaggctggagtgcagtggtgcgatcttggctcactgcagcctcaacctcccaggctcaagtgatcttcccacctcagcctcctgcatagcagggactacaagcgcacgccacatgctcagctaatttttttaaaaaattttgtagagacagggttttgccatgttccccaggctggtcttgaacccctgagctcaagaaatctgctggcctcagcttcccaaagtgctgggattataggcatgagccaccatgcctggcagatttgtgtatactgatccttcctttcatccttgagctatatcccatgtgattattgtatattacctttttgatgtgttgttggatttggtttgcttgtaatttgttgaggatttttgtatctatgttcatcagggacattggccactttttttctttttttgttgtatctttgtctggttttggtatcagggtaatgctggccttatagaatgagttagaaagaatttccttctcttccatttttttggaataatttgataagaattgatattaattcctcttcaaaggtgtggtagaattcattagtaaagttgtccagtcctggacttttctttgttaggagactttttattagtgattcaatcttgttacttgttattgatctattacagattttctatttatttctggttcaatcatggtaagttacatgtgtctatgaatatatccatttcctttaggttttccaattcgttgcttatatttattcattaaataggttttctatgccttttgccatctttcactttctgaaatgctcaagatacacatatttatttgcttaatggtaatcccatatgtcatgtaggctttctttattttctttattttttaatttttatttttttaattatactttaagttttagggtgcatgtgcacaacgtgcaggtttgttacatatgtatacatgtgtcatgttggtgtgctgcacccattaactcgtcatttaacattaggtatatctcctaatgctatccctccctgctccccgcaccccacaacaggccccagtgtgtgatggtccccttcctgtgtccatgcgttctcattgttcaattcccacctatgagtgagaacatgtggtgtttggttttttgtccttgcgatagtttgctgagaatggtggtttccggcttcatccatgtccctacaaaggacatgaactcatcattttttatggctgcatagtattccatggtgtatatgtgccacattttcttaatccagtctatcaattgttggacatttgggttggttttttcttcatttttatcagacagggttatttcaaaagacctgtcttcaaatcgagaaagtttttcttctgcttggtctagcctattgaaatgttggttgtatgcttttttatttcatttactgaatccttaattttcaggatttctgtttggttctttttaattataactatctttttattaaatttctcattcagagctgggtgtggtggtgtgtacctatagccccagctacccaggaggtgagagtattgcttgagtaggggagtttgagtccagctagggcagcatagtgagaccttgtctcttaaaaaaaaaaattataattcagatcataagctattttccttatttctttgtattgtctgtctgtgttattttgtatcttattgagcttccttgaaatcattatttgaaattctttttcagacatttcattgatttccttttctttgagatgttaatggggaatgattgcgtctctttggaggtttcatgtttccttgccttttcattgtttttatgtctcaatgttgttatctgtgtatctggtggaacagttgcttcttctagttttatggattggcttttgtaggtaaagacttttttcctgtagatctatctatagtgttggctggttagagtgccttccctttgattttgggtatgcacagtaatttagtctctattatttctttggctgtaatcaatgccagtggtgtctgtgagttcctcaatggcttaggttgttggcagaggctgtggcaaggcttttctgatgatgtagatgccaggcaggctggtcctgccgctctgggtggtgtatgtgtgcccttgggtggtggtagtgggcaaggtgtgatggtcctcaggtccctgggtggtatatgcaggtgctggcattggtggtggggggcctgggtgggctggtctgaagggaaacattttgtaagtagttctgagaataatggaatggacattgaagggttcttgctggaaaggaaggaactaatgttctagagcttctatgttgttccatcctcatcacataattcattatttaactcaacacctgtaggtggaaatggtagtatcctagttgtaaagattgggaaattaataaagccaaaataactaactggtccaaagtaatccaggtagtggtagaagagtcaggatttgaaatgaggtcttcatctctgaagcctatgccaggctgcctctattttcacaacatgaggttgacttagtttatcaaatatattagtgaatgaaagagtaaacacacagaataagcaagaaacatttggtgtaatcaacacgtttatattcacaaagttcttgcaatgcattaagtaccatgtaatacgtattaaatgatgaactgtcttcttcaagaagttcttctcaaataaagaaggcaagggaaacataacctaaatacttatataaatatagcaaaagagaggtggtttcctttatctatttgttagagaaagctacctaaaatataagggttctttttgtatattttgaagagagggaatttgcatatatatgttagagaattttataacaaagatgattagtaaagcccttattttggaatatgtcaaaaatgatttctagatttaagaaatgcatgtcatatttgttctgtgaatgcatttaaatttgtaatttttttttaaagactcaagatgttcagtatagaaaaattgaagggaggagtgaattttagtgtataagaaaggaaagcaagttcataatatctgaatgcctataataataatgagatgttacagagatgtactcagcactatacttctttcctgttaaccaacagcaattactagaaagagttctgggtttgctgctggtgaaaacaattttagatttcactaaatggtgctcatggttgaaccaggtgctgttgtctgtgtcttaaagcttcatgaccctaaacttctaatggatgaggagattgaattatactactttatatgtttataagaaattttggtttatgaaacatttctacttctgtgatgtcatttaatctttatgatctcctctgatctttacgacaattctatgaggtagacagggtacatatttaatcctcagacactttcccctttaaaatgtctaaacaaaacaccaagaatgttctaattaaagaaattctgtacttactgcttctgcccatctgtgtatgtgaacaattacgtaatattatttaaacctaacttagtgggttctatacaaataaaaatgtatattatgataattgttttggattatttaatgagaaaagtgtttgtcctgttgtagccctttagcaggaaaggtttctctggcatggagcctatacatggctcctgacttgctctcatcactggtgctagctctggtgggtggttgaactgggaaggttttcatggcttacaggtagaaattcacagctcagatggtggggattgagatctaacatgtagggaccattttctttttatttcctgcctgtctcattcctttttttctttccttctcttttttcttttttgtttctacctctgtgtgtgtcattctcatgtttcaacttctctttttcttcctctttctttctattccttttctctcatactttcttgcttttctggcctattttcaaaatactgattttaatttgaaactaaagtttgttatgtagctatcgccagatttattgaataatgttactttcacagttcttaatgtaaaaagcagaggaatcatactacccagttttatggcttagtatagaaagccatagaagttaatactatggtgttggtgaagtgaaagacatatagatcagtggtacagaatagagagtccagaaacagatacatataaatatgccaatagatttttttacaaagatgtaaattctatttaatgggaaaagatgagtattttcagcaaattatgttggaataattgggcatccatccatgcatgtgccaaaataaaaaaagaacctcaacataaaccttatacttcatacaaatattagttcaaagtggatcatagatttaaatataaaactacagaacttttagaaaaacaggagaaaaatctttgttttggtattaggcaaagagtttttagacatgacactaaaagcaccaaacataaaggaaaaatatgataaactggatttcatcaaaatgaacaatttttgctctgtgaaagacattggatgagaggatgagaggacaagctacagatggggaaaatatttgcaaaccacatatgtgacagtggagtgctatcaagaatatgtaaagagctcatcaactcaacagtaagtaaacaagcaatccaattgaaaaatgagcaaaagacttgaaaagacatatcaccaaaagtatgcagttagcagatgggcatttgaaaagatgtttgatgtagtatacattagggtgatgcaaattaaagccctagggagatacaactatgtatctattagtatgtttaaaataaaaatactaatgatatctagtgctagtgaggatgcagtcactggaaatcttatacattgctgttggacacctagattgttagtcactttggaaaagttagtttcttttaaagttaataagtacattgactatatgattcagcattcctactcctgggtatttatcctagagagacaaaaacaatgtttacacaaaaactcgttaagtgaatatttatagattgccagtaactggaaataacctaaacattcttccatgggtgaatggataactattgtacatccatacaatgtagcaccgctgggtggcagaagggtgcgactgtaaagggagagcaggaaggagcgttttcgggagtaatggaatagttctgtttcttgattttggtggtagatacacaagtgtatacatgtgttaaacttgatagggctatacaccaaaaaaaaaaattttattttaccatatgctaataactttcttaagctagagatttgcaaaacctgtatttgtacctccagtgaaagaaactcaaatttaagttgtttgagggaggtggcccttaagtcattttctgtggccctgggaaaaattctttcatcactacccaataggtcttttggacccgttttagatacctcacctttaaattaatggactacttcctccctctagtggacatcttttgtttttctaggaaagcacaaaacttgttagtgtgattttatttttcttttgtttttactcatttcatcgtcatgggttgttgtcctgtgattagttggataagttcttagccttactgggcattggttttctcaaatataaactgacagggcaacaaagtgataccctgtctttacaaaaagttaaaagtttagttaggtgaagtggtggcatgtaccatagaccaagctactccagaggctgagtggggcagatagcttgagtcccagagttcaagggtgcagtgagccatgatcatgccactgtacttcagcctgggtgacagagagagaccttgtctcataaaaaaaagaaaaaataaaaaagaaaaaaatgacagggaggactagatctttaagatcctttttagttctaaacttttatgtttccaggtatggagtacctatcacatgttttccaatccgtggcagtgaaggatctaaaaaggaaatataatgtgattctttatctgcctgactttataatctcttttgagagagagagagagagagagagagagagagagagagtgtgtgtgtgtgtgtgtgtgtgtgtgtgtgtctgtatgaaaaagattctgctacttagcagaatcaagacagtatttaattaattacctaaaataacccataacaaataatcagttacactggcagtcattgggttgacatatctattttgtttgaccagtattgtggtttagtcatcaagttttttctatctcctttttatttttaaattttgtatattttgtgaagataatacatttatgtggttcgaaatttacaaagtgcaaaagggcatatgcaatgaaaagccttcctcacatatccctcccccagccactcagttctctttctcatagacacttaacattattaacttctagcacagtgtcttaatacattatgaaccggaaagtctttagatggggcaaactcactccagtggccacattccccaccatttccctataatattataccagactgtatcatgattatgttatctgcctggccattgtaggaattgtgtctgtgatccagttggtgtggactggagtgtttggaaccttatggaacgggagggggatggggaggagaaggagaaggggaaggagacggaggaggagcaggacttcagcctgggtcggctaaacagtgcaggatctggataaaaagaagggatgggaaggaaaaggaaagatggcaagatcaaggctgtcagtcaaaaacacacaaataagcttcctgggagaaaagggaggaggatgacccggctggaacagaaatcttaggtcaggaaatcatgagggatacatttggtggaatttcttacatttctgactatggagtagggttttatttcaaaaggagaagttattaaagcgaggcatagtgccatgcgcctgtagtcttagctacttaggaggctgaagccagaggattccttaagctcaggatttttttttttcattattatactttaagttctagagtacatgtgtacaacgtgcaggtttgttacatatgtatacatgtgccgtgttggtgtgctacaggatttttaaggccagcctggggaacatagtgagaccctgtctcttaaagaagaaaaaaaaaaaaaaggccgggcacagtggctgacgcctgtagtcgcagcactttgggtggctgaggtgggcagatcacgaggtcaggagatcgagaccatcctggctaacacagtgaaatcccgtctttactaaaaatacaaaaaaattgtagctgggcgtggtggcaggtgcctgtagtcccagctactcgggaggctgaggcaggagaatggcatgaacccaggaagcagagcttgcagtgagccgagattgtgccagtgcattccaggcctgggcaacagagcaagactccctctcaaaacaaaaaacaaaaaaacaaaaaacaaaaaaaaaaaaaagaaaaaagaaacagagaaggcagctactgttagtgttttgagcagtgatggagtctttgttctagaacagagttaattgaataatagggacagaatagattgtaaggcagagaagctggtgaggcgtttaaggtaactggtgaaagcgatattgcctagatgagaatgctagccgtggggctgaaaaggaaggaagggcctgtgttttataggcaaatttcaggctagaccctgtaactgctctgtatgtagtccgtaagctttgtttgaagtctgattatttttgaacaaagttttaaacatattgttcattaatctgaaattgctagttacatttagaatctttgttaatgtttagcatctgcttacagaggcttggaatgtaactgtaactgttttcaagccaatgaacagttcttcaaacatacctgcagtgtttagtgggtgtctaagtctttgtgatgggtttgttcctaggtaatctctcaaggattttggagtccctggagctgggtgactgtctcagagtctgtacccacatctcccacaaaggtcaagaatgaatgcccaggttgttgtgggataatgatgaaaatatacatagggacaacttggttgctgccaggcatttcttttctatttctgtttcttgccaaactccttttctattttgtaggaatcctcatttgtgtgggtgttggtgggaggcagggccctgtgccctacagtggaaaccgacaggggtgagacactcctgcttcctacccctggcagtgagggctcaggcatgtcttctccttggtcatttgtatgttcctccttaggactttgaatcttgaatgaggcatgcaaaggggaagggacagcttagaatcctcctgtgacagacgtggtggactgcaggagcaaggacagaagtacacagaggcatccagagctactggcagtggctttaggaccagattgttcctggagcatgaactcacttgtgcttccttctgtgtgtgctgggtggcctccttttcctcctttgtcttatccgccacccccatcttgtttctccagctgtccaattgattttgtgttctatttggtatctccaaattcctttatggttaaatcagccagaatttgtttctgttccttacagttgcaactaagaacccagatggatataacaagcaatggctgtagagtgagcaagactggggcagctttttgggcctaggaaatagcacaatgactattatgtgtttgtgactgcaacagattattaggtgtatgtgaaagcaaagcaacagatcatattgatctgtagcaatcacacatatgggggatggatttgagttcaggatcctttgtaggcactgaagcacaggagcagagtctaccaagtataagtagtaggccagttatatgtggacccaaggttcaaagttatgtattaagctgataagtcaaactgattctggggttatgttatcactgccatctttgcaaaagaactagtacatgtaggtgtgttaaatagaatgttgaaatatattgccctgagtcataaaaggtaattcctggttattgatagacttttgttttataatgtccttttttaggctttttggtgattaactcatgataatttcaaatccttggcttattcttctatcctgatccttcatttggggtcatagttcctgctgatttctttatccttttcctttatatttatttgttttaaacacttggtcttaccaactggccttgaaatttttttttttttaatatccttacccaggtttctttgctgagaattcatgatgcctagttattatccactagtgtccttaacctctttattcctgagtttgcaattttttgaatttttgcaatcagaccttggtggtgaccttgagcagtaggatagagatgactcccacatgcttagcgttccaataatggaacaggaggcataaatgagtttaaatgggaaatggaataaaggactccagaaatatgaaaggagcacggctgactgaaagctcccaatttacacagaagagaacactcttttggagagaacagggattgaacaagagtagttctcagatattattgacctagaaacaaaataataaatatcatataggcattaatcagttctaaactataacttgctgagaagagtggtaacttgccttgagatgttggttgttaagactagatttataaaagttgttgaaagctggggtatactattccctgaatttgtggagttgacaagctctcaaactaggaatgggagaggcccaccaaatgtttcctgtgaacataaggaagcacagtcagcttaagcattttatgcagctagtgcccagtcagcatttccccagtcacttgattaacacttcttttccggcttcttagctcagttttgtgtttttgggtctctgttaattagatcctcacatatgctgcttcttccagtgccccccgctcctcctcctctcctttctcaggcatcatggagttcctgttgtatgccaggcatggtgctaaacacttttgatgcatgcccctatctatagtttagttagaaagacaaacagataaattcgaatttattgtttcacatgctgcaatgtatgtgaattcattgttataggagggctgaggaattaactctgcttgaatcagtcagagaatagtttgctgtagaggtgacacttgagtcttgatgcatcaacaggtgtgtgtcagggaaggaagggagacaggttggtcagggtgatcaagggcgcgggaacccagtaaacaagttaggtattattacacaggcagttgtgggagataaggctgtgaaagaatttgccttttatctctgtgtcctcaacacccagcataatgcccagtatttattgacaaagaagttcaaaggttagtcagtgagttccctttcttactgtgaaggagttaaacaataatcaccctacctctgttccccagttaaggtcgctcagtcctccccatatcaggtgaactgcagttaagtataatgtgagcttagtatggaaggactataacaaacacaggtttagaatgaggcaggcctggggtctaatctcagctttcagttactaccattcatgtgatcttaagcaaaatgctgacactctctgaatctctgtgacctcatctacaaagtaagactgctaacatttctgtttttaggatatactggtcaccaagaatagatgtaggtatgacatgatttgcctctgtgtccccacccaaatctcatgatgaattgtaatccccacatgtcaggggagggacctggtgggaagtgattggatcatgggggaggatttccccctttctgttcttgtgatagtgagttatcacgagatctgatggtttaaaagtgtggcactttcccctttgcgctctttctttctctcctgccaccttgtgaagaaggtgcttgcttctcctttgccttctgccatgattttaagtttcccgaggcctccccagccatgtggaactgtgagtaaattaaatctcttttctttataaactacccagtctcaggtagttctttataccagtgtgaaaacggactaatacaaggtatttaccaagtctactgtaacttgcgctcaaattgaatgagccagttgttggggatacagtgggaacatgacagacagactttttaccctggtgaaggctatacaacaagcaaataagtgttcctttatctctgtatccaccagacccaggtcaacaaacttgatctgaaaagggccagatagtgaatatttgcaggtcatataacctctgtcagaattgcttaactgcagttgtagggagaaagcagccatacacggtgtgtcaatgaatggacatggctgtgttccaccagtaagactttacatctaataaagcaagtggtgggatttggctcacagggcatagttgttagactctaagtttcttgagggcaaagactgttgtttattcttgtatctttgttacctattggtgtctgatatgtggcaggtacttacattgtttgcactgatctgaattcattacacataaataagtacaaactaataggagactccattaattcaggtcctctgagaagagaagcagatgccaagagggaactagatgtgcaagagatttaatgccaggggttggggtggggcaccaggaaaggataaatggggaagggaacaggaggcaatggagtgagcctataggctgtgatgaaggcctgacctcagggaaagcagaggggaaagaattgggtagcaagagcctaagaccacatgccagagttctgaaaatttccccgggctgatggggagttcccaagcaaaggatgctgttagaggagtcttaggtcttctggaaggattatcttggctcattaccttgctgtgctccttggtgggctggaagcagcctggggaagtgtgaaaggtagagcagctgggagctgttggcttcttggagggaaatgtgagctgtgcacccctgtggccagcacagtccatttcttgtgcttcacagatccgcttgcccacacgttggtgctttcttcttgagtggaaacctagaagatggaaattactaggaagactatagcccctattgttgcagttagtctcattgctgcagctggtactcattctctccctccttgactcttcatcctcaatccccttactgtcagccatcaccttggcaggccttgggtgccttacctggtagtgtgacccaaaacttcattcctaaagatctggacccatggtaatcatgcactttttgagctaatgtttctgtacaaacccattcacagttacagtgggacaaggaagtatcaggaagtgccatgtagatctccaggaagtgccacaggtgtttctccctgccccgattgtgtaaatgcaagtctcctgcctgctgatcaggatccatgacctctgccaagatagtgattccttttctcttctcacctgctgctccctggccacaaggagtccgaattacccttactatgtcccctgtcaagaatatgtccctttgagtaacaagactgctaattgcagagcccagggttatagagatgggaagcacagggagggatggtaagtagggccactcctgcttccaccctctggttcccagtacctgtattcttcctagggggatacaatgccatatagagtcctctgacttaattcatataccattccattctacatgtgtagcttgtctccattgaaatcaggtaatgtgagtcctccaactttgttctttttcaagattgtttgggttattctagttctttttctttttcatatacattttagaatcaacttgtttattcctataaaaattcttgctgggattttgagtgaaatcatatatttaggtgcttaatctctcagcattttttttgtagctttcctgagtatatagatcctgaacatattttgttattttttatttttttgagacggagtctcgctctgttgcctaggctggagtgcagtggcgcgatctcagctcactgcctcctgggttcatgccattctcctgccttagcctcatagtagctgggactacaggcgcctgccaccacgcccggctaattttttgtatttttagtagagacggggttttactgagttagccaagatggtcttgatctcctgacctcgcgatctgcccgcctgggcttcccaaagtgctgggattacaggcgtgagccactgcgccctgcctgttatatttatatctaagtagttcatgttttttggtgcaataatcaccccacgtatttctggggtgattatttcggtgcagttttcaccccacctattgtgaggtttggtgcaataatcaccccacttattgtggggttgtgcttttttaagtggttgtagtttttcttgtaaatcttgtatatgtatatatttttaagtcatagatattttatagatttttttctgttgcaaatggaatttattttctaaataactattgttaatttaaggtaggagtgtctttcagataagctcacctctctccttaaaaatgctcacttgatcctttacttacaatggaatctttattcatgtggaataaggaaagatttctgagtttggattttaaagccttccttagtttggtttccagcttcatctcccattctcctttcctcaaacactttatgttcctgacatactttcagaaagtattgtgaaatgtaatcattagcagtttttcagcatttaggtgatatataccactaatgggctcaagaaatatgttgaatgggtttacagagcacagcaaaaccctacaaattgctatggttttgcataaatcatggatttctgggaaatagtagtctcagaaggatcagcccatataataaacaatatctggctgtgtttttttgtattgttgtttgctttttgtttttgggtacaaagtctgtaagttagtaaggcaaggaggcaggctggccaaagctgttgatgttgcaaatttctgctgatgcttccacagtatatagttaatctcttaaaagggctttaaatcattgagagagctatcatttatcaagtttattaagatttataactatgtttctttgtggtttagatgacttagaataattttattgatttattaggtaataaatcctaatttttttacaagtaaattcaccagaggatagttctggtatgaattatttttaaattgcttttctccagccaatatttggcagtggtggtggcactaggagacctgcttgtttggttggacaattagctgtggccagtaacttttctggccttaatttcttcagtgtacaaatgtgtaatttgttctagatgttttctaagggagtttataattctggaatccatgatcatgttaggattaaatttacagtttttaaagcaaaatgaaatttagcccactagagggagctctgctctttttaaatgttgtcagttttattgagaaagacatccttcataaaagaatgtatgctaatttttatttcagtagcagaaaatatttgatgttgacttaaacttttgccaatttgatgtgtgtgaaattctgtttcatgatgttatcttgaatttccttgattactgatgaggttgagtatatttttatgcttattcaccgttcctaattccacatctggaaatgcctggttcatgtgttttgcctttcttcacagaagttttttcttatagattcattgtggtttaaaaaaatatattctgggccgggcatggtggctcatgcctgtaatcccagcattttgggaggccgaggcaggcggatcacctgagggccaggagttcgagaccagccttgccaacatcatgaaaccccgactctgctaaaaatacaaaaattagccaggcgtggtggaacacacctgtagtccaagctacttgggaggctgaggcaggacaattgcttgaacctgggaggcggaggttgcagtgagatgagattgcaccactgcactctagcctgggtgacagagcgagactccatctcaaaaaaaaaaatacatatatatatatatatatataatatccattttatatatatatataaaatatccattttatatatatatataaaatatccattttatatatatataaaatatccattttatatatatataatatccattttatatatatataaaatatccattttatatatatatataaaatatccattttatatatatatataaaatatccattttatatatatataaaatatccattttatatatatataaaatatccattttatatatatataaaatatccattttatatatataatatccattttatatatataaaatatccattatatatataaaatatccattttatatatatataaaatatccattttttatatatataaaatatccattttttacatatatgtaaaatatccattttttacatatatgtaaaatatccattttttacatatatgtaaaatatccattttttatatatatgtaaaatatccattttttatatatatgtaaaatatccattttttatatatatgtaaaatatccattttttatatatatgtaaaatatccattttatatacatgtaaaatatccattatatacatgtaaaatatccattatatacatgtaaaatatccatttttcatatatgtaaaatatccattttttatatatatgtaaaatatccatttttatatatgtaaaatatccacttttttatatatgtaaaatatccattttttatatatatgtaaaatatccattttttgtatatatgtaaaatatccattttttgtatatatgtaaaatatccattttttgtatatatgtaaaatatccattttttgtatatatgtaaaa

SEQ ID NO: 354 - DNA, 32744 bp, Homo sapiens
  source 1..32744: mol_type = other DNA
gttttcgcgcgtccgcgtcgtttggagctgcgacgccaaacatggcgtgttcctagaagccgctttcggcatcagtaggcggcggcgtggggtctggcagcgtggggagagggaccaaccgacgccacttcgtgttgggaagtgggagcgggagggccgggcaattcccgaccgaaccaaacggtgaggccccggcccgagagccaccgagcgcgcgggagtggaagggagtgggttgggcacccgagtcccgagaggcgggaggaaagtggggctaccaggagatgagggataacggtagcgaggcaagggcggcctgcagacttggctgtttgcgcaaccttaggaacccggggaactgggggctggccgaggcagcccgggagtgggcagcatggtagtggagcaatcagggtgcggggtgggagggaccgtatgctaggctgagcagaggcgagtgtacccatcgtgaccgcggttgcggacctgggtgatgcatttgcccttgggggataggtggtgcaaattttgagataaagtggttatctcgagtataagaccgttgtgcattgttactgcgcacgcgaccttgttgctaatagcaatagtgtgatagctttaaacattagacccttacatgcttttaatgaaaaagtgaaggtagttgtccgtttatagagaggagcttcatggagaggtatggccgccaattctcaagctcagcgactcctgtagatttatatttgggggtatttgtgattcagcaaaactacttttgcttattacgtgtgtcattttttctttattattttgtgacatgttggtgaatgagagaagtactatctgaaagtgatttgactaaatagcaaggactggtaaattacctactagtgccaaggttgcagttgacatacctcctcccctccataatttaaacgagctcagttgtagcgcggtagtgcccttcagatttcggttattcttcagaaggaagaatagtttgtagccataatgcttttccccctcctgggataggaattttcttcctccattttcatgttatttcaaacttctctgttcagtagaggagcttcagattaagggcagggtgactcttctataggagacatccattgcatgacacatattacatctttcatcactgaggaaaatttcggtgaaagtagaaacattttcccttttggttatgatgggactggtattttctctgtttctgcagtaacctagcacagggtatagtagaaacaattaattatagtagtggcttgtggccatatattatagtctcagggtaggagggtggtctccgccctagttgaacttctaaggccaaagagaattttcaccacaaacacatttggctgtggtaatgttagaggttttaaacaaatatgtaaagattatctgatcattaatagaacaatttttagattttgtgatgtttgaatatatttgcatttggaatcaaaccagaatgcagcatgatccttgtaggcatgtggctattaaaatacactgaagatttttccagaaacaaaatttttttttctcagcaataaaaatattcaaattttgggtaaggtaatgtttgattatttggattttgacctttgtgttatatatttgtacctgtgtgtgtgtatgtatgtaacctcacttctaatttagtgttattgatggtaatattttttcctttctttatcagcttcaaatagggactgttaatttcagagcgtttaaggaatggcaaaacacatttagtgctggtgtgagtctgtagtgtgtttggtttgctgactatcagacttattacagataagtccacagttataagctttgtagagcttaagttgcatcagtgttctttacccttgctactcaaattgtggtatatagcatcacctgggagtttattagaaatgcatgatctcaggctcaatccagagctgctgaatcaaaatctgcaattttaacaagttatctagatgaaaggaatgttcaataaatcttgagatgcactactttggttggtaacagttgaagaacactgaggtaatgcacaaaccggtataaaaatttatagcatcatttattttaatctgaggtgatcttatgctgattatccagtctgatgaaactgaggcccagaaaggtaagtgccttgcataaggtcacacatacctagatttataacccagattccaactcattccagtgcttttcttttgctggttactgtcagagcttgttatattaaaaacggactaaaattcatgaatgacaattaggtgttcattcaataacaaacgtctattgggtactgtacaggcagcctaacaatcctgtgtgtccctgctaactgctcctgtttatcatggtggctattaacccaccacctttcctctttattttttttgaggcggggtctcactgtcacctaggctggagtgcagtggcgtgatctctgctcactgcatcttccgcctcccgggttcaagcggttctcctgcctcagcctccagagtagctaggattacaggtgcctgccaccaagcctggctaatttttgtatttttagtagacagggtttcaccattttggccagactggtcttgaactcctgacctccctgaactccacccaccttggcctcccaaagtgctgggattacaggagtgagcccggccccgtctttactttttttttttttttttttttgagatggagttctgctctttttgcccaggctggagtgcagtggcgcgatctcaattcactgcaacctccgcctcctgggttcaagtgattctcctgcctcagcctcctgagtagctgggattaccggcatgcaccgccatgcccagctaattttgtatttttagtagagacggggtttctccatgtttgtcaggctggtctcgaactctcgacctcaggtgatccccctgcctcagcctcccaaagtgctgggattacaggcttgagccaccacgcccggccccctctttactctttactggataaagttcccttctgcttcatagaggaaatgaaatacattgagtgggaacttcattgctttctgttctgtttcacctgcaaacatgaagacctctatctgtccatctctaatgatattctgagttttttctccttacgggcaatatttccttcatgtgtttgctagggccgccacaacaaaataccttatattgggtagcttaaacaagagaattttttttctcacagttctggagagtggaagtctaagatcaaggtgcagataagattggtttcctgtaagacctccatccttggcttgcagatggccaccttcttgctgccttttctcgtggtcatcctgtgtgtacatgcacctctgctgtatctttctgttttctttttttttcttttctttttttttttttttttgagacggagcctcgctcttgtctcccaggctggagtgcagtggcccgctctcaggtcactgcaacctccgccttcccggttcaagcgattctcctgcctcagcctcctgagtagttgggattacaggcgctcaccaccacgcccggctaatttttatatttttagtagagacgggtttcaccatgttgtccaggctggtctcaaactcctgacctcaggtgatctgcccgcctcagcctcccaaagtgctgggattacaggcgtgagccactgcactggcctgctgtttctttttcttataatggcatcagttatattggtttagggccttaccctaacaacctcatcttatcttaatcaccttaaaaactttatctccaaatactgagggttcgggggttagggcttcaacatgaatttttaaggaacacagttcaatccataacattcagttactcctttttcaactagtactaacttaacaaggatttaagcatacccaagtctcttattatctttttttttttttattttttttttttgagacagagtactcactctgtttctcaggcttgagtgcagtggtgctatcttggctcactgcaacttctgcctcccaggctcaagcgatccctccacctcagcctctctggtggctgggaccacaggtgaggcgcaggccaccatgcttggctaatttttgaatttttttttgtagagatggggttttgccacattgcccaggcttgtctcaaactcctgggttcaagcgatccactggccttggcctcctgaagtgtattggaattatatgggtgagccaccgtgcctggcctcaaatcaagtcttatctgaaatatacgctccttaccttagattcttagattcctcttcagctttatctataattatttttcttagtttttttttttctcctttttttaagagacaaggtctcttgttacctaggctggcctcaaacttcagggctcaagtgatcctgccacttcaatctcatgagtagctggtactacttgtgtgtgccaccatgcccagcttatttcctttaagtttcttgaaagaattctctatattcattttcttcacctccttattggttaattttttttttttttttttttttttttggtattttgaaggctgacagtccatagcagtcactgaatttgatgtagtggtgatcaccattgatatctttgttgctaaatctaatggaatctgtttaatcatttgccattttaactacttgttcgttcttgaaattttcttcttatacttctgggacaccatattttccttatttccttcttaggttttagccagtcttttgttggttatttttctcttttctctgaccactttagatgtttgactctgaggcactaccctgctctcttctgaaaaccttcagataaaaatccaaactacgtagtttaggaaataaggacttcaatgcacactcttcatgaatggtctcatttgtgacttcaactattgcctctattttgatgactcccaaatctggctttttagcacaggtctctcttcaacgctgacatatgtagttgtcttaaaatacttgacattcatgtcaaaaacgttgtgtatttcaaccttcctgacattgttttcctcctatgagccatgcaggcaccaatcagttggaaaagcccaaaatcttaattctttccccttattaacttatgtgtaacccctcctccaactctccaactatctaattattttatttccaactctccaactagccattatttatttatttatttctgagacagaatttcactcgtagcccaggctaaagtgcaatggtgcaatctcgtctcaccgcaacctctgcctcccaagttcgagtgattctcctgctgcagctttccgagtagctgggattacaggcatgcactaccatgcccacgcctgcctagtttttttttttttttctttgagagagagtttcactcttattgaccaagctggagtgcagtggcaccatctcggctcactgcgacctccgccttctgggttcaagtgattcttctgcctcagcctcctgagtagctgggattacagacgtgcgccaccatgcctggctaattttgtatttttagtagagtatgttggtcaggctgatctcaaactcctgacctcaggtgatccacctgcctcggccttctaaagtattgggattacaggcatgagccactgcacccagccaacacatatcatatagtttaaaatgtaagtgtttccagtacagtaagctattaacagtatagtgctatgaacagcattcatatagttaatagcattatgcagaaaaattaaggatatcgggaacatagagattcttggttgaggagtgagcccttttagattggcagttagtggagacctctttaaatagaggacaacttgagcagaatggaatgctgtcaaagagcaagacatgcttttatctagagaccagagctttccagccagagggaacaaattgtacaagggataagatacattttatacatatttcactaaagatgttcacgtattgtctccaagtctctgttaatatagataactaggtcatgcagacaacctagtcctttgtctccttattcttatatgcctgtgcaggggtttctgtgattatagcaccaggtgtgaaactgctgggtcatagaagatacagtcacgagttgcttaaggctgggatacatcctgagaaatgggtcgttaggcaattttgttgttctatgaacatcatatgaacaaacctagatggtacagcctattatacacttgggctatgtggtatatagcttattgtatctaggctataagcctgtacagcatgttactgcactgaatactgtaagcagttgtcacaaaatggtaagtatttgtgtgtttaaacatgtctaaacttagaaaggtactgtaaaaatacagtgtagaagtaaaaaatggtacatctgtacagggcacttacctcgaatggagcttggaggactggaaattggtttggatgaatcagtgagtgagtggtgagtgaaagtgaaggcctagggcattattgtacacttaggctaaaataaatttattaagaaatttttttcttcaataatcttagcttattgtaacttttagtttataaactttttgtctctgttgcagtaacacttagcttaaaacacaaatacattgtgtagttctacgttgtttaaaacagacgcaaacacacacattaactcaggtacacacaaggtcaggatcatcaatatctctgtcttccacctccacatcttgtctcactggaaggtcttcgggggcaataacattcatggagctgtcatcttctatgatagcaatgacttcttctgaattatctcctgaaggacctgtctgaggctgttttacagttaacttttttttttaataggagtagtacattgtaaaattatgataagaagtatagtagtggggcttggtggctcacttctgtaatcccagggtttagggaagctgaggtgggaggattgcttgaggtctggggtttgaaatcagccagggcaacatagccagaccccatctctacaaaaagtaaaaaaattagcatggcatgatggctcatccctgtagtcccaagtctcaactattcaggaggctgaggtggaatgactgcttgagcccaagagttcaacgttgtagtgaattatgatgccggcattgctctctacctcaggtgacagagatcgtaactcttaaaaaaagtaggctgggcgtggtggctcacgcctgtaatcttagcacttcgggaggccaaggcgggtggatcacggggtcaggagattgagaccagcctggccaacatggtgataccctgtttctactaaaaaaatacaaaaattagccaggcgtggtggcacacacctgtaatcccagctacttgggaggctgaggcaggagaattgcttgaacccgggcgatggaggtttcagtgagccaagatcgtaccactgcactccagcctgggcaacaagagtgaagctccgtctcaaaaaaaaaaaaaaaaaaagtataatgtagtaaatgcataaaccagtaacatagttgcttattatcactttcaagtgttatgtactgtacctaattgtatgtgctctgcttttatacaaatggcagtgcagtaggttagtttacaccagcatcaccactaacgtgtgagtaatgtgatttactacgacttaggatggctatgatgtcactatgtgataggaattttaaagctccattaaaatcttacgggatcactgtcgtatatatgtggtccatatctgactgaaactttttttttttttttttgagacagggtctcactctgtcacccaggctggagtgcagtggcacgatcgtggctcactgcagccttgacctcctgggctcaggtgattctcccatctcagcctcctgagtagctgggactacaggtgtgccccaccatgcccagctaactttttgtttttttagtagtgatggggtttctccatgttgcccaggctggtcttgaactcctgcactctaagtgatccacccgcctcagccttccaaagtgttggattacaggcgtgagccgccatttttatgtggtgtgtgaccctctgtgtgtcctggtcatagaatacacaaaatatatactcaatttcattagagacagctagatagctctccaaagttgtattaatagatattcccagtagcagtgtttaagagtttctgtttccatgcattcttgccagcattgaatatttttggactttgtaatttttgctagtctgatcataaagtagtttttcactgtttggattttaaatccctgataaccagtgagatagcatctcttctgatattaattaaacatttagctcttcttttctatatattttctgcttacaccctttgttcacttttcttatatatttgtcttgttgattcacaagggttccttgtatattctgtataatacacctttgttttagttatgtattaataacatttcttctcttaatcttcaccttgttaaccttgtgtagggtatcttcaatgactccatcaatttcagtcttcagttctgatgtagtataattcattaggcagataggctgtgaacttgatgtatttttgttctttctcaagtctaaagctaaaaattcccagttaatttcacttgagatattaatggacagcactgaacaaaagtaaaagtgtttaatctttcgggagtactgggtggggacaggagacttacatttaaagttctagaaatgtcactaatgagcctgtgaccttagagaagtcagtttatctccttatcttttggccacagtgtcttggtcagtaaaacaaaatacttaaactgtgtagagaactgatatgggtggctccaaggtgataggaaaattatatttatttacttgttaacttatatggactcacaactgagagaaaaattattttaatgataaaatgtagaatagtgattaactgtgggattattacttggcatacagcacatgcatgtttgaacaaatgggtttttataaatacaatgacaggctgagctctttatagcaagaatgagattcttataagatacagctttatagacagtgatgtcttcaaccagtaaatggaaactaccaatcgaagatgtctatatttggagagaggactgatgatctcttacactcagcaaaaagttttgcctaactgctagttataaattatagtctgttaaatttaatctaggctgtgttgttatctctattcagtgccttaatcaaaatcagttttatagcttttccttcctattttttttcatatccaagaaggaactttatttatttattttttgagatggaatcttgcttgttgcccaggctggagtgcagtgacaccatcttggctcactgcaacctccacctcctgggttcaagcagttctcctgcctcagcctccctagtagctgggattataggtgcccaccaccatgctcagctaatttttgtgtttttagtagaaatggggtttcaccatgttggccaggctggtctcaaactcctgacctcaggtgatctgcctgcctcggcctccaaaagtgctgggattacaggtgtgagccactgcccagccagagaaggacctttaaaagcaataagcataactgctgttccttagtgggttttgtacagacatgtatttttgtttttcagctaaggagacaccagagggtgatggttgacagtagttggtacctcacagctgggcactgatcaggtagggggtgtcaatattgtttaggataatgtataacttttcttattagggggagattagtcacggggaactcttgtatataccaaacaggcaagagacttattgcagtttatcagtgccattttactaaaaactcccggtgagacagaaatactcaagtttttcggacaggtcttcctctcacaggtctgcctcccctgtctattgtcttcttacatactttatacttcacccatttattatttgtttcccatttatttgtctccccactataaaatatgcttcacaagtcttggatttttttttgtctttttagttaatcgatgtatctcaagtgcctagactagtgtctggcatttgcaggtgttcagtatatatttattgaattaataaatatggaaaagcctaatgataaagcaagaaaatatcagaaaggggattggagagcgcaggattagaaaaaagggtgttagatattcccagtgaaaagtattattaaattttgttggcttgatatgctccatttcagtataggaagatactgaatggactgttcatacattcattcatttttttcagccattcagcacactatttactcttgcagtgttttttgtagatatttctgtctttactctgataaaatttgtattccatattgttgttcttggacctctgtctcttaccttttctgtcttctgtctgagaaatcataatttctgttactgtttagttgatcatacatttactgaacatccttcacactgtgctaggtaatggcatttatagatgagtaaaacatcattctttcctttaaacagttcatgatttggagatgagatagaagtaaacaaggaagtaagtacagcaatagaagtgtgtactatgcagaacagtagcatggaggaaggagcgctttactgtctacagcagttaaagatttcctcaggaggtgatgtctaccatgaacagcaactttagtgatctctgtgtccgttagcggccattttaaaaagcatacataaaagtagacagaattttatgatgaacccccatctagccatcatccagctttaacaattatcaacttcatttcgtcttacctcccacatacttctctagttacattgatagaagatctagaagcttggtcagattcaggtttgtttgtttgtttttttggcaagcagcccttaagattttggtttctcaaaataataaacttcatttctttaagttttctaatatactcacttttctattttgattattgtagaactcttccccggtcttcacagaaattaatttctttcttgtctttggcatattgtatttctctagtttgcttttgactctgggcagtttaacagtttgcttgtatttcctatccatgattccccagtgatatattttctgcctcttgttcttctctttgtagacttgggctatagatcatgattttttttctgagacatggtctcactctgttgcccagactggagtgcagtggtgtgaatatggctcactgcagcctcaacctcctgggctcaagtcatcctcccacctcagcttttttttttttgttttttgagatggagtcttgctctgtcgctcaggctggagtgcagtggcgcaatccgagctcactgcaagctccgcctcccgggttcacgccattctcctgcctcagcctcccgagtagctgggactacaggtgcccgccaccacgcccggctaattttttgtatttttggtagagacggggtttcaccatgttagccaagatggtctcgatcttgtgacctcgtgatccgcccgccggggcctcccaaagtgctgggattacgggtgtgagccatcgcgcctggctcagcttctttttgagaagaagtctctctctgttgcccaggctggagtgcaatggcgtgatcttggctcactgcaacctctgcctctgccacctcagcttcttgagtagctgggaccataggtgcatgccaccacacctggctaaggttttttttttttttttaatttttattttttgtagagatggggtcttgccatgttgcccggactgccaggctggtgttgaactcctaggctcaagcagttctcctgcttctgcctcccaaattggtgggattacagacgtgagccaccacacccaatctgaatatttgttcttatcttaaatgtggaattattgtagtgaatcagtaggtgattttattcctttactcctgtcactcttgtctgttcttgttccatggtttctcagtctcctttatgctagacattgcctttattattatatttttaaaaattacttcatatttaccttgagtagaactcaaaaacacattcatgtctttacctcaaattttcttttggtagagtgatgcaatatctaactatagaagtagaagcagtgctgtaaggaagttcttaggtgtcatattttgcctcaaggtgaggtttttgtttttgttttgaatctcatctttctcgcattgcattactctctaggctcccattcatttctttctctcaggagctcagcattctttgctctatcctcctaaaccctgtaatccctgttacatttccagatggttgtcttgctcagatggtcattgagaattctaaagttcctcgcttcctccaaccctccttggggggaaaggaacatactctttggaatgtggtacttcttaccatcaggtggcactgcagactattcaatttattttattttattttttcaagacggagttttgctgttgttgcccaggctgaagtacaatggtgcaatctcggctcactgcaacctccgcctcctgggttcaggcgattctcctgcctcagcctcccgagtagctgggattacaggcgagcgccaccatgcctggctaatttttgcatttttagtagagacagggtttcaccatgttgttcaggctggtctcaaactcctgacctcaggtgatccacccgccccggcctcctaaagtgctgggattataggcgtgagccaccacgcctggccaattcaaattatttttacagctttaggaatgatagaaacaatagtacattatccggtaaagaaagaagcaagttgatgtgggaactggtatggagaagacttagaaatgaaagtaaagatacgattgctaacaaatacaaatgtattttccttttatgtgatacaagtgtacacaatatatagaagtgtatataataggtggagcctaatggaaagtaaataatacattagactgttttggttagtttgatttttccaagactgtttaagtattttaaactatcgtctttataaacaccaaatagtaagaacattaagtacctaatagacatgactatttggagctatactgctatttgagaataaacaaaacataaaacccctgctgtttgattataagactcagagtcccctgggtgaggagaattgactcttggtaaacactgccttcacaaatccagataatatgacaaaattgttgcttaccggctggtcgtggtggctcacgtctgtaatcccagcactttgggaggccaaggcgggtggatcacctgaggtcaggagttcaagaccagcctacccaacatggtgaaacccagtttctactaaaaacacaaaaattagctgggcatggtggcgggtacctgtaatcccagctacttgggaggctgaggcaggagatttgcttgaacccgggaggtggagcttgcagtgagctcagattgtgccatagtcttccagcctgggcaacaagagtgagactctgtctcaaaacagacaaacaaacaaactattgcttacctacttgtgctactgaagactaggtttgtaaacttcctctcctgaaatttcatgagagtgcagttattgactacattacctacttgatatgtgcttaacaagagaaatacgtaatgatttgcagctgtttgagaagttgggatgtttttggagaaaggaagagaaataaagcaaatatctaattcctatggaaatttaagcagatgtaaaatgaaaactcttggccttaaaaaatgtattttttcattattaaagtgtgttgactataagaatgataacccctggagctttcttaacacaactattgtttataatttgatgtgtttactgcttgtctttttgtaggtgtttttattttgtatagtattatatatatattttatattttaatttttatttttttatatatatttctctagttacaaaacagactaagagagaatatttttaagttatgattggtttaggcaggtttaaacttgtagttcaaaatgcacttcttttttctttctgtttttttttttttttttttttttgatacggagttttgctcttgatgcccaggctggagtgcaatggcgcgatctcggctccctgcaatttctgcctcctggtttcaagcgattctcctgccttagcctcccgagtagctgggattacaggcgcccgccaccacacctggctcatttttttgtatttttagtagagacagagttccaccacattgaccaggctggtctcgagctccttacctcaggtgatccacctgcctcggcatcccaaagtgctgggattacacacgtgagccaccgtgccctccagatgcatttctaacaagcaggagtttgcaggttttttgaaaactccaagcagaagtttgtaggtcctttgaaactcttgagtagatttgatgttttaggagtagggaagagaaagcaagcaaatagcttctctccttgatgtcacatatattttgttgtgcattttttcctcccaaacaaaccagtttttgacagtctgcatgaagtgtcatagggcaggtgtccccagccctcaggccatggaccagtatcagtcagtccgtggcctgctaggaactgggccacactgcaggaggtgagcagtgggtggagagtgagcattactacctgaggtccacctcctgtcagatcagcagcagcattagatcctcataaaagcacaaaccctgttgtgaactgcacatgcaaaggatctaggttgcatactccttatgagaatctcactaatgcctgatgatctgtggtggaacagtttcatccagaaaccatccccccctgccctttacccctcttccactgccctgccccatctgtggaaaaattgtcttccatgaaaccagtccctggtaccaaaaaggttgggggctggtgtcatagggaatacatcagtagccctggtggttcttttagctgaaggtatttgggaaatatatggaagcatctttagtcaatctgtttgaggtattaataacgtatagtgtgcagggacagatatgctaaacaacctgtaatgcatgcacagaaaagaattttcttgtccaaactgccagacttctgctgagaaactgaaatgaatccagatgttgcagtactcatttgaatccagatgttgtagtacacactagtatctttggaaccttcttgtcttatgccagaagtcttacattctttcaccttgctttaatttcttgatctttttggccctgagttaacatcaattgttgttgaaaccgtagacactttttttttttaaagagacatggtgtcattatgttaccgaggctgatcttgaactcctgagctcaagtgatccttccatcttggcctcctaaagtgctgagattcaggtgtgagccaccatgcctggcctatataagtcacattttatttatttatttttttgaggcggagtctcactgtgtcgcccaggctggagtgccgtggtgcgatctcagctcactgcaacctccgcctcccgggttcatgggattctcctgtctcagcatcctgagtagctaggattacagatgcacgccactacacctggctaatttttgtatttttagtagagacggagtttcaccatgttggtcaggctggtcttgaactcctgacgtcgtgatccacccacctcagcctcccaaagtgctgggattacaagcgtgagcccccgcgcctggctataagtcacattaaaaaaagattgaaaacattttttttttagagacagggtctcactttgtcgcctgggctagagtgcagtggcacagtcttagctcactgcaagtcagactcctgggctcctccacactcagcctcctgagtagctagctgggactacaggtgtgtgccactactcctggctaaactttttgttttttattttttgtagagttgaggtctcactatgcttccctggctggcctcgaactcctggactgaagctgtcctcctgcctaaacctcccaaagtgccgagattacgcttgcgccactgcacatggccatctcttgtggattttgacatttacataatcaaagcacttaaaaaaaccagctttattaagctataatttacagtccgtgtaattcacgcactgaaaagggtatacaattcagtagtttttagtatattcacagagttgtgcaaccatcattacagtcagttttagaacattttcatcgttccaaatagcagttgctccacatttccccccaattccccagcctagggaaccacttaatctacttctttgtgttataaatttgcctgttcttcatatttcatataaatgggaatcatgcagcttgtggttttatgtgactggcttcttctgcttagtgtgatgttttcaaggctcattcatgttttagtatgttacaggatttcattcctttttaggtgaaataatacttcattgtatggaaataccacattttattttatttattttaatttaatttaattttcgtttttgagacagagtctcactgtgtggcccaggctggagtgtagtggcgtgatcttggctcactgcaacctccgcctcctgggttccagtgattctcatgccttagcctcccgagtaacgaattacaggcgcacaccaccatgcccgtctgattttcgtgtgtgtgtgtgtgtgtgtgtgtgtgtgtgtgtgtgtgtatgtgtttatttttgagacagagtctcgctctgtcgtccagactggagtgcagtggtgcgatcttggctcactgcaacctctgcctcccgggttcaagcgattctcctgcctcagcctcccgagtagctgggactataggcatgtgccaccacacccagctaattttttgtatttttagtagagttggggtttcaccgtgtcagccaggctggtctcgatctcctgaccttgtgatcctcctgcctcagcctcccgaagtactgggattacaggaatgagccactgcgcctggcctgatttttatatttttagtagagatgggttttcaccatgttggccaagctggtctcgaactctggacctcgggatctgcccaccttggcctcccaaagtgctgggattataggcgtgagctgctgcacctggctgaaatacgcattttatttacccattcatcacatgatggatatttgagttgtcagtttttggctattatgaataatgttgcagtgaatatctgtatacgagtttttgtatggacatattcatttctcttgactgtatgtccaaaggtagaattgctatgttatatgttattctgtgtttaacattttaaggaactgccagacttttccaaagtcgctgttttacatttgcaccagcaatgcatgagggttgcagtttctccttactgatgcctcattatcttcttttaaaaagctggacaccattgatcggatcattatctttttgattatagcagtagtagtgggccttgacctccagggctcaagcagtcctctcacctcagcctcccaagtagctgggaccacaggcgtgtgccatcacacctgactaactttttctatttttggtagagatgggttttcgccatgttacccaggctcgtcttgaactcctgagctcaggcaaactgcccgcctcagcctcccaacatgctgggattacaggtgagagccgccatgccaggccccttaatctcagaaagtagtttagcagtgtatttaatttaatttaatttaattacttaattttttttttttttttgagacagagccttgttctgtcgcgaggctggagtgcagtggcgcaatcttggctgactgcaacctctgcctcctgggttcacacgattcccctgcctcagcctcccgagtagctgggattacaggcgtgcaccatcacgtctggctaattttttgaattttagtagaaatggggtttcaccatgttggccaggctgttcttgaactcctgacctcaggtgatcctcccgcctcagcctccaaaaatgctattacaggtgtgagccacgtgagccaccgtgcctggccttattttattttttgagacagagtctcctctgtcacccaggctgcagtgcagtggtgcactctcctcactgcaacctccgcctcctggattcaagtgattcttgtgcctcaacctcctgagtagctgggactacaggcatgtgctacggtacgcctggctaattttttatatttttagtagagatggggtttgctgtgttggccaggctggtcttgaactcctggccccaggtgatccgcccacctcgacctcccaaagtgctggcattacaggtgtgagctaccacatctgggccttacagtgtattttaaaactcttcattttccttcctttcccaccaggcacttctgtgcacagtactcacttatctaattgtgcgcttgcttagaaattccagggcaattttttgttgtttgtttgtttgagacaaagtcttgctctgtcacccaggttggagtgcagtggggtgatctcagctcactgtagcctctacctcctgagttcaagcgatttttccaggggctaattttaaaacaaatcaggcatagagattcagctgtggaatcctcctgcttaggaggagttacagatagtctacccccaccaggctaaagtcaagatgatgccagctgtaccaccggcttactcaagatagccattgaaacaaggcatgcagactaggcacagtggctcacacctgtattcccagcactttgggaggctgaggtaggcgaattacttgaggccaggagtttgagaccagcctggtcatcatggtgaaacccagctctattaaaaatataaaagttagccaggcttggtggtgcccgcctataatcccagctacttaggaggctgaggcacaagaatcgcttgagcccaggaggcagaagttgcagtgagctgagattgtatcactgcactccagcctgggtgacagagcaagactcacatacatacatacatacatacatacatacatacatacggcatgcagacctgtaccctgctgcaccactcccgtatgttttttataccaagtttttcttcttaaaccccttcactcagcccgaaaaaactgaaatggttcctttgaggcttgagctgggctattttcccatttactaacacttaagtaaaagctgctttccttttaccacaccgtactttgactgctgagtggcaaacggccaaacttgatttgggtactttatttatcctggtgtggtacctctgctctttgagcaagctgttgtggacgtgatagaggctcactattctttgcctgctgccctgtggtagagcttctgccgcaggagtggtgcctggatggaagaagagagccctagacctctagctgtgtttgcctggtacagaatttctgcagcatatagctggggtgtatgagaaatactggctggctggctacccattctggggagaaaccgtagcccttggctgggagttagggtgagagagagccctgtgttcttggctgttatgtccctggagtagagcttcctcacattgtggggtagggctgggtttgtggctcaaaagccacagattcttactgttccttccaagatttagtaatatttgtcacatagatgtttctgtatttgctgtatgcggttaagacattttccagagactttgagctttttataattttcaccagttagggttgtatccctgaggagagggtctgtggagctacttatgtcatcattccagaaatattctttctcttctaattcttttaaactggaagttaggcccagtcttgattagattaatgttgaccgtttttgatgtttcagaggcgaggctgtgggctgcgtatttcatcatatcaggaggcacttaaggtcaagttgtgttgttgttgttgataactgaatttactctgttggttaagctggcgactgacgatggatttctttattttaaagatttgtttcttcattacaattagcaagtaatctgtggagtgatacttggacacattgggaacattctgttccccaacaactgttctttcatttaatggttttagcatgggttatttacccatgcctgaataaattatttcactgtgggaacctttttattttggaacactcttcttcggtttttactctaattttggcacctttttgttttttgttttttttttaaagtcaatctacttaaagtgttggcatttagtagacttgctggggttattgtatgtgtgaaatgccctaaaactaatgacaaacacagataatacaaatattctgaagaacattgttatgtatggctgaaactgaagtcactgcaggtctgataaatctgttagtagcaggtaaagatgctgagttttcttttgtttacttgtttcttttaaggagaatttttgtttccaactgtaggcacgttcgtatattggttctgtgtgggagatatactctgggcgccaactggtatggtagaaacgtacttttcacaatttgttttaacaataagagtagcttcctctgcctctcaccccagtagcccacagattttgggtagacaacagagactcttctgattcttatcctaacaactactgcagtgtctggcacaaaataggtgccccaaaaatgtatgaactgagctcttccccgccagactggatgggcttcttaggagcaaggatcaaagcaaggggaggacctggatggggcagatactggaaggaggcagggatgggaaactctagcagattccactagaacaggaaaaatggtgagggtaaggattgctttgctgtgtgcatttatgttctctgcacaatctttgctctaggggaaaattgctttgagggttggcagtagtcagtgatttttttaggaatagcccaaagcaaggctgtgacttttatctttatttctttggtggagggggtgggatgaggatgagttctggtagagcttttttcctttcatatgttgatagcaatatatttatgttcttcctatcctgcgtctatttttatacctatatgaaaagcctagacaccttattttgccccatttgttcctgcccttttctccaacttcattttccgccactttccccttttctcactaagtgtcagtcatgttggccttcttcagtttgtttctaatcgcaaggccttttttctagttgttttccccgtctgaagctctgccttctgatccttgcatgggtttctcttgtcattcacgtctctcataaatgtcacttctcagaagccttcactgaatacccagtctaaagtgacacactcagttgcagtcagtctttttttttgtttgtttgttttgagacagggtttctctgttgcccaggctggagtgcagtggcgtgatcacagctcactgtatcctggacctccctgggctcaggtgatcctcccaccttagcctccttagtagctgggactacaagtgcacaccacacctgggtaatttttgtattttctgtagagacgggattttgctctgttgcccaggtgggtcttgaagtcctgggctcaggcgatctgtctgcctcagcctcccaaagtgctgggattaacaggtgtgagccaccacacctggccatgagatgtgctttaagtgtaaaatatacacaggattttgaagatttagtattaaaagtaaaatatctcagtatatttaaaaaatattggttacatgttgcaatgataacattttggatgtattgagtcaaatacactattaggcctggtgcagtggcttacacctgtaatgccagaacttcaggaggccgaggcaggcggatcatttgaggtcaggagtttgagaccatcctggccaatatggtgaaacccagtctctactaaaaatacaaaaattagctgggcgtggtggctcgcgcctgtagtcgcagctacttgggaggctaaggcaggagaatcacttgaacccgggaggcagaggttgccatgagctgagattgcaccactgcactgtagcctaggcaacagagtgagacgctgtctcaaaaaaaaaatatatatgtatatgtgtatatatatatgtatatatatgtatatatatgtgtatatatgtatatatgtatatatatgtatatatgtatatatgtatatatatgtatatatgtatatatgtatatatatgtatatatatgtatatatgtatatatatgtatatatatgtatatatatgtgtatatatatatatatcagagcagctgtagtaaaatatatatattaggattaatttttacatacttctttttactacttaacgtggctgctagaaaatgtaaaattaggccagatgccatggctcatgcctgtaatcccagcacttggggagggattgcttgagcctagaagtttgagaccagcctgggcaacaaagcgagaccttgtctctacaaaaaataaaaaataaaaaaaaattagctgggcccggtggtgcatgtctgtgttcccagctacttaggaggctgaggtggaaagatcacttgagatcgcggctgccgtgagcagtgatcacgtcactgtgttacagcctgggtgacagaaatttaaaatcttaatctgggctgcgcatggtggctcgcgcctgtaatcccagcactttgggtggccaaggacctggcaggcagaggttgcagtgagccgagatcgtgccactgcactccagcctgggcaacagagcaagactctgtctcaaaaaaaaaaaaatctcaatctggccgggcatggtggctcatgcctgtaatcccagcactttgggaggctgaggcaggcggatcacctggggtcaggagtttgagaccagcctggccaacgtggtgaaaccccgtctctactaaaaatacaaaaattagctgggcttggtggtgtgcgcctgtaatcccaaatactggggaggctgaggcaggagaatcgcttgaacccgggaggtggagtgagttgagattgtgctgttgcactcgagcctgggtgacagagtgagactctgtctcaaaaaataaatcaaaatcaaatcaaatcttaatccaactctatcagtaacttggtatttttcagattctagttattaggccctttttaagatggtacaatgaaatttttgtgtttttgattagccctgctttacttacataggttttgaaatggttgattttccctaaaaggtaatctaggtcagatttcttgttgaatcaacatttggaatcttgccatttcactgcaatttaattgtaattattttaacaaaggaattcatttgctttggctatattctttataggctaataactttcagacttttactgtctggaacattcttcggtcacagagatagccactgtcactaagctgtatcaatacagtacaacgctattccctgtcacccctgcactgagaacttcgacttattttctgtcaatatttttagctttcaattttaatccttatattttgtacgtgtatattgtgaataactatacatacttgctaagtatagaattgtatatacaattttgggggtgattagaaacagaatcccggagaattcaacaaaatcaagaaattgtgtgtttgttgaatggcttcagctacatggtataggattagatgacccagcccttaagatcctttctgacttaggttttagatttttgtttaataggtcagtttggcttttttccccatagcatttcattttgtatgtttcttaaaatgatttggagatgcaccattggtggcacgtaagatgatgttggagagtactttactaacaagtcaaagcaattcttttgcagttttcttttcttccttctgattttgtcaaggataaagttaggtgttacttactgtatggtttaatacttttataacacttattaatctcctttttaaaacgaagacagaagacattatgcttagtcttgggcacgtaatggtacttactcagaatttagaaactttgaagtttgtgtgtgtatctcccctccctcaatttattatcttctatttatggaacaatgaaagagagtttcctttaggaataaattgatttaagcaaaaataatttgattatgaattttaaggatgagtatggggtatacttagaaaagatagaaaggcagaacatgaaggattagatgaatgggagtaattcagaacatgaaagctttttgtctccatttattttactgttaattttttattacttgtaatacatattcaagtatgttaacttatcattgccaggtttccatggatctcaatagtgccagcactgttgttcttcaggtgttaacacaggccaccagtcaggatactgctgtgttaaaaccagctgaggagcagttgaagcagtgggagacacagccaggtttctattcagtgttgctggtaagttgttctaaaattgtttgcttttctttttaataaaatgagacaacattaatttgttttaaaaccctagttttattggtagtttagtgaaatagattcagatgtttggctgctgatgcctttgccattatcttattactttatgacttcttaagggtgttaaataaatatttattgataaatataaaaataagctaggtatatgtagcatctgctcagaaggcaaaactgtgatgattttcagttttagtacgttaaaagtgtctactatcaggactctaggtagcactctttcatattttgtctttatccctaccccaggtaatttatgttgtcatagttgttcaggtctccacattgcagcatcaatgtcaggtgtaccgtgtatttcactttaaaatgttttcttttctcatctaaaaatttcattctcttgacacagctgatgttttcttggatataatgggaaatggtataattaattaacaatatgtgctttaaattaacctttattggagttcaaagtttttgactaattaatcaaaattattttctcaatgccagaatgaaagaagtctttttgtgttgaacactttccttatacttttcttctgagaaattgagaactctgattagtgtttgaggtttagcttctggtcagggcaacaaagctccccgttgggttaaaaactgactcagtatttgtgaccaggtcatagaatcagagcaaaattgtttattatatcttgcaaaataaaataaatgatagcagttgtcatatatattttaacttgttggctaaaaaagtttgagttgtttgttaaattgaagaagatattgttcatgacagtaagggaaattgtttaaagtcagacttgttatcctgaatataacaaaaaagatggctgtttggctcagtaacagaatcgtaaaaaaaaaaagattgattttaaaagatactaaagaaaacatcttattctttatgtaatcttagcatcatgtttgtaaattttaggcatagtataaatctttagaaaatctcttgagtagggccgggtgcagtggctcactcctgtaatcccagcactttgggaggccaaggcgggtggatcacctgaggtcaggagtttgagaccagcctgactgacatgctgaaaccccatctctactgaaaatacaaaattagccaggtgtggtggcgcacgcctgtagtcgcagctattcatgaggctgaggcaggagaatcgcttgaactcaggaggcggaggttgcagtgagctgagatcgtgccattgtactccagtctgggcaacaagaacgaaactccatctcaaaaaaaaaagggggggagcagcggggccaggtgtggtggcttatgcctgtcatcccagcactttgggaggccaaggcgggcgaatcacgtgaccaggagattgagaccatcctgactaacacggtgaaatcccgtctctactaaaaatacaaaaaattagccaggcatggtggcgggcgcctgtagtcccagctacttgggaggctgaagcaggagaatggtgtgaacccaggaagcagagcttgcagtgagtggagattgcaccactgcattccaacctgggcgacagagtaagactccatctcaaaaaaaaaaaaaaaaaaatctcttgagtatctttactctccttacgcttatttaaatgaatatgctctataattagtcttgtgctttttctggccaaaatataaaacactttcagaatttcttattttaattactgctggaccttaaaaaccaataggcattgcttaactgttgtctttttatgtattaataactataccttattaataatactaactgcgtaggtttttttttttttttttttttttgagacgtctcgctctgtcgcacaggctggagtgcagtggggtgatctaggctcactgcaagctccgcctcccaggttcatgccattctcgtgcctcagcctcctgagtagctgggactacaggtgcccgccaccacgcctggctaatttttttgtatttttagtagagatggggtttcaccgtgttagccaggatggtctcaatctcttggccttgtgatccgcccgccttggcctcccaaagtgctgggattacaggcgtgagcgactgcgcctggcccagtcttttttttttttttaagtagagacagggtcttgctttgttggctggtgtcaaactcctgggctcaaatgatcctcccaccttggcctccaaatgtctttatttttattacctgtaattttcttcttagagggatataacatttcttttagatggaacagattatatttacagtagattaaaaagctgctgtgttttagtcttcctttttcccctatactcgctatctaggtacatttgatcttacctagctgtccattctagtcaggagactcctgtatttgtatacatgatctcaggcttatgttctagtcctgtttttcagagtacttataggacatttctacttggattgacatctgcagcttgacttttcttatttttgtaagtgtatttgagatagactgagtgagatccaccaacttccacaatattcccacattacttccattcgttcactcatttgctcaatagaaagttaggaagtttctgctttgccaggcactgtgctagattctaggcgtaagacaagactcaatgtagtatagaaggtggacatgtaaagtgtgaagatcaaatgtgattaatgtggtaaaagaagtgcatgttttgtaatggagacccaaaagagggacttgcacccagttgccagtggttcgaaggaataaatgtgagttacacaactatatttgtaatcttttttctttttttttgtatttagacatgattttctaaaattggctgtatagtgtacgtcccctttttttttttttttttttatctgaggtggagtctcgctgtgttgcccaggctggagtgcagtggtgtgatctcagctcactgcaacttctgcctcctgggttcaagcgattctcctgcctccgcctcctgagtagctgggattacaggcgcccccccaccatgcctagctaattttttgtatttttagtagagacagggtttcaccatgttggccaggctggtctctaactcctgacctcaaataatctgcccacctcggcctcccaaagtgctgggattacaggcgtgagccactgcgcccagcctgcattcctttttaaaaaatacttggctgatcacagtggctcacccctgtaatcctagcactttgggaggccagggcaggtggatcacctgaggtcaggcgttcaagacccacctggccaacatggtgaaagcccgtctttgctaaaaacacaaaaattagccgggagtggtggtgcatgcctgtaatcccagctattcgggaggttgaggaaggagaatcgcttgaacccgggaggtggaggttgcagtgagccaagatcgcgccactgcactccagtcagtgcaacgggagtgagactccatctcaaaaaaaaaaacttacaaatgtttttctatagcaaaggacatacttccacatcatttttggctttggggttttcctatacaaggtttaagaggtcacctttgggaatttgagttgtttttggtctgagacatagtataattatagtcattattattatttggattaacataatgcatactttttttgagtaatggttaatgttgagttgagattattcacatcacatgtagctttatctctcttgttttttgagacagagtttcactcttgttgcccaggatggagtgcaatggtgcgatctcagctcacaacatcctctcccctcccgggttcaagtgattctcctgcctcagcctcccaagtagctgggattacaggcatgcgcaaccatgcctggctaattttgtatttttatagaaacgggatttctccatgttggtcaggctggtcttgaacctttgacctcaggtgatttgtccccctcggcctcccaaagtgctgggattacaggcatgagccactgtgcctggccttttttttttttttttttttttttttttttttttatgggacagagttttgctcttgttgcccaggctggagtgcagtggtgcgatctctgctcactgcaacctccgcctcctgggttcaagcaattctcctgcctcagcctactagcagctgggattatagatgtgcaccaccacacccagctaattttttgtatttttagtagagatggggtttcatcatgttggccaggctggtctcgaactcctgacctcatggtggtccacctgcctcggcctcccagagtgcagggattacaggcatgaaccaccatgcccggccgctttatatctcttaaaaatgttctgctatcaaactttttttttttttgagacagagtctcactctgtcaccaggttggagcacagtggcgcgatctcggcttactgcaacctccaccttcctggttgaagctattctcctgcctcagcctcccgagtagctggtattacaggcatgcgccaccatgcccagctaatttttgtatttttagtagagatggggtttcaccatgttggccaggatagtctcgatctcctgacctcgtgattcgcctgcctcgacctcccaaagtgctgggattacaggcgtgagctaccgcgcccagctttatcaaacttatttacaaggataattgttttgataaggagggtactatgaaatagttttatttcatagcatgtattaaccccggggccttgactccttagaatctttgaatctatgctgtagtgggcctactttttctaatttggaagttatatattttattgaatatgtatgggcttatggtattcatttgaaaaataattaggtttgcttgtttctgaatttaatttttttactaggggaattttcaaacacaccttaaagcagaatagtacaatgactctacatgtgtgttactcagctttgaacagttaacatacaactgagcaggtgtacttcttatatgaattgtagaactatatatacttcataaatatcgatatgatatatgtagtgatagaatataaacaaatttaattaaaagatctgtccaggctgggtgtggtggctcatgcctgtaatcccagcactttgggaggccaaggcgaatggatcacctgaggtcaagaggtcgagaccagcctggccagcatggtgaaaccctgtctctacaaaaaaaaaatacaaaaaattagctgggcttggtggcaggcacctgtaaccccagctacttgggaggctgaggcaggagaatctcttgaacctgggaggcggaggttgcagtgagccgaaatcgtgtcattgcactccagcctgggcgacgagagtgaaactgtctcaaaaacaaaacaaaacaaaacaaaacaaaacaaagatctgtccatactttattgtgggtacattaattatactttttacttattccatgctaattctaatattatgttttttatttatagaatattttcaccaaccacactttggatataaatgtaaggtggcttgctgtactgtattttaaacatggaattgatcgctactggagacgtgtagcacctcagtaagttccatcacttcccctattccttgagtataatccttcccaaattcaggaaggtgtaagaatacttgtttatgtaaaaggatgtgttagcgcttacttctgcagcacatatactaaaattggagcaatacagagacgattagcatggtctctgtgcaaggatgatgtggagatttgtgaagtgtttgatatttaaaaaaaatgcaaaaaaagtgtttactactgaataagtgttctatttaggtaatgacaaatcaacagctatattattgttttcttcatggttttccatttgagtgtgtgtgtgtgtgtgtgtgtgtgtgtgtgtgtgtgtgcgtgtgtgcgtgtgcgtgtgatgttggccctctgcttgcaaggatcatgctgagtcagtcatgttgaacaaaagccctctgttttagtcgtacccacttaaaaggctgaggcaggaggattgcttgagcacaggagtttgagatcatcctgggcgacatggagagaccccatctcaagaaaaaagaaagagaaatataaggttaggatttggaagaaaaaaaaagccattcagaaggaaatcccaggtcaactctgaaccagctaggtgttaatttctgagtcttatgcattctttctctatggtgggaatggagtagtatacatttgtaatcacattagtattcagttataactgctatgtacgtggttaacagatttagtagttaattttacatgttatataatcaatgcaaaatcattgtagacatgaccctgggatttgtttgatagaaaatatggtagtgaattttgcttaagaagtaacataatctgtgttttccagtagatggcactatagctctctaaattcttaaaagccgtaagaccttttttctcagtctgaatacttcaaaatgcatataaaacatgtccttgaataatattggaaacaacaagaatattttcaggctgcacttgggatactatattacggtttaaagcagacatgtctttttcttttttttttttttttgagacggagtctcgctctgttgcccaggctggagtgcaatggcatgatctcggcctactgcaagctctgcctcacgggttcaggccattctgcctcagcctcccgagtagctgggactacaggtgcttgccatcttgccccgctgattttttgtgtttttagtagagccagggtttcactgtgttagccaggatggtctcgatctcctgacctggtgatccgcccgccttggcctcccaaagtgctgggattgcaggtgtgagccactgtgcccggccggagtaattttttacataggattaattcataattttggagagaaatatggtaagtagtgatgagaaaatgtgcattatttgtttataggcaatggcccagcagcacttttctactgctttgtccaattgaattttacgtgtctgctaaaattcattttgttttagtggttatataaaggatacaattataaatgcttgtcttggctgggcacggtggctcacacctgtaatcccagcactttgggaggtcgaggatcacctggggtcaggagttcgagaccagcctgcccaacatggcgaaaccccacctcttctaaaaatacaaaaattagccaggtgtggtggcggatgcctgtaatcccagttgctggggagggtgacacaggagaatcacttgaacctgggaggtagaggttgccgtgagccaagaacgtgccactgcactccagcctgggcgacacagtgagactatgtctcaaaagagagagagagagacatatatatatgtatatatatataaacatacatataaatatatatataaatgattgttttgaagggaaagtaaattattaaatatttcatgttgtacttttacataatgaattagaacctagaatttagcttaaatttaaaaagttatgagataatttatacaatattaggtagttaaatcccaagctgtctcttttagtatatattgaaataaaagctggaaaggagaggatgctggagcacgagtggcagtttagtaattgaacttataaacttaagactttttaaaaagatgcttgtttctgtacttatcagtttcattttatatagatcctactcttaaccattttcacagaatgagaattaactaacaagcttgttaccattaccatatacattgcagtgtatctgggtcctaattaattaaatactgtccaatttctgcttgacatatagtttgaattcatctaatgataacatgcataaaattaaaggtggaatgttaattattattagagaattgttaaagatgtgaattttcttcaggttaatggcttgtttctttaatatgtatacaatccctgacttatggttgtttgatttg

SEQ ID NO: 355 - DNA, 32744 bp, Homo sapiens
  source 1..32744: mol_type = other DNA
gcagaagtccggggctggcaagcgcttcctgcgcagcgcctaggcgacctggagtttgtgacgctgtgatggtaagacctgggccggggaggttgatataacggttgaatcttgtggagctccagtcctgaaggtgaaacccttatcgccggccaactagatacctgacttcccagccgggctttgagtcccgttcttctcggcttcccgcgcgccaacgcaagctccataacctcaccaatatttagagaaagatggaagggtggggacagaaggaagtggttaactcgcgggtttcctttcagatgcactaaacatgttttctctcctgacctttattctctcacacactctctgaagaaggtggtgagtgcttgttactgtttctgggggtggggtggagaagcagctacttcaaataaccaaaagacctagggcagaacgggtcactcttctttcttctctctggtataggatttcatctcctagcagtcatctgaactctttctcctcctcctcatctgtcttcttcatttttaaaaaattaggtaaaaagcacataacataaaatgtattatcttaatctcttttttaaaaaatcaaatacagcttgtcaaaatgacctccgtaaaacacttcttttttctctgcaattacttttgcaccaacctaataaaatcctcgtcgtaaatctcttctctacttttgccttgagataggcaccacgtacagggaaggaactgcccccccatagtaggcactttattttatttcaaaggttcccattatttgaccattctacctagcaagtctcatttcttctctgccctctgctctcatcagactactttcttttgtgtctcacaaatttcccttgttcgttcttgcctcctactcttatgtttttatgcttgaaagcatctccacagcgatttagccttcatgtttacagcttctcatctttcagagaccaatgcaataatgaggatgaagatgataatgataatgataataataatgtagctagttaacatttattaagcattattatggactaattccttccgggttggtttttctaagcttccctatcctgaattccgatagtacttgcaggcagtgttgtatactttaccatttcatagcacttctgactacctgaaatcatatcatgtatttagttatccattcatttatattgtctgcatgagaatggaagctctacaagtacaaagactttttcatctacacagctaaagccagtgtctgaccaatggcacacattaacatatttgttgaataaatgaatgtattttagaattatgtgggtattttttgcttatttcatgtatattaatcttttcccaattaatagtacgagtttctttaagtatagtattatccctaaataaagagatactgtttttcttcaataaatgattaagtattgtagtcctaactggggacctcaaaaagttgacttgttccctttccaggaagataggtttaaggatacaaaatgtgggaacgggaaaagttcaactcttaagtgtgtgtgtgtgtgtgtgtgttttaattaaacaactgaaatttatttctcacaggtctagaggctggagattcaagatctgggtgccatcattttctggttctgttgatgaccctcttccaggttacatacagcttacatcttgcatcctcaagcggtagagagcaaactcttaaatgtttctatatgtttttattctactgccacattaaatcgccaagccagataatttgttgaatatttatccctcaccctccgcccccaccacatgtgcagagttttgcattacttttgcatattgataatgtattttggtggtcagtaaagaaatatttatgtttgactttttcgcttaaaaatattctaaaattcatgatgactgattttggctttgtgaacttaaactgtatcttatgggtatagcaggtgagattttcagccttctactagttgacattcaaattgttaatagctaacactgataaagctctttatatgctagctacagtacttatatatatatatttatatactcatttaattgtcataaccctagggagtatttaatattatcttcattttataggaaaggaaactgaggcatagaaagtttaagtgacttgcccaagtctcatagcttttaaatatcaaaacagatttaaacctgtatagtctggttgcagagttcatacctttaaagtttttttttctctaagtaatgtgccagtaaacataattgtatagacttatgcagacatatctatctttaggattattcctaagaatagaacttctggatcacaagaaatgcatgtaaaattttgatggatattatcatacaaagtgattgttccaccaacagtgcaagcctcttatttcacatgcttgccagtattatctcttaccaattttacattattgccattctgaatgaaaattaatgcttgtttaatttggattttcataaattatatatgagcttatgaatgtactttttctgtatttaaaaggtatttgttttttctttgaattcctcatttgtgttctttgccagtttctattgaattgtttttgttgtttacctttttattgtaaaaatgcagacacaaaataaacgtaaagtttactaattattatgaggtgaacacccttaccatcatgctagtcaaaaaataaaactttgataattacctcagaaatctctccatttggcccatcccagccacaacccttttcccccttccactcttcctccaaagtaattggtaacctgacttttttggtaatcttttttaaattttttttaatggtgagttgtttggtttcttcttatgaatttgtaggcacttgttatatattaaggaaattaggtcttgggttgccatatatattacaagtatttctcctaggtttgggggttttaaattttaactttgttgatgagatgtttgtccatgcagaattaaaaaaaaaattttggtgtaaagattttacttagttttgcttagaaaggtgtttcctaatctaagattttaaaagtttctgtgttttcatcctatttttttgtgatttctattttgggttttttgagggagtgaggaatgacataaagattcaggtatgaatttagacttatttttttctccgcaaatactataaatgttaaaaaaaaatgaggaagatttatatggaccaaaatatacatttaaaaaacagtattatatataaaatatgtatctatttggattatttttttctccttgatttgccttgtcatctctgtcatgtgtcatgtgtccatatgtatgtgaatatagaaagtcaagaaaggctttgtattgtgttccattgctcaatttgcctatttatgtgccagttctacattgccataatagtgtagggtatgtcctcccatcttatttttcatgaggatcttaggctagttttggccctttgtgcttccatgtaaatttttttttttttttttttctgagacggagtctcgctctgtcgcccaggctggagtgcagtggcgggatctcggctcactgcaagctccgcctcccgggttcacgccattctcctgcctcagcctcccaagtagctgggactacaggcgcccgccactacgcccggctaattttttgtatttttagtagagacggggtttcacccttttagccgggatggtctcgatctcctgacctcgtgatccgcccgcctcggcctcccaaagtgctgggattacaggcgtgagccaccgcgcccggcccttccatgtaaattttacaatttgcttgtcaagtcccataaagagaaacaaaaactttcaggattttggttaagattcagtagctcaacttgggggagaattaacgtctttacaatgtgggtctttcagtccatgaatatgaagtatctttccatttatttaggtctgccttagaacttctctgttaataagttattgattaagcagtataaaatgcagaagttccatatgaataaagatattgaggaggggtattctgatttgcgtttgatgtggggtagacatcctcatcattctttattgcactgtctacctccttaaaattgcccagttttgaatcttatgccaccagactctaatcctcttccattctttgcaggaatcatctagcaagattgttttactcaccctcattccttgaagatttttagctcctggctcattgccctttgcagtactactatcataattcttagtgattttaatatccttatagatgatccaataacttggcctctctttttcttgaccttctttcccctagtgattatgttctctcttgtcttagctacttattcctatggccattctttcactttgtccctgtctgtacctgtggtgctacaccatagaagaaaacatacaaccatgctctggttttactttaaactcatgatactaatctcaggtgagcctgtaatgctactactgaataatcctgtaactttatcctctcccatttttttatatatctgttttatacatctcttttcctgtgctcttaaactcgcagtactttcttcccatcctttcatagctgataaccgtagttaccattttacggagaaaagagaaacaatccacatagaatttctacaagttcctagcaacacgtctacttacctacctgcatctacactcttgatattctgatgaccctcccattaaaatggatgaactgcatgtccatttatcttaagccaacacctctacttatgtactagatcccattctttcttctcccctttctctcttgtattagcaacatttccttcttttactgtaccgtataaagatgctatattttctcccatctttaaaaaagaaaaagtctcttttaaccctatatctccctccagctactaactgtatttctctcttgtgctttaaagaaaaaaaaatgtgtgtgtgtgtgttttctttttgtttgttttgtttgtttgtttttggtatggtcttaacggtcttgctttgtcacccagggtggagtgcagttgtgtgattgtggctcactgcagcctcagtctcctgggttcaccgggctcaagtgatcctctcacctcagctcctgaataccttggaatacaggcatgtgctgccatgcctggctagagaaaacgttcttgaaaacgtttcatatacttaatatttttaattccttgccttccattctttcttgaatccactccaatcagatttttattcttgccattcttctaaaactactcctatgaaggttatctgtggccttcatttttgtatgtttactccaagaaaattgttgtgataaattaccccagaatgtagaggtgtaaaacaactatttattacgctcatgagttttgtgcattagaaattcagacaagacacagcaggagcagcttctctgttccacagtatctggagccttggctagaagatcaaagcctaggggcttaattgtcagaaatgatcgtgtgtatgtctgggagttgataccagcgtttgtctgggaacctcagttcctttcctcatggactttatgttgatctcttccttttgtgctactttgggctttcgcataacatggtgcctgggttgcaagggtgagtgttccaagacacagaaagccagaagttagctatattgccttttatgacttagtcttgaaagtcatgtggtgtcattttcattgtattctctttataaagacagccacaaagtcacactcagtttcagggggagaggaaaaagactctgtctcttgatggggaatgatgaaatattgctgtgagtatttttagaaaaaacagtttgctcctctatattactaaataaattgtcaattctctgtaatttacttgacctgtctccagtgtttgacagttatcattccttccttgaatacattcttggatttcagggtatcatgctcttgattttcctcttaacttactgagtgctccttctcagactattcagttggttcttacctcaatagctcctggcctgaagatcttctcatttctagctgcacactcttccttttcttatttcacctatcctcacaactgtaagtacagtcatgtgtcacttaacaacggggatatgtgttgagaaatgcattgttagatgatttcatcatgtgagcacaaacctagatggtataacctactacatacctaggctgaataccgtaggtaattgtaacagaatggtatttttgtatttaaacatttctaaacatagaaacggtacagtaaaaaaaatggtatgaaagacaaaaagtggaacacctgtctagggcttttaccatgaatgtagcttataggactagaagttgctctagatgagtcagtgagttgtgagaagatatgaaggcctaggacattactgtaccctactgtagactttgtaaatactgtacacttaggctatactaaatttatttttttaattattcaataataaattaaccttagcttgctgtaagttttttgctttatctttttaattttttaacatatcaactctttcataaaaacagcttaaaacataaacatgttgtataactgtgcaacaatattttctttctttttttattttctaatttagagacagagtttgtctctgtcacccaggctgaaatgcagtggtgtgatcatagcttactataaccttgaactcctggactcaagcgatcttcctgcccctgcctcctgagcagcttgggctacaggactgggccacctcacccagctaatttttaaaatttttttatagagataggggtcttactttgttgccaggctgttctggaactcctgaactcaagtgatcctacgaccttggcctcccaaagtgttgtgattacaggtgtgagtcactgcacctggcatattttatgtctttttttctagctaatttatttatttttattttttacttttttaatttctttgttaagaacgaagacacaaacacattagcctaggcctaaggcaaggtcaggatcatcaagacatcagtaggcaataggaatttttcagctccattggaaccactgttatatgtgcagtctgtgattgaccaaaatgtcattatgtagtgtgtaagtcttatctgtgtgatgatggctgtcaaattcatattgctagctcaaaactttgctttcaactgcagacatgtatatctaattgcttaatcagcagctccaataattgacacctcaaatgtagcatatcctaaactgagtttttaatcagcacttctcccatgtttgccaaatctgtttcttttaccatctttctcacctcagtaactggcaacgtaataattcacttctctctgacagtccatatacatgctgttaagaaattctgttggctccatcttgaaaatatatccagaatgggacattctgtgctgcttctatcaatattatcctggtctacatcttgcttgggtcattgcagtagctttctaattggttttcctgcttctatccttactgcctgtagttaaccagagttgtattgttaaaatgtaattcaaatgattcattcctctgtttaaaactaattgcttatcatctcaaagtccttaaaatagcctaccaaacccacatgatctcatccctattgtctctctgacctcatattctactctgtcttacttaatctgctgtaatcacaccagctccttcactactgtggaaacatggcagtcatattcctgcatcaaggcctttgcacttgcagttccctctgtctgaaccctctgcccctcttcatccttgacctcatttctttatcttcttcatgtcttcttactcagttgtcaatttctcagtaaccttatatgaccaccttatttaaaattatattgtccttgccctagcatttcctatgtttcttccttgtcttttctccatggcacttataaatcatttgatatactacagtatatatatgttttattttttattttattgtctgttttccttacttagaataaggttcacggtaggagggatttttgtctattttgttcattgctatattcttaccccctagatgagtatctggcaggtaataagtgttcaaccaatactgctgaatgaataaatattttttgctttagtttttcttataaggctaaaaattcacaaagcatatatcaatgaatcaggaggatctagatccggatagtactacagatgtgggagatgttacaaatactgaagaagaacttattagagaatgtgaagaaatgtggaaagatatggaagaagtaagtttcaaaagatagaagtgatagttaatataagatttaaatcaacttcaataataaatagactcaggaaagaaatgattgtgctagtttccaaaagccattatgtatgataaatatttatatagcttttagacctatcagcattcattcaagaaactttacactagatgagctatagaaagaaaaattttgacaatccatgctcccaaggagattacaatcttatggaaacaacagccattatattatgttgtaatacaatattagatgtattgtagaagtacaaagactatacttagcaggagtgctaaacccggtgaaggggtcaaggatagctttctgaaagaggtaattactgggccacgcctgtaatcccagcattttgggaggccgaggctgggggatcatgaggtcaagagattgagaccatcctggccgacatggtgaaaccccatctctactaaaaatacacaaattagctgggcacggtggtgtgcacctttagtctcagctactcgggtggctaagacaggctgagacaggagaattgcttgaacccaggaggcggatgttgcagtgagccgagatagtgccactgcactccagcctggtgacagcagagtgagactccgtctcaaaaaaaaaaaaaaataattactggtttcatttctaaaggataattaggagttagcctgtaaaagtagaagaggtatacaaagcataaagaagaaaatgtgtaaaaacagagagttgacagaacattaaatagaatgttatggataatgtaaattaggagaaggacttctggggtaagactggagaagtaatcagggaccagaacataaaggattttgttgagtgtgtactatggggagccattaaaagattttaagtatggaagtgacatgatcagatatgcggtttgggaaaattactctggtgtttttgaagaaaatagaatgcagaagagtaagactacagatagaaagcatttaggaagctctagtaatagtcctggtaaaaagtaaggaagccctaagtattgccactgcaaatagaagagtggattcaaagataagtaggtaggattagaagttaatttatgtgcaatgggagggaaatatggttagtttcaggttcctggtttgggccgttgggtggttgatgggattatttccccaaatagagaatatagaagtgggaagaacacataattatgagtgaaaacattaattaatttagaaaatgttgtttgaaatatatgtactttttctaagttggtgagatagaactgcctttggtacactagagtatgttggtgaaaatttgttctacttaaggcaagcttgtccaacctgcggcccaggatggctttgaatgcagcacgacacaaactttcttaaagcattatggatttcgatttcttttttttttttggctgatcagctattgttaatgtattttatgtgtggcccaagataattcttcttcttccagtgtagttcagggaagccaaaagatagggcacagatatttttagcatcctattcttcccagtaaagtttcagaactggtcaaattagtgaggtttttctcttttcttacaattatttttaacataaatacttggtactttatattattaatgtattttcaggataatttttataatccccccacctttttattttttgcttcaggtattttttcagtatagaagtttggattttaaaatgacttaaaatttgtatagagaaatgctgcattacaaatgagcagaaatagaatttactcgtatttttatctcatataatcatcatgaacagttttggacttttttaatggcacagaaacaatgtctcctgaaggctttatttattttcttaggatttcttaggatctgaactatcttcttacttgttatttttctatagtgctttccctcttatttttttatctcccactttccaattatctgacttataattcattctagctattagtttttgggtttttttttttcctcttcattctagtgtctctttttacttgtgatgtattcaccttgggacttgtttggctgccttaatcgtcttacatagtgaggaatttcaataaactcttctccatcagatgtttgtgctttagaagagtgttatattggcctggtagaaaaggagaggggaagggaattttctgtgaattatcgtgtgtgacttgcctttttttactttttaaatcaagtgtcagaataaattatcacttattggaactgaaacactcaccgattcaaatgctcaggtatgaatctttttcttcctaaaaaatacaaggtaagtggaattaattgtattttggaaaataaatatgtgtgtctgtatttttctcaagtttaatacctttgttaatacctgtatgcttaatcatttggaaaacttcttactcttcctgctttaagaattgaaagaatattctaaaaactttctagaacaagctattataaataagagagtattttctttattatttgtcttttagcaactatacatatatttaacaactgagtaaattgcttgttagttgctattacgctgccttgttaaaattagaacaaagaccagcctggcctacatggcaaaaccccgtcgctaccaaagtacaaaaaaattagctggtcttggtgatgtggtcatatgatcccagctactcaggaggctgaggcgtgagaatcacttgaacccagtagatggaggccgcagtgagctgagattgtgccattatactccagcctgggcgaaagagtaagactgtctcaaaaaaaaaaaaaaaaaaatagaacaaaggcggctaactttgtgttaggtataatagtcacagatattttactatctgtgtcgaatctgaattgattttactcttggcctaaaaaaaggactgacattcattataataatcagaattatggaattgctgtaggaatagatcagtggatcagtgaaacagattaagaattaaaataaagttgcctctggagcagcgtgagagttagggatgccacccccctgcaaagttttaaaatattaagaatgtttatattttcatctatgaataggtatgaatagtccacagaaaatgactttgttttcttcttttgtagctatcattgttaattatgcaagtaaaatgtttaaccgctgaactcagtcaatggcagaaaaaaacacctgaaagtaagattcttattttaaatttgaattttttgtaaacctattaatagcaaattaatttaataattgtaggaaaaattacaagatccatttggcctttttgaaattgcccaaatttcattgataccgagaagccactttttttctgtgaattattttgtacttcttttattattattgataaacatatcttacattagattataataagcttgattatggagacgttattatagctattatgttatcctcatagacactgccttatgctcgctagaaatggtaaattgttcctttttttttttttttttttttttgagacagggtctcatcgtgttgtccaggctggagtacagtggcacaatcatggctcattgcagccccgatctcccgggttcaagtgatcctcctacctcagcctcctgagtagctaggactacaagtgtgtgccaccatgcttggttagtggttggtttttgtatttttttgtagagacggggtttcaccatgttacccaggctggtcttgaactcctgggctcaagggatcctcctgccttggcctctcaaagtgcctggattactggcgtgccagtgatttgtttcttaatgaatgcaatttacctagtggaagagaaaagttataatttattttagatacttacacaaaagggacacatagtttgtatgtcttctgtcttgtccagctggtgccaactatgtttttgtcttcagttaggaagtagaagacagcataaaaatttataattgtgatactccactagtacatcttttttttttaaatgtgagagcttaagtttctctatgcaatatacatctatacaggcacatctcattttattgtgcttcactttattgcactttgcagacactctatgtttaacaaattcagtttgtggcgagcctgtgtcacattttggtaatctcacagtattttagacttttaagtcattattacatctggttgggggatctgtgatcagtggtctttgatcttactattttaattgttttgaggaaccacaagctgcacctgtgtaagacagtaaatttaaccaataaatgttgtgtgtattctgactgctctgctgaccagttgttcccccatctctctccctctccttggccctcccttttccttaaaacacaagaatattgaatttaggccaattaataaccctccaattgtttctaagtttttaagtgaaaagaagagttgcacatcgataactttaaattaaaagctagaaatgattaagtttcatgaggaaggcatgtcagaagccaagataggccaaaagctaggcctccggcaccagttagccaagttgtgaatggaaaggaaaatttttttttttttttttttttttttgagatggagtcttgctctgttgcactgccctcaggctggagtgcagtggtgtgatctcggctcagtgcagtctctgcctcctgggttcaagtgattctcctatgtcagcatcccaagtagctgggattgcaggtgcatgctaccacacccagctaatttttgtatttttttattagagacaggtttcaccatgttggccaggatggtcttgatctcctaacctcgtggtccacctgcttcagtctcccaaagtgcaggaaaaatttttaaaggaaattaaagatgttgctctagtgaacacacaaattatgagaaaacagaatagccttattgctgttatagagaaagttttactagtctacttagatgatcaaaccagccatcattccctaagccaaagcgtaatccacaacaaagccctagctcttttcaattctacaaaggctgagagagatgaggaagctgcagaagaaaagtgtgaagctagcagaggttggttcatgaggtttaaggaaagaagccatctccataacataaaaatgcaaggggaagcagcaagtactgaggcagaagcgtcaacaagttatccagaagatctagctaagatacttgaaggtggctatgataaacagcaaattttcaatgtagacagaacagccctctattggaagaagatgccatctaggactcttatagttagagagaagttgatgcctggctccaaagcttcaaaaggacaggttgactctcttgataaggactagtgcagctggtgactctgagttaaaaccaacactcatttatcattccagcaatcctagggcccttaagaattataccaaatctactctgcctgtgcattgtaaatggaacagtaaagcctggatgacagtacacctgtttatagcatggtttactgaatagtttaagcccactgttgagacctaccactcaggaaaaaaaaaaagattcctttcaaaatattactgctccccatctcttcactcaacagctctgatggtgatgtacaaggaatttaatgttctcatgtctgttgatgcaacatctgttctgccgcccagggaccaagaagccacctcaactgaagtcttattatttaagaaatacacttcgtaaggctatagctgtcataagtcctctgatggtctgggccaaagtacattgaaaccttctggaaagtatcccccattctagatgccattaagaacatgtgtgatttatggaaggaggtcaaaataacaacattaacaggagtgtgcaagaggttggttctaaccctcatggatgactctgaggggttcaagtaactacaaatgtggtagaagtatctaactagaattagaagtggagtctgaaaatgtggctgaatgactgcaatctcatgataaaacttgaacagatgaggagttgcttcccatggatgagcaaaaaagtggtttcttgagatggaatctactcccagtgaagatgctttgaacacggttgaaatgacaacaaaagatttagaatattacataaactttgttggtaaggcagcgtcagggtttgagaggagtgactaattttgaaagaagttctgctgtgggtaaaatgctatcaaacagcatctcatgccaccgagaaatgtttttgtgaaacgaagagtcaatcggtgtggcaaacttcattgctgtcttattttaagaaacggccacagccaccccaaccttcagtagccactaacctgatcagtcatcagccattaacactgagataaggccttccaccagcaaaacattacaactcaccgaaggctcagattaggcatctcagttagcaatttttagcaataaggttttttttaaaataaggtatgtacatttttagaaataatgctaatacataatttaatagactacagtataatgtaaacaacttttatatgcactgggaaaacaaaaaatttgtgtgacttgttttgttgtgatatttgctttagtgtggtggtctagaaccaaacttggactatctccaaagtatccctgcatatgatattctatttggattgtaccctctttttctgtatgtcttcctgcttctttcttctcccgctctgttttctttcctttaattgttctccaccccatgcttcccttcttagtcttctttgtaggcttatcatttctctttcccaattattgaaattccccaggctgggcgctgtggctcatgcctgtaatcccagcactttgggagaccgaggcgggtggatcatgaggtcaggagatcgagaccatcctggctaacacggtgaaaccccatctctactaaaaatataaaaaatttgccaggtgttgtggtgggcgcctgcagtcccagctacttgggatgctgaggcaggagaatggcatgaaccaaggaggcagggcttgctgtgagccgagatcatgccactgcactcctgcctgggcaacagggcgagactccatttcaaaaaaaaaaagaaattccccaaggagcaatcttcagctgttttctcctcattctcttcctatacaattttatccatattcttgctttaatgactgtcttcatgccaatgtcagccatttttccacatcgttgttactacctgttagtcattaatttgagcatttctaataggtgtgtagtattacaattgtgattttaatttgtcttcaaccgtatgtcttattgcctttttagtagtatatttagcatctcaaaaactgctcatactcaaaattttttttttttttttttgagacagtcttactctgtcgcccaggctggagtgcagtggtgcaatctcggctcactgcaagctctgtcttccaggttcaagcagttcttgtgcctcagtctcccgagtagctgggattacaggtgcctgccatcatgcctggctaatttttgtatttgtagtagagacggggttttgccatgttggccaggctgatctcaaactcttgacctcaggtgatcctcctgcgtcagcctcccaaagttttgggattacaggtatgagccaccacgcccagcctcaaatattaaaatgttcaagttctccagaggaccctataagctataccagcattatatcttcttctcctgtttttatgtgttatatctgtaataataacttccatatgttcatattctccagaggacactatatactataccagcattatatcttcttctgtttttatgtgttatatctataataataacttccatattagtatactagagctatcataacaaactactatggactaggtggcttaaacaacagaaattaattttctcacaattctggaagatacaagttaaagatcaaggtgtcaataacgttggtttcttctgaggcctctccccttggcttgcagatgtccatcttcttcctgtgtcttcacatggtcttccttctgtgtcctaatcgcctactcttattaggacaccagtcttattggattagggtcaactctaataacctaattttaacttaattatctcttgaaatacccaattccaaatacagtcatattcaaaggtattggggattaggatttcaacataggaatttgggggtggggacacatcaaccaataacaatttacaaatctatatatttaaagcagacttctctgcaatatcaaactcaagtatctttgtacctcctaggcaccttttccaaaatatttcatagacacctcagattcatgaactgaccttttctgtttcctcactcattgaatggagcatatttgatcagctcccaatttaagagtcctcctagattctttttcattttgcacatacagcatatttgttaaaattagaacagccgggtgtggtggctcacgtctgtaatcccagcactttgggaggccagggctggtggatcacctgagcgggggggcaggggagaatagaacaaaaacattagaactagaacatataactagttactaaatatcgagtcctactgtcacagatttacttcgggttttcatcaccagtccattagattattataacagactttttaatctcttggcctcaatgggtttcccccaccctggcaatgatagaagttttcaaacttaaagaaaagttaaaaaatacatatatagagagttaactgtagtaaactcagagaccagattctacagttatcaacattttctcaatcttgttttaggcttttttggagtggctttatataacatacatttattatctcacaatttctgtagttcaggggtctgaggacatttattatttcccagtttctgcagataggagtctggacacagcttaactgggtcgtctgcttagggatttcatggctgcaatgatagattctcctcaaaggcttgaggagggatccatctccaagcttactgaagttgttggcagaatttatttccttgtgactgtaggatttatggtagctttagtccatgtttttgttctttctattgttcttccttcctgatcttctaaaattccttttattgtttctgtttcaagaacttccttgagccgttcttttagagttggtctgctggtgacaaattgtcgtagtttttctttatctgagaatttcttgatttctctttcattcctgaaggatattttcactggatgtgcaattcagggttgttttcttttagcacttaaaaatgtgccacttacctctgcctcccttggtactgatgagaaatgtgctgtcattctgatcggttttgctttatagagaaggcgtgtgtgtgtgtgtgtgtgtgtgtgtgtgtgtgtgtgtgtgtgtgtgtgtgtgtgtgcgcgctttgaggactttttctttgtcttcagcctttagaagaataattatgttgtaccttaacctggatttctttggctttatcttacttaggagtcactcagattcctgaatgtgtggatttatgtcttttgcagaatttgagaactttttagctatcatttgatgtattttttcagcaactccccccacctttctcctttcctggaattccgataacatgaatgttagaccttttgttacggttacccaagtccctcaggttttgtttagtttaaagaaaattttttaattgtggtaaaatataaaatttacaattttaaccatttttaagtgtatagttcacagtagtgttaagtacattcacatttttatgcagtgtatcttcagaactttttcatcttgcaaatctgaaactctatacacattaaacaacaactctccttttccatcatcccccagccctggcaacctcaattctactttctattaatttgattagtttagatacctcatataatggaatcatatagtatttgtgtttttgtgggtggcttattttagttagtgtaatgtcctcaaagttcttccatgttgtagcacgttagaatttccttccttttttaaggctgaatagtatttcattgtatgtatataccacagtttgcttatccattcatctgtcaacggaaacttcggttgcttcataatttcattactgtgaatgtgagtgctgccatgaacatggatgtgcagttctctttgaggccctgcgttcaattcttttggatgtctaccagaaatagtggatcatatgatagttctattttaagttttttgaggaaccacctatactattttccataatggtcacaccatatttcaatcccaccgacagtgcacatggtttcagtttctcaacatccttgttaacacttgttactttctgtttttttgatagtagctgtctgctgtggcctaaatatatcccccaaaattcatgttaaaacttaatcaccattatgatagtgttaaaaagtgaggtctttaggatgtgattagtgagcttcttatagaggttgaaggtagtatctagtctttttttccccttttgccttccactatgtgaggacacagcaagaagacaccatcttggaagcagagagcaaacccttccaaggcactgaatattctaatacaaacctatctatgaagcacatgtagaaagttcttccctgttagaaggctttctagaatagcagatacctttgaaagttttcagtagcctactatttgagaagtttcaaatagctcttcattagtaaaggaaaatttctagcataaggattgaacgcattaaaatttgctatacaaaattacacatttgtttctactcatcaggctggcaaaaattttagaagagtttgtaatatttcttgctgttttttcttcatagctcatggaaatgtctttagaaaggaagctgacattctctattcagattcaaagtacacatttcattctctgaaatttcatttctgagaatctgttctatagaaatgagagcaccagtacataaaaacgtgtataaaagtctgcttactgcatccttgtttgttatgactagaaactagacacaaagttaatctaaaagtgttcaatcaagagggcaatcactcagtatattatggtatattcattttggaatatcatgcagccattaaaagttatgaattagacctatataggtctaggtttccctgggggttttactgagtgaaagtaagatgaatataatatgtgtgatatgaccccattcttgtaaaaccaatgatgataaaaataacccttttaagtgtatgtaaatgtatgttacatatgtgtacataggatatatgactacagggaaagtatttgaggaacacactatagattattagcttcccttttgagggtttgaagaacaaaagaagaaaagaaaaaggcactaaacagtacataaataggatcaaatttatctaaaattatatatagttggctatatgtgcaaagatgttaaaaataaataaaatgaaaactgcacacatttcgtaaaaagttgtgtattgtcaaggcaggtggatcacttgaggtcaggagttcaagactggcttggccaacatgatgaaatcccatctctactaaaaacacaaaaattagccaggcatgttggtggatgcctgtaatcccagctactcaggaggctgaagcacgagaattgtttgaaccagggaggtggaggttgcagtgagccaaatagcgccattgcactgcagcctgggtgacaagagggaaactctgccttggaggggagaaaaagttgtatattatataaatggagatggaaagaagtatcttagaaaaccgcaaaattaaattcttgatttttgagaattaactaaatatatgtgtaactttgttttgttttgtttttgtagcaattcccttgactgaagacgttctcataacattaggaaaagaagaggtaagccactcaatgaatttgtagtgaccccaaataatttctaactagatctattttagataagttcatggcataagaaataggataaaaccactctaaaaccatattaaattttctgcttttatttatgttttattgaacataatatttgattttttttttttggaaacggagtctcgctctgttgcccagtctggaatgcagtggcacaatcctggctcactgtaacctctgcctcccagggtcaggtgagtctcctgcctcagcctcccgagtagctaggattacaggcatgcaccaccatgcccggctaatttttgtatttttagtagagacgggatttcagtatgctagccaggctggtcttgaactcctgacttcgtgatctgcccgcctcagtctcccaaagtgctgggattacaggcgtaagccaccacacctggcctaaagatttgaattttgaactcggtttttgcatcagaactattactgaagttagtggttatatgtaaaccttaatctcatatctagtttttagttaaacttcacaataaaagcaaaatattaaacatcgcttaatgaccccatacatacatctctccttctgctgtggactaaatatttgtgtctcccaaaatccatacgttgaaatctattccccagtgtgatgatattaggaggtgagacctttgggaggtgattaggtgctgagtgtagggccttcataaatgaaattaatgcccttataaacgtctgaagagaccagtgtcctccccttccatcttgtgaggacacaactagaaggtactgtctgtgaagaggtgagccctcagtagacattgaatcttggacttcctagctgccagaattgtgagaaataaatttttataagatctccagtctgtagtattttgttataggagactgaatggactatgacagaaagttggcactgagaagtggaggtggtactatataacaaataccaaaaaattctgaagcacctttgaaactgggtgatcagtagtagaaggaagaattttgaaatgagtgcaaaggcctacattgctgtgagcagacctttaaaggcgattctggtgggaactgaggttataagagagctgtagagaaagcctcagttttcttagataataccagaatagtcctgaaaagaatgttggtagaaatatgcacagtattggccattttgataggtctcacctggaaagaaagaacatgtgtctaaggatagagaggaaaaaaacaaagtgtttttcctagtctccgtcaccactcaatacaacgtagcacctctggttaccaaaatgtgtggggaattctcaccagcaaccaattctttggcagattctgcagatgatgattctctcctacaaaccagttgggtgtcctcttaattcacttcagttctgacataatctacttggaggtaacatcagatcccacaggttgagcgctcagtcccacatgcctgaccccggtttcagataccagttgccagtaatggattgtcgcctgtattctgactggctataaatcaggggtttccatgatcccctcctcctcaggtttaattaatttgccagagcagctcacagaactgagagataaacttactttcatttactcaggtgtcataagagatattacaaaggatacatggctgggcatggtggctcacacctgtaatcccagcactttgggaatctgaagaggatggatcacttgagcctaagtgttcaagaccagcctgggcaatatggcaaaagcctgtccctacaaaaaaaataaaaaatcttctgtgtgtggtggtgtgtgtgtgatggtgtgtgcctgtagtcccagatacttggaaggctgaggtgggaggattgcttgagcctgggaggttgaggctgcagtgagccatgatcgcgtcactgccttccagcctgggcagcagagtgaaaccctgtctcaaaaaaaaaaaaaaaaaggatacagttgaacagccaaatggaaaagatgtgtagggcaagtcatggtggaagggacatggagtttccatgccatctctggacatggtactctccagaaacttgcctgtgttcagctatctagaagctccccaaacccagttcttttggggttttatggaagcttcattatgtaggtacgattgattaagtcatttgccattgatgaccagcttaactctcagttcttctcccttcccagagttttcaggggtggtgctgaaagtcctaatgttctagtcaggttttggtctttttttatgaccagcccccatcctgatgttactgaggggctcccagccatcagtcaactcatgcatatgaaaagataccacaatagggataaagaccaaatatatattttacaatatcacaatgttattgcacagtggagtaaatatcattcttattataaagaggcagagagctgaattgcattcctgccctagtgttttgtgaaagatagaacttataggaatgaagttgaatctttgaggaaatatttaagaaaagtattgaaggtatggcttggcttctcttgactgtatagtaaaatgtgggaagttaaaaatgacttaaattgctaataaaaaatgaagctgaatttaaatgtttgaaaaattgtcagcctatccctactgtaaagaatgagaaaggctgtttgggaaagaacttaaagggtgtggccaaatgaccatctgataaggagattagtcagccatctcaactgaagccaggtgctgttgttcaagacaatggaagaatgcaatgtaagggctacaggagtctgtgggaccttgggccatactgcctagcatgaactcattctctgcttcctatacttagactgtgttcatcagttgccccaggtgcagcttcagtgtgtctaggtgtggcagagactgcagtgatcacccttctggagggtcatatctcctccagggtgcagaaagtgcaagccaggggaaatggctggttccacctgggttttaaaggaaggagcctcctggcagagccttgagcttatgacctcagtccaggagagccatggtgcccaggcacagcgatactgtgagtgaagcacagacagagagctgctagagggccattttgccaagctgtgggaacaaggatgctcagagctgtgggtccccaaacacctgctcagcaaagctgcaggggcagagccacctgcaccctagtgggccttgaagacagcattgaaccaaagattattcttgggccttaagatttaatgtttaccctattgtgttgggagttaattgggacatgttaccccttctttcctatttcgttcttttggaataggaatgtctatcctatgtcgctcccaccattgtatttttgaagcccataacatgtttgatttcacaagttcacagttggagatcaatttgcttcaaaatctattgtactgtgaattttattcatttaatttaaatcatatttagatgagatgttagacttcaaacctttgagttgctggtagaataagttaagacttttgtggctattgggatggaatgaatgtatttttgcatgtgaggaagacctgaattttcgagttttaaatatgaatgtccagacaaggatcatagacactttctcaaaacttaaatgtcaataatgtcatgtttttaaagtgtcagttcataaggttaaaatatagaagagaagatggaagcaaacagaaacttttacaagttgtagagcatggaaagaggtaagtatgtgcctagagacagaaatcatgatgaaaagagtttgcccccacaaaattgaagaaagtcttgggatttgaaggaacctgttactgcaaaactcagagttcaagtgtggagctaaaatcaaggctatttctttaaagtcagaatatagatggttaaatcttcttagcttactgttgctaacttcttacctatatatctgagaaccggaagtatatgatatggagacattaaactagtgaggctcttgactcagggataccaggttgggtggttaataggggtggtgtgcaggtcgaaagtcagaaagatcaagttaacatttttattctgcatggtgtactgctagttccctccatcgctctgtctgcagaggtccctagttttttattttatttatgaaaaataaaacttacgaggaatgaagttgaatctttcgctgagaaaatatttaaacgaagtgttgaaggtatggcttggcttctcttgaatgtatagtaaaagtgagaagagaaaaatgacttaaagaaattgctaatcaaaaaagaacatagccttagacaggagataaaatattttgaaaagaaaatatttctaagtaataatatatggagtccccagtgaaaaagtagggtggccacacatcataaagccttattcataaacatagcattcatagtaagtttttgagttttaaataggaatgtccagacaaggatcatacacatctgtgaaatgtctccaagttgaaagacagaagttcaaaacaactgaacaaagatgagcctcaaggagagacacttcagggaaccaacgagaatttaaagaaataataccatccacaggataagaaaaaattttgatcccacaaaataacaatgccattttttttaaaaaggaccactttacaccgtctaggatggctataatcaacagacaataacatgggttggtaaagaagtacaaaaattggaatagcaatacattgctagtggcaatgtaaaatggtatactattttagaaagcagtgtggaaatttctcaaaaggtaaaagagtaactctatgtcgcagcagtttcattcctggatatatacccaggaggaatgaaaacatgtatgtatccaaacgaaaagttacacatgaatgttcatagcatcatttttcttacaggcaaaaagggaaaacaacctcaaatatccatcaattaatgaatgaataaaatgcaatatatcctaacagtgacacattattggacaataaaaagaaatgaagtggagatacatgctaaaatatggatataccttgaaaacatgctaaatgaaaaaagcccgccacaaaaaactgctgtcttagtctgttttcttctgctattgcagagcatcacagactggataatttatttttaaaaagtttattcaccggccgggcgtggtggctcacacctgtaattctagcactttgggaagccaaggtgggcagatcacgaggtcaggagagaccatcctggctagcacggcgaaaccccgtctctactaaaatacaaaaaaattagctgggcgtggtggcgggttcctgtagtcccacctacttgggaggctgaggcaggagaatggcgtgaacccgggaggaggaccttgcagtgagccgagatcgccctactggactccagcctggatgacagagcgagactccgtctcaaaaaaaaacaagtttattcacctatagctgagaaagtttatttaaaaagtttgttcatacatagttgtagggagaattgagcacatctatgcaactctactaggaaagaactcctgtaagcttctcccatgtgcctttttctttgtctgtattaatgtttcctctcactttaactccaacagaacaaagttccaactttttttaactgcagaacttaaaaagattgggaatctaagagcatggtgctgtttttggtgagggaaggccatcttactgtattatagcacagcaaaaggatagaaggtggaagtgaatacaagagacaggaaacggcagggctgaactcccatgacaactaacctattctggcaattatggcattaatcacttcatgagggtggagcccccacgacccaattgcttcccaaagaccctacctcttaacactgccacaatggcaaccaagtttctatagtcatggaaatgtaaataatgggtcaggaatgggaaaaaaggacagttggaataatagaagaaataaagctaaagtcgaattatgaaattttaccattataagttgcagaatattaaaaaatcgaaggcaagaaataataaaataaataatacatggacattttctcagaataaaagataattattctcccccccaatccctacatatatatatattttttctttgaaacaggttattactctgttgccccggttggagtgtagtaagattatagctgtctcatctcaaactgctggggtcaaatgatcttcctgccttagcttcccaagtagctaggagtacaggtgtgtgccaccatgcctggctaatttttttattttttatttttggttttttgtagagatgggatctcactatgttgttaaggctggtgttgaattcctggtctcaagcagtccttccaccttggcctcccaaagtgctgagattacaggcgtgagccactgtgcttggctaagataacgattctttacattgaaaaagatccaccaaatttccaacacaatgagtttagaatgacccatggcagatgatccagcaaaatttttccctttcatagcaactcttagcaaccccaaactagcaactgtagcttagagtggccagaatccaaacttgatgcagtgccagcatctgtcccaaaaactttcattttagctatttttcattacagttaaaaataagaaggggattgtatatttagcttgtttctcattttacattttgttgtatattcagtgagccagctctacaggagctggttctatcattgtatattttactggtaacttctacctacagtaacttatcgcagtgcagctgttgttttataccatcggtgactcagtaaccatctgacatcaaactttacccgccctgtaatccttccttttctcaaacagtgctttccttatgtttcagctagcaggagttataggaaatctcatttgtaatgctagttgtgtcagagttttctctaagactgccctcaggtgcaatgatttgtgggatagactcactggactcagaagaactgctgttctcttggttgcagcttattaaagtgagagagaacattacaatgaacaaaggaaaaggcacatgggataagcttacaagagttctttcccagtagagttgtgtggatgcgcttaattctccctgcaactatgtgtgacgtggcgagttggcagccagagaatctcacttgagccttgtttagggtttttattgggagtcagtcaggtattgtgtaactgaccttaactatgtatactccatccgcatagagtaaaaatgcatttaacacaaatcacatagttagcataaactctctaatcaagctggtgccatgtgacccaaggttctagacatagaaaaatgctcatcaagtagagtattccaagggctcagagctttttttcagggaactgaccaagggcagttctgaagacaggctttagtaatgtccaaggtttttgcagtctaggtctgctgagttaactctttcctgcacaactgtcttttcacctccctccctccctcccttccatcctcgacagggttttgttctgtcactcaggctgcactgcagtggcatcatctcagttcgttgtaaccttgacctcaggcttaagggattctcctacttaagggattctcctacttcagcctcctgagtagctgggactatgggtgtgcaccaccatgtctggctaagttttgtatttttttgtagagatgggatttgcaatgttgcccaggcttgtatgcactcctgggctcaagtgatctgcctgcttcagcctcccaaagtgctggaactacaggcatgagccatggtgcccgacttcttttcattttctctgtggtgttttggagaacttaagttcataatttgattaactccatttaatcaagttttctattaaggtctgagctcaaatctaagaactgtttgcccaactcagaatcacaaagatattctcctgtattttctgttaaaagtttttaagttttaggtttcagtatttaggttcatgatccattttgagttaatgtttatgtatatatagtatgagttagtgatatcgggtcatttgttttcatttggatactgactgttccagcggtatttgttgaagaaactatcttttcttttttgaatttcctttacacttttgttgaaaattaatgaccatgtatatgtgtatctatttctgaactctgtttttctctattctgtgctttggatatttctgtttttttgttctgtgtttctgtctttaagccaataccacattatgttttttaccaaagctttaaaataagtcttgaaatcaagtattatgaattctctaactttgttgttcttttcaaaattgtttcatatttccatgtaacttttagaattggtttgtcattctgccccataaaaagctggaactttgattgaaatttccctgaatcataggttaatttgtggaagattgctatctttaacatacttagtctgaatgcagatccattagcactgtatcatctttgtatttatttaggtccccatttatttgatatttaaacattttgtctcaccagtgttttgtagttttcagcatacaggtcttgcacatcttttgtcaagttcatccctttattatttcataattttgactattaaatggtattcttttaaatttcaatttttttctttttcctttttttttttttttttttgttgagacggtgtctcgctctgtcacccaggctagagtgcagtggtgccatctgagctcactgcaagctccacctcccgggttcacgccattctcctgcctcagcctcccaggtagctgggactacaggcatccgccactagtgcgcctggctaattttgttttgtatttttagtagagatggggtttcaccattttagccaggatggtctcgatctcctgacctcatgatctgcccaccttggcctcccaaagtgatgggatttcaggcttgaggcactgcacccggccttaaatttcaatttttatttattactaataaatacaaatacaattaatatgtatatattgattttgtatccagtgaacttgagaaacttttattctacatccttattatctgagatcaaacacagttttacatatcttttcccttctgtataatttttatctctttttggggggttattttgctgtcctagaacttgtacttcagtaaaatattgaatagaaacggtaagaatggacatctttgccttgttcctgatgttatcggaaagcatttgccccttcaccattaagtgtgatgttagcagtaggtttttcgtagacacttttaagcagattgcggaaattttcttctgttacagtttatgaagtcttattttattttgttattttatttatttatttatttattttgatacagggtcttactctgtcacccaggctggagtgcaatggcacgatctcagttcactgcaatctctgcctcctgggttcaagcaattctcctgcctcagcctcccagtagcttggattacaggcacctgtcaccgctttgggctaatttatgtatttttagtagagacgggggtttcaccattttggccaggctggtcttgaactcttaacctcaggtcctcggcctcccaaagtgctgagattacaggcatgagccaccgcccctggcctaagtcttttattttaaaatcacaaattaatattgaattttgtcacttactcttcctgaatttattgaggttattaaatgtttttctccttttttaaatctattgatatggtgaattacattgattgatttttaaaattgattttttttttttttttttttttttttggagatggagtttcgctcttgttgtccaggctggagtgcaatggcgtgatctcagctcactgcaatctccacctcctgggttcaagcaattctcctgcttcagcctcccaagtagctgggattacaggcatgctccaccatgcctggctaattttgtatttttagtagagacggggtttctccatgttggtcaggctggtctcaaactccctacctcaggtgatctgcccgcctcagcctccgaaagtcctgggattacaggcaagacccaccaccgtcccatctctactaaaaatacaaaaattgattttatctgtctgcttaactgcatattcctatgataaaccccactttgccatactatattaatctttcttatttattgctgaatttaaattgctgaaattttatgagatttttgcttctgtgttcatgaggaatattggtctgtggttttcttttttgtgatgtctttgttaggctttgatataaggttaataccagcctcagaacaaattaggaagtattctctcctcttcaaaagagtttgtatagaatagtaattttttattcctgaagtatttgtttgaagtcacagaagaaaccatctgggcctaaaattttctcataaactgaataaaaatttagagatgaaaaaaattttcatctgtgaaaatttgtaattacaaattctatttctctggagccagtcatatttcttatttgtctaaatgagctttggtagtttatgtctctcaaagaatttattcatctgatttgtcaaatttagtgacaagattgtcgataacatttctccattatcattttaatgtttgtagtgatgtcacctctctcattcctgatattggtgatttatgtccttctctccaccccataattaatctaattttattgaccttctcaaaaaaccaattttcattgcttttcccttatttttatttttttattttgtactgatttaacttctttgttgttattattatttcctcaacttactgtgggttttatttgctctttttcatatttcttatgatagaagctgaggttattaatttgagagctttcttttcttttaaaataggcttttaggccgggcgcagtggctcacgcctgtaatcccagcactttgggaggctgaggcgggcagatcacgaggtcaggagatcgagaccatcctggccaacatggtgaaaccccatctctactaaaaatacaaaaattagttgggtatggtggcatgcacctgtagtcccagctactcgggaggctgaagcaggagaatcacttgaacccgggaggcagaggttgcagtgagccgagatagtgccactgcactccagcctaacgacagagcgagattccgtctcaaaaaaaaaaaaaatagatttttagtgctctgaattctcatctgattactgcttttgcttcatcccagaaatcttgatgttgcatgtcaattgtttgggggatgaaaaaaaaaaaaagacaaattttgatgttaatgtttttatttctattcagttataataatttcctattttcatattggttgcttctttgacccattgattatttagatgtatgtttttggtatccaaatagttgcaaagatttctacatacctttctatttttcaatttaatgccattgttagaccatatttaatataatcaatatgattgcattgaaagctatgttattgatttatatttttctgggggagggagggttgggagcagaggatcttgctccgttgcccaggctgggtgcagtgttgatatcatagctcactgcagccttgaactcctggcctcaaacaaccctttcaccttagcctcctaaagtggtagaattacaggaatgagtcaccaggcttggccttgatttatctttcttttcatcctgtttttctgttcctgttttcttcttttcccactttcttggattgtgtgtgttgttgttgttgtctttgttgttgttgaggcagggtcttgccttgttacccaggctggcatgcagtggtatgatctcagcttactgcagcctccgcctcctggcctcaagtgatcctcctgcctcagccttccaagtagctgggactacaggcatgtggcaccatgcctggctaatttttgtatttatttatagagacagggtttcaccatgttgcccaggctggtctctaattatcagtattggcttattagttatttattttctttgttttcatagttactttagggtttgtaatatacatgtttaacttatcactgatttatatttagaaaaagctaatagaaacccttgtgatcaggagaatggaacactagtgcttattgtaattctctttagtcttctttgttgttcctgaaatccctcaagcatacttctgccccttggcctttgtacttactattccctttccctggaacattcttttgctagagagtaacataatgttttcc

SEQ ID NO: 356 - DNA, 11233 bp, Homo sapiens
  source 1..11233: mol_type = other DNA
gaacgccttcgcgcgatcgccctggaaacgcattctctgcgaccggcagccgccaatgggaagggagtgagtgccacgaacaggccaataaggagggagcagtgcggggtttaaatctgaggctaggctggctcttctcggcgtgctgcggcggaacggctgttggtttctgctgggtgtaggtccttggctggtcgggcctccggtgttctgcttctccccgctgagctgctgcctggtgaagaggaagccatggcgctccgagtcaccagggtgagccgcttcggactgcgaactaacgcggccttcttagctgctgcctgctctccctgcctcgcctgcgggagcctcccgagcgggagagggccgcaggagcgatttggggaggaaggtgggaggggactcaccaagagagcgccgaggtgggcccaggcctggtgagagagtgtgggggacgatggatggagggaggaaggtgagaaagagaactggacggatattggataaatgttttggggaggtggagagtcgactgggaaccttttgaaaaagtgatagagggtccctgagtgggcccgccagcaactctgtaacccccttcccagagagaaggtgtctgcaattggaggctttttcggtttcctttcaaatgtaaattctcggtattttagggctggccaggactaatcagggaatccctcaattggtaaatgtagaggtcggcggaaactgacttgtcacggccgcagagtagactctgggacccatgttttccctcggaacccatttttagtcggctttctttctgggaacttctccttgtgccccaccttaattaacccttgacttactcgagccttcgtggatcagctcttaaagtggtcttgcttctttcagaactcgaaaattaatgctgaaaataaggcgaagatcaacatggcaggcgcaaagcgcgttcctacggcccctgctgcaacctccaagcccggactgaggccaagaacagctcttggggacattggtaacaaagtcagtgaacaactgcaggccaaaatgcctatgaagaaggtaactctcttcctgacctaacttctgtaagagcccgccttccaactgtggcctttgatgcagaaacatttcattctctctgtttcatctacaggaagcaaaaccttcagctactggaaaagtcattgataaaaaactaccaaaacctcttgaaaaggtacctatgctggtgccagtgccagtgtctgagccagtgccagagccagaacctgagccagaacctgagcctgttaaagaagaaaaactttcgcctgagcctattttggtaaacttattcttaccattgtagagtctgttgattatttcttgtcccttatttcactgatacatgcaagagcattcaaatgaatagtaatattaataccatttattgagtgcttagcatgaggcaagctctgcctaacattttacatgcattaactcacataatctttacacgtactctctgaggtattgtcacctctactatttaaatcatggctttagagaggttatgtcagggtcacacaggtaagtggcccatatgggattcaagctcaggctgtctggcttcagaatctatgcttttaattgtcaactgtcttatattccttcgttaatgatattaagtagtagctgtctgagccaaaggctttgttatccaactacaagccatctctgcagaatttattggcgtaaacatagaatgttctcttgaatttttttactgctgcatatggctactaaataataagcctgtaacattggaatatgcaaaggagtaaaacaggaagaaggcaacttttcagggagtggttaagaagatgaattaacacttagcctcaaaaataataactttttattaaatataaggtatgtaaatgtattctatgatagacctacctgtgaaggaaaggtaggtcatgtagaggaggctgctttgatgaaattgcaatgaactgtattctgaagctctgtttttttaaacttagttaaaaccagttgggaaaattatctgaaaaaaacttgttgagacagagtctggctctgttgcccaggctggagtgcagtggcgtgatcttggctcactgcaacctctgcctcccaggttcaagcaattttcctgcctcagcctccctagtagctgggattacagacgcacgccaccacgcccagctaattttcatatttttagtatagatggggtttcaccatgttagtgtactcctgacctcatgatccgcccgcctcggcctccgaaagtgctgggattacaggcgttagccacggcgcccagccagttcagcttcttatatctaaggataagagattgaaagctattgctttagtgttgaatttctgggcatagcacatgaaatatgtagccagcacagtctttgggcatatcaaactacgtgaggctttcttggaaggcccatactgattcttacctttgctttcccacttagtaagaatgccttccccaccctgtctttcatttagctaataaccttttcatccttgaaaacagctcaagcatcaactcctgaagctttcccaaacttcccccatctccaccccctgttcctagaatcagtcttttttttccctttgagacagagtctcactctgttgcccagactggagtgcagtggtgccatcttggctcaccacaacctctgcctcccgagttcagtgattctcctgcttcagcctcccaagtagctggggctacaggcacatgccaccatgcttggctaatttttgtatttttagtagagacggggtttcactatgttggccaggctggtctcgaactcttgatctcgtgatccacccgcctcagcctcccaaagtgctgggattacaggtgtgagccaccatgcccagccttagtcttatttttgtttattttttttttcccaagacagagtcttgctctgtcacccaggctggagcacaatggcacgatcttggctcactgcaacctctacctcctgggttcaagcaattctcttgcctcagcctcctgagtagctgggattacaggtgccagccaccacacccagctaatttttttattatttttttatttttttatttttagtagagatggagtttcacgatgttggccaggctggtctcgaactcctgacctcgtgatctgcctgcctcggccttccaaagtgctgggattacaagcgtgagccaccatgcccgaccttatttctttactttgtctactaaattcagagtcctttgaggatgccatgaagtcaatgccttgtagagtttgacttcaagaaggtgctcaataaatgtttgaacaatgggataaagggagcttgaaggaaatggttaatggcgatgaagttagttaatccttagtagtcaggatagaatttgtgttgagtagtgagaagcagtttatattatgaaataaagactaaagactgaattgtcatttatttggactaacttcacatgttgctgataaaaattaattacttctcagtttcctttgcagcaaagtctagaatgtgaatttatttgcttccaactttaaactgactcactctaagttggcatttcactgtttttttttttgcccaggctggagtagaatggcgcaatcatagctcactgtatcctcaaactcctgggctcaagtgatcctcctgcctgggcctcctgagtagttaggactgtaggcagctgccttcatgcccagctaattttttgtagagatgagttattgctatattgcccaggctagtctggaactcatggtctcaaaggatcctcccacctcagccacccaaagtactgggattactggcttgagctgttatgcccaacctcattctttttaattgaggaattaaatgatcacttttttcttttttaacagagacagggttttgctatgttgcccaggctggtcttgaactcctagcctcaacctcagcctctcaaagtgctgagattaaaggtgtgagccaccgcgcccaacccaaatgatcacttttgatgttaatcacttcctaaaaagaaatggaataaatctgaaaagatacttttcctttaaggaaatgaattgtatgccgattcagcagaatactagcttgagttggtaccaataacctgaacttcatgcccaaactatagtgcttacttctatttgctatttcaagatatctctttgtttcaaggttgatactgcctctccaagcccaatggaaacatctggatgtgcccctgcagaagaagacctgtgtcaggctttctctgatgtaattcttgcagtaaatgatgtggatgcagaagatggagctgatccaaacctttgtagtgaatatgtgaaagatatttatgcttatctgagacaacttgaggtaagtattatcattcgttttttttctaaactgcatctaactttatgaaagtattttccatcaatagtttataataatacaagcaggacgtgggcagcatttcttaagagatcgcactttcaaattctccttcatggaatacctataataaaaagtcactaaataaaccaatggagtctatttgtcactttgtgcaggaaagttcgaagttagggtggatactactatcgctttctaaaggaaaatccacagattgaatttgatatgtatatatgcgatctccaccacgtttggaatggttaagtcccaaactctgcattttaggtgataacgggtcaggaagtggatgaggatgtagaatatactcaaagactacagccacccctaacacaaggcattttgtgttagtgtggctgatgtgcatccagttgttggtgaaattatttgtgcccaaaaggagtacactcaaaagctacttttttggttcacttcaatttgatcccacttttgaaactttctattaatggcatttgccctttccctacaaatacaagcactctttatggcagcataaacatagtaacataaattatactgttaccacatttacgtagtttttttgttgttgttgttttgtttttttgagatggagtctcacactgtcgcccaggctagagggcagtggtgcggtctcagctcactgcagtctctgtctcctgggttcaagcaattctcctgcctcggcctcccaagtagttggggttgcaggcacacaccaccatgcctggctaattttttgtatttttatttggttttggtttttttgagacagggtcttgctctgttgcccaggctggagtgcagtggtgcaatctcggctcagtccagcctccgcctcgggtcaagtgattctcatgcctcagcatcccgagcagctgggattacaggtgcccaccacaacacccagctaatttttgtacttttagtagagatgaggtatcaccatattggccaggctggtctcgaactcctgaccttagatgatctacccatcccggcctcccaaagtgctgggattacaggcctgagcaaccgcacccagcccccagttgtttctaatgtgttgtcttatgtcatcactgacatgttcatctcttgcctgctcctttttggcctctcctttttctataggattcttctgcaagacttctttgccaggagcagccttctgcttttagtttcttcttccatctttctagtgctttttaaagttgtgttctaactttggaggattcaatttagtaaatgtgctgtttcttttttttttttttttttttttgggacagagtctcgctgtgtcacctaggctggtgtgcagtggcacaatctcggctcactgcaagctctgtctcccgggttcacgccattctcctgcctcagcctcctgagtagctgggactacaggcatccgccaccacgcctggctaattttttatatttttagtagagacggggtttcaccgtgttagccaggatggtctcaatctcctgacctcatgatccacccgccttggcctcccaaagtgctgggattataggtgtgagccaccgcgcccagcctgtaaatgtgctgtttcttgatgcttcgttcttgttctgtgcaaggccatttatgcaaagcaacccctcaagtggcagaggagctgagaaaccaaggaattaggcagataaatggagtttgctggtattgggtgactgatgagggggaatttacagacataagtatggtctttgatggctgtaagatgtagatctctgcactgtaacccctcgtacccacggcttgggtatgtatacattttcttgggcaaagtatacatgctctagaatcaatgtgtgggtggctgacagaatgctgcagacatcacagcctataatgtatacaataatatcaagggctgttttggaggaaaggccaaacttaaagtgaataggcagaagtcacattgaattagtatttaaaataaagtcactgttgtccccacagttcttagctatgttgctgttgggatttaacccaggagcaggcaggagtgttgtagtacatgggttccagctgccctgggagttactgatattttctctacataaagctcaggttctaagtttagaggcttaagtgaaaagatctgagatgataatgtagtatctttatttggaagggagtggaccagcagcagttgtggtgaagaatatcgtaagacctgacaatataaaaaagctgtcatactgtcctatctaatgtttgccttttttttcttttttttttggggtggggagacagtctcactctgtcacccaggctggagtgcagtggtgcaatctcggctccctgcaacctccacctgccaggttcaagcaattctcctgcctcagcctcccaagtagctggaactacaggtgtgcgcaaccatgcccagctaatttttgtatttttagtaaagacaggttttgccatgttggccaggctggtctcgaactcctggctgcaagcaatctgccaacttcagcctcccaaagtgctgggattacaggcgtgagccaccacgccagccttcatgtttgctttatttcttggtgatggtgttgtttgtggttgaccatatgaataattgaattaagaactgatatagattataaatgccccagtgctactgtaggaactaactgatctttctggacataaatgtgtcacatggagtcatgtttctaagaataatcagcattttcttttgcaggaagagcaagcagtcagaccaaaatacctactgggtcgggaagtcactggaaacatgagagccatcctaattgactggctagtacaggttcaaatgaaattcaggttgttgcaggagaccatgtacatgactgtctccattattgatcggttcatgcaggtgagcatttcagtaagagttttcccttccaggattctagccgagtcataagaaactgatgttttcaggccagtctgggcgcagtggctcatgcctgtaatcccagcgggcgggtggatcacaaggttaggagatcgagaccatcctggccaacgcagtaaaaccctgtctctactaaaaatacaaaaaattagccgggcatggtggcgggcgcctgtagtcccagctactggaggcggaggttgcagtgagctgagatcacgccattgcactccagcctgggtgacagagcgagactcaaaaaaaaaagaaagaaataaactgactttttcaactaaaatctttcttgggggatatggtgtcattaagattttgctatgggagaatgtctttctacctctccttcatcatagctctgtgtctccttttcaaacattttattcaccctattgaaattcccattgcagaataattgtgtgcccaagaagatgctgcagctggttggtgtcactgccatgtttattgcaagcaaatatgaagaaatgtaccctccagaaattggtgactttgcttttgtgactgacaacacttatactaagcaccaaatcagacagatggaaatgaagattctaagagctttaaactttggtctgggtcggcctctacctttgcacttccttcggagagcatctaagattggagaggtacaggtttcttgagaaacctctccgtatgggtacattagggggaacactgctgctgaccaagcacgttgaattcaactgacctgtattatacctaactacatggggaagggataaagttgttctttatttctagtcaggctgcatgttaatattaggactttccatgggcatttgagagtttgtagacaaacatttgtagttaaagatacatatgggcatgcaggttagtgccaaaggaaaattttctgaaagaaactcagtaacatgggttttgtttcaggttgatgtcgagcaacatactttggccaaatacctgatggaactaactatgttggactatgacatggtgcactttcctccttctcaaattgcagcaggagctttttgcttagcactgaaaattctggataatggtgaatgggtaagctgtgtcccacagaactcctaagcttttaaattttaaagagtgactaaatacagaacttttgttattaaaaggcaattcaagtggttcataaatatgggatctactgaaggaatagttaaaaaagatgtcttagaatgtttccacatctttttgtttttgagacaaggtctcgctctgtcactcaggctggagtgcagtggtgcagtcttggcccactgcaacatcagcctccagagtagctgggattacaggtgtctgtctagtttttaaatttttttcatgtcagatgggtaatatgcccacattgtaacaaggtttgagggtggcacgtttcacatgttcacatgaacaccaaatcatcacacttatgaactacaaaagagtcgcccaccagcctgggcaacatagcaaatcctcatctttacaaaaaatatataaaatatatatatatatatatatatatatatatatacaggcacacgcctgtagtcccagctactctggaggctgagctttgtattttttgtagacatggggtctctctatattacccaggctggtcttgaaactctgggctcaagcgatccacccacctccacttaccaaagtgttggaattacaggcgtgagccattgcaaccagtcgagtgtttccatttctttccctgatttcaactttattccctttgagaaaggtagagcaacttttactccttacagatggagaaacttgaaggtcaaatgacatactagtagttcattcatattcattgattcaacaaatgcttctcctatgtgacaggcactaccctaggtctttttttgttttttcgagacggagtctctctctgtcgcccaggctggagagcagtggcgtgatctcggctcactgcaacctccgcctcctgggttcatgccattctcctgcctcagcctcccgagtagctgggactacaggtgcctgccaccacgcccggctaattttatatatatatatatatttttttttagtagagatggggtttcaccgtgttagccaggatggtcttgatctcctgacctcgtgatccgcccaccttggcctcccaaagtgctgggattacaggcgtgagccattgtgcccggcctaccctaggtcttaagaatagaactatgtagctgggtgcagtggcttacatctgtaatcccagcactttgggaggcagagttgggcagatcacgagctcaaaagttcaagaccagcctgaccaacatggtgaaaccctatctctactaaaaatacaaaaattagccaggtgtggcagtgcgcgcctgtaatcccagctactcaggaggctgaggcaggagaatcacttgaacctgggggcggaggttgcagtgagccgagatcataccatgcactccagcctggagcgagactccatctcaaaaaaaaaaaaaattacaaagttggcctcaaggaagtggagtctagttttagggtgggcaagtcagcaattacaaaagtgcaattaggtttgagcagaggaagcatgagagcacctaggaaaggagtctttagctttgtcttaaatttcagttatattaattatacagtacccatctcttttccactcctgaataacatctaacatctagaaactttatgaaaatcattattgatttgagcatttttaacattaacttgttgccttagacaccaactctacaacattacctgtcatatactgaagaatctcttcttccagttatgcagcacctggctaagaatgtagtcatggtaaatcaaggacttacaaagcacatggtgagtcaatatagtggcattgtaagatgctgaaaagtgtaataattcaaacttaatgcctgcaaatgcctggtttatttttaatgagttaatgttttaaatgaatacctgtatcattgcatcttgtgattttttttcttttgcctctttaattgctatctttttgtcttccagactgtcaagaacaagtatgccacatcgaagcatgctaagatcagcactctaccacagctgaattctgcactagttcaagatttagccaaggctgtggcaaaggtgtaacttgtaaacttgagttggagtactatatttacaaataaaattggcaccatgtgccatctgtacatattactgttgcatttacttttaataaagcttgtggccccttttacttttttatagcttaactaatttgaatgtggttacttcctactgtagggtagcggaaaagttgtcttaaaaggtatggtggggatatttttaaaaactccttttggtttacctggggatccaattgatgtatatgtttatatactgggttcttgttttatatacctggcttttactttattaatatgagttactgaaggtgatggaggtatttgaaaattttacttccataggacatactgcatgtaagccaagtcatggagaatctgctgcatagctctattttaaagtaaaagtctaccaccgaatccctagtccccctgttttctgtttcttcttgtgattgctgccataattctaagttatttacttttaccactatttaagttatcaactttagctagtatcttcaaactttcactttgaaaaatgagaattttatattctaagccagttttcattttggttttgtgttttggttaataaaacaatactcaaatacaa

SEQ ID NO: 357 - DNA, 20809 bp, Homo sapiens
  source 1..20809: mol_type = other DNA
ttcccggcgtccatttagtggcgggaaaagcgaccttttctgagcgcgtttgcctgttgagtggtagcctttcccctcaaccagcaatggaggagcagccccagatgcaagacgccgacgagcccgcggactccggaggggaaggccgggcaggcgggccaccgcaggtcgccggcgcccaggcggcgtgcagcgaggaccgcatgaccctgctcctcaggttgttccctttggcctcctcagccggggccaagtgggcgttgtggcccggaactccgcccttgctcagaagggctagggttcgaattcacgctcggtcacgtcaggtctccgtgattgcctcattcacttaaactgttgaagctctttcttcatcagcgaaaaggagagaaaaatgaccccctggagagaggttacaagggttaaatgagatagtctaggaaagtgttgagcacagtgccccgggcccttagaagctgtaatttctcctcctgtttccccgccctccccctacctctctggtttacagacaaattgaatgccagagctaaactggaaggaaggtgcccctaccatttcttttagaactacgaccctttgtaacccagaagctttatatgttataaattctactaagcggacggtgtttatacttttccactaagcggttgctggggaagattcgatgagaagggacattcgtcttctaaactagtgagcaggagaaggtcctgggccaaatctgcctaactgcctatttttgtgtgaccactcaagctaagaatagtttttatgtttaagtgttgcagggaaaagatcataaaaatatttcataacacgtgaactctattagaaattcaagtttcagtttccataaacagttttattggagtacaactttcctgccacaagggtggaattgagtagctaaaacagagaccgtgtgactcacaaaccctaaaaaatttactatcaggtcctttacagaaaaaaatttgcggtcctctgttctatatcataacagaggtagttttaaaaaaatcattattggctgagcgcggtggctcacgcctgtaatcccaacactttgggatgccgaggcagacggatcaccttaagtcaggagttcaagaccagcctggccaaccatggccaacatggtgaaaccccgtctctactaaaaatacaaaaattagctgggcgtggtggcgggcgcctgtaatcccagctactcaggaggctgaggcaagagaattgattgaacccgggaggcagaggttgcagtgagcagaagattgtgccattgcactccagcctgggcaatagagcaagactcttgactcaaaaaaaaaaaattaattaccatttttttctttcttaaatgttttgaaaaatgaaaagatgtctatttcttttttattgttttttcctcctcacccttgctgtcatcttaaattaccatttgctcatagtttttctacttatgtatgatttttggatttatagaacaactgaaaaactatatgaattagtaatccaaggattagtatctttgttatttttctgtatctcctgataaaaatctgtgtttgtaaatacagtggtttggggtttaatcattttggtctattctttgtatagcatcctcagttcagtctggcctattaaaaataatcttaagcggccgggtgcggtggctcacgcctgtaatcccagcactttgggaggccgaggcgggtggatcacgaggtcaggagatcaagaccatcctggctaacacggtgaaaccccatctctactaaaaatacaaaaaattagccgggcatggtggcaggcgcctgtagtcccagctgcttgggagcctgaggcaggagaatggcgtgaacccgggaggcggagcttgtggtgagccgagattgcgccactgcactccagcctgggcaagagtgcaagactccgtctcaaaaaaagaaaaaaatcttaaacaccaattttttaacttttcctgacagatgctgttttcccagtgtattccattttgtgtcttcctctgaggccttaaagttctttatacccattttaaataaaatgaggccaaattagaagtttgtaattaggagtttaattatttatatttattttgttgtatcagcttccgaaaaagaatgagttggttcgtcatgtggtaatgagtaaaaccttaatcaataaatatgtgactttatattctctttatctgttttcaggctgagagcacagacaaaacaacaactcttagaatataaatcaatggttgatgcaagtaagtattttcattttcaaattagggttttgttgtttgtttgtttgtttttttgagacagggtcttgctatcacccaggctgtaatgtagtggcgcagtctctggtttactgcagcctcagcctcctgggctccagcaatcctcccacctcagcctcccaagtaactgggaccacaggcacatgctactgcgcccgtctaattttctgtattttttttgtagacacagggttttgccaccacacctggcctcaaataagattttgtgagtttgatgattaacagtactcgagtgaaaataaaattaactttaccaaaaattgtttatatatgttatagtgtggcaaaactggtaaacatgcaagatatttatgaagtatgctaagtgtgctgaaggaaacaaaggcatgataagagggaggggcttcttttcatagggatggcttctctaagaagatgattttagagctcagatccaaatgagaagaaagtttacgttccaatagtctttttgttctctatatagctagtaccatttttaagggattgtgacatccaaaaactagatttagttaacactgtagaatttctatacctaggagacgacagatgtaaggcaggccacaggaagtttagttgtagcctttgaaagaagatgtttatctaaaattgactatctgctcttttagaggccaagacaagaagatcacttgaagctaagagtttgagattagcctgggaaacaaagtgagacctcgtccctacaaaaataaaaaaaacgtagccagatatggtgatacatacctatagtcccagctgggactcactacaacatccaactcctgggctcaagtgattgagtgattgtactgtactccactccactgggcaacagagtgagactgtcaggcaatcaacagagaaataagtattgattcttttaccatttaaaaaatatatatatggctgggcttggtagctcacacctgtaatcccggcactttgggaggccgaggtgggcggatcacctgaggtcaggagttcgagaccagcctgaccaacgtagagaaaccccgtctctactaaaaatacaaaattagctgggcgtggtggtgcatgcctataagctcagctactcggggaggctgaggcaggagaatcgcttgaacctgggaggtggaggttgcagtgacgcgagatcacgccattgcactctggcctgggcaacaagagcaaaactccgtctcaaaaacaaaaacaaacaaaatatatatatatatacacacacacatatacgtatatgtatatatatgtatatatatgtgtgtgtatgtgtatatatgtatatatatgtatatgtatatatatgtgactgagactttattggttaaaggattgttttttacaataaaggcatctattttaagggtacaatttgatgagttttgacaaatttctaaatctgtataatcactaccacaatcaagatacagaacattttcggctgagcatggtggatcaatctgtaatcccagcactttgaggggccaaggcgagaggattgcttgagcccagggcaaccagcctgggaaacatagcgagacccccacctctaaaaaaaacaattggccagatgtggtaccatgtgcctgtagtcccacccagctgaggtgggaggattacttaagcctgggatatcaaggctgcagtgagccgagatcacaccactacactacagcctgggtgacagtgacaggagaccctgtctcccccaaaaaaagatacagaacattttctttttttgttttttctgttttttttttttttttgagacggggtcttgttctgtcgcccaggctagagtgcagcggcgcaatcttagctcactgcaacctccgcctcccggattcactgcctcagcctctcaagtagccaggattacaggcacctgccaccatggccggctaatttttgtatttttagtagagacgggtttcaccatgttggccaggctggtctcttaactcctgacctcaggtgatccacctgcctcggcctcccaaagtactgggattacaggcatgagccatcacacccctggccacacgtggctttttaaagctaattaaaatgaaataaaatttaaaatcaagtacatatcaaatgctcagttgccacatgtggccagtggctatcctatgggatagcatagataggaaacatttccatcatcacaggaagttctaggcttttttctgtaccattgaggtatttgttgatccctacacaagtgccacattgtctttgttggttgatgtttttttttttgagatgatctcactcagccacccaggctggagtgcagtagcaagattttggctcactgcaaccccaacctcgtgggctcaagcgatcctcccacctcagcctcccgagtagctgggactacaggcatgcactattgtgcctggctaattttcagtagagacagtttcactatgttgcccaggctggtctcaaaaggttaatcatcattgagatgggctgtaaatgtaaaatacagacagaataatgtgaaatatgtcattagtaatgttaaactgactgcacattgaaataatatttttgatctattgggttaaataagtatattaaaattaaatttcactgtttcttttctgtaatgtgaaaacgacattttaaatgatgtcttttgcccttgtggcttacattatattccttttggacagcacctctctaaaatgttagtaacttcaaaaaattatttatttgcaggtgaagaaaaaactccagaacaaattatgcaagaaaagcaaatcgaagcgtatgttatatttaaaaattttgtttatggtctttactaagatttaatcatattttctattattttgttgttagatggagtctcactatcatgcaggctagagtgcagtggtgtgatcatagttcattgaagccacaacctcctgggctcaagggatccactggcctcagcctcctgagtagctggaactacaggctcattgtaccacacctgactttctttcttttttttttttttttttaaatattttagggccaggcacggtgactcatgcctgtaatcccagcactttgagaagccaaggtgggtggatcacccgaggtcgggagttcgaaaccagcctgaccaacatggagaaaccccatctctactgaaaatacaaaattagccgggcgtgatggcacatgcctgtaatcccagctactcgggaggctgaggcaggagaattgcttgaacccgggaggcggaggttgcggtgagccaagattgcgccattgcactccaacctgggcaatgagcgaaactccgcctcaaaaatatatatatattttgtagagatggggcctcattttgttgcccaggctgttctcaaactcctggcctcaagtaatcctccaccttggcctcctaaagttctgggattgtaggcaagagccactgagcctggtcataatctcatttttctatgctatagcattgtttttatttttcctttcctttatttttccaaataacttgtgatgcatatattgggaagttgttaatttgggatggagatttatatgtacacaagtgatcacattagaactttctggcctccctttttataagatactaagtgaagtagctgaggggcattagtttaccaaatgtgtaaatacacattggtatattgagcctgtagaatacttgtatttagatagaggtgttttacttttttaagggcttattttatacatttatttcaataatgtctttttctgatattgctgaaattcttttgctcatgtttctttgatagtaaaattgaagacctggaaaatgaaattgaagaggtaaaagttgcttttgagataaaaaagcttgcattagacaggtaattattacattttaaatataagcattgtgaactgactgcaaaatgggtatgaggggaaagtggagggaatcttttaactgggctgagtgaattagtcaagcacagtgatgattagataatggtcacacaaaatttttattttattattgttataattttttaatttgacaaggtctcactcttgcccacgctggagtacagcgacatgatcactgctcactgtagcctcaacctcccaagctcaagcaatcctcctgcctcagcctctggagcagctgggactacaggcatgcaaaaccacgcttggctaattttttttattttttatggagatggggtctcactgtgcccaggctggtcttgaactcctaggctcaggcgatcttctcacctcagcctccccaaaatgctgggattacacaagcccagcctggtcacacagattttgagccctgagagaaaatttgcattacagatgctcctcaatttgcagtgggtttaggtcctgataaacccattgtaagttgaaaatatggtaagtgaaaaatgcatttaatacacctaacctggctgggcgcggtggctcgcgcctgtaatcccagcacttcgggaggccaaggtgggtggatcacctgaggtcaggagttcaagaccagcctgaccaacaatgcaaaaccctgtctctactaaaaatacaaaaattagccaggtgtggtggtgtgtgcctgtaatcccagctactagggaggctgaggcaggagaatcacttaaacccaggaggcagaggttgcagtgagccgagatgacgccactgtgcactccattgtgggtgacagagcaagattccctctcaaaaaacaaaaaaaaagttttaaagtttatagtcatatatggttttgtattccctaagtccttcatttcaggcccatcctgatctttgtagtgccttaatccttccagtggctttgcacaaaagtagatggttcagagaactcattcagctcaggccaggtttcagattcacctggcccctcattctggcagtgtatacccacacgcaacagccctatccatcttggtgttatttcatatttttgtgttttatttctcaaagtatttctcttataataatattttaaaacctacttctgttttatgtatatttgaagggaaatcaatctttttcatgttttgaatttttttaatgtaccacaaatgttatccatgttttataatgcaagctttttccctctcataggatgagactttcaactgcacttaaaaaaaacctggagaaaattagcagacagtctaggtatgattttttttttctctggattcggtaaggatgggatctgcatagtgactttagttttgtgaattttaaaaaattattactgccaactacctttgtctggggaataaggaaagtgatgaaatttttgtaggtcctccccagaattacagcaacttttatagttctaattatattttgttccgtatggattgtaactgtaagaagcagaagagtttatccagaagattggaaaattttaagggaaagctttaaaagttcattttcttcagtatttactataaatcaggaacagggctatctcatttaatccatccaaaacacagtgagataggaaatatactcctcattttttattggtagaaatgagcttattcggatccaacaattttccaagggatataatataaagactagcaggtctcagcaaactgtcacaaggacaaaaaaccaaacaccgcatgttctcactcataggtgggaattgaacaatgagaaaacatggacacaggaaggggaacatcacacactggggactgttgtggggttgggggagtggggagggatagcattaggagatatacctaatgctaaatgacgagttaatgggtgcagcacaccaacatggcacatgtatacatatgtaacaaacctgcacgttgtgcacatgtaccttaaaacttaaagtataataataataaaattttttaaaaaataaaaattattatgagcaaaaaaaaaaaagactagcaggtcaggtcctctgtatcctggtgtctggcctcagaggtcttacctatgatctttttttttttttttttttttttttttgagacagtcttgctctgtcgcccaggccggagtgcagtggcacgatctcggctcactgcaacctctgcctcccgggttcacgccattctcctgcctcagcctcccgagcagctgggactacaggcgcccaccaccacgcctagctaattttttgtatttttagtagagacgggctttcactgtgttagccaggatggtctcgatctcctgacctcgtgatccacccgcctcggcctcccaaagtcctgggattacaggtgtgagccaccgcacccggcctcttacctatgatcttatctcccaaagttcttgtgataaaatatccccttcccttgagcaccagaaaaattcctgcatgggtataagcactttttttttttggagacggaatcttgctctgtcactcagactggagtgcagctcactccaacctccatctctgcggttcaagcaattctcgtgcctcagcctcctgaatagctgggattacaggcacctgctacaactcccaggtaatttttgtatttttagtagagacggggtttcactatgttggccaggctggtctgacctaggcacttctatcttgagtatcttagcccacactgctacacattttcccatattccagctaaatccaggattacataaatccaaaaatctgaatttgaacactcataactttttctctcccataaaaggagagtttagcttgggtacagaggctcatgcctgtaatcccagcactttgggagcctgaggcaggaggatagcttgagcccaggcatttgagatcagcctgggcaacatagggaggcctcatctctacaaaaaatttttaaaaattagccaggcatggtggagccaccagtagtccttgctactccagaggctgaggggagaggatcagcctcctgccttgattctaggaggtcatggggctgcagtaagctgtgatcttgccacagcaccttagcctgggcaatagtaagaccccatctcaaaaacaaaaaaaaaaaagacattcttgagttaaaggtgtggggtgcaggagagcaggacagattcatcacattgttactgaaatgtcagggctttggtctaggtcctgttgcttgctgcacagaaatgtaatcactgacatgagtgttgtcaggaagaaggctttgagtactgtagccaaagagaggggagatcagtctcatctcctagatggactaaaattaaggaggtgttttgttttgttttgtttttttgagacagggcctcactctgttgctcaggctggagtgcagtggcgtgatcctagctcactaccaccttcacctcccaggttcaagtgatccacctcagcctcccaggtagctgggactacaggtgcccaccaccgtgcctggctaatttttgtattttttgtagagatggggttttgccatgttgcccaggctggtcgcgaactgctgagctcaaagggatccacctgcgttggccttccaaagtgctgagattacaggtgtgaaccaccacaccctgccaaattaagggtttatatagcagggaagatatgtacccatgtatgggaagacaggaattagggaggggtaaggaagaggagttagtcaataggaagcaggttaggcaatcatgatgggtgaggggtctgatgtcttattgtctagagggtgtgatcttataagtttcagttccttgatactatctgggagtcctgatggtttcctgagaagggaactcaggtaagacagttgtaactttctcaagctttaagactgggagggtcagtttctatgtttattcaaaagaaatcataaacatcagttctgtgggacaattgggccagtttcactgttgacaccaaaaaacagaagggtcaggccggtgcggtggctcacgcctgtaatcccagcactttgggaggccgaggcaggcggatcgtctgagatcagaagttcaagaccagcctggccaacatggtaaaaccctatctctactaaaaatgcaaaaattagccgggcgtggtggcaggtacctgtaatcccagctactcgggaggctgaggcaggaaaatcgcttgaacccaggaggcgaaggttgcagtgagctgagattgtgccactacactccagcctgggcaacagagtgagactctgtctcaaaaaaaaaaaaaaaaaaaaacagaaaggtcaaataggctgaggcagtgttttattagcacattttaaagtttataactgttaaaaaaaattaattgggatgcaactggaatgccattaggcagaaccatctttagccttgagctccatcaccttgggattcctatgtaagcctgatgtaaacagtaaaatggaacttaagcttacccaatgagaaactgccaactaacttctaactagagatgatccactttaaccaaccaattacattttgtcttctatgaacaccttataaaagcttcctcactcaactcccacagtagagcacttaacagcttataatcctgtgctgccagatgcatgaattgtcttctcaaataaacttgttagattttaatatgcctaaatttatcttttaagacaaccaaatatagctgtaaatagtagaaaaatgagttcagctctcccaggtttgtgcatattccccttttgaccttctcagttagttgcttctacagtgtttttcacacctggctgattatcagaataatgtctattatagtgatcacattgttggtcctatcccaaactttctgaatcagcgtatcttttttttttttttttttttttttttttttttttgagacggaatcttgctctgtcacccaggctggagtgcagtggcacgatctgcttggctcactgcaacctctgcctccaggttcaagcgattctcctgcctcggcctcctgagtagctgggattacagacacacaccatcacacctggctaatttttgtatttttagtagagatggggttttgccatgttggccaggctagtctcgagcttctgacttcaagggatccactgtacctgaccttttttttttttttaaatagagatgtggtcttgctatattgcccaggtctcaaaactcctgagctcaagcaatcctcctgcctcagcctccaaaagtgctgggattacaggcatgagccactgaaccaggccccgaatcagcatatctgaaggtcaggaactaggaatccttacttaacgaacctcccagatgactgtggcactctgaagtatgagagccactgctctgcgcagtcttattccatactgttttgctccagccataccaaactacttgatctaggcaattacttcatatccttattccaccctgtgcataactctggttcatatttgttactgcgctatagtatgattgtggatttatttttctccactagattctttcctctttgaaaacagatactgtgttttattttattttacattcctggcacctggcatagttcttgaaagcatgtagtaagtactcaaaaatatttgttaaagaagtaaaaaagcagtttgttccttgaaactattctgtatgctgcaataatggtggatgcatgtaattatacatatgtcaaaacccaaagaatgggtggggcctcagtagctcatgtctataatcctaccattttgggaggctgaagagggaggattgcttcaaccctggagttccagaccagtctgggcaacatagggagaccccgtctctacaaaaaatgtaaaaattagtgggacatggtagtgtatgcctataatcccagctgcttctgaggctgaggcaggatgatcgcttgagcccaggaggtgaggttgcaggaagctgtgattgtgccagtgcactccagcctgggtggcagagcgagaccctgtcacagaaaacaaacccgtaggctatacacaagcaagagtgaaccttgatgtaaaatccggactttgggtaacaatgatgtgtcgatataggtttgttgattgtaacaaatgtgccactttggtgtaggggatgttgataatgggagaggctatgcatgtgtcaggggtagggtgtatatgagaaatctctgtaccttccactcggttttgctgtgaaactaaaattgctctaaaaaatacattcaaaacaaaagcagcttgttaaaattgctctaaaaaatacattcaaaataaaaactaaaattgctctaaaaaataaattcaaaacaaaagcagcttgttaggaagttattagggtgtttcctctctaaatatgaaatttttagaaatgttcccacatttttaaatttggtattcttcaatgtctgtgaccaaacatttttctagggaaatgcatatctagttttaacagaaatttagtttacatcaaacttttccagatttattttgttaaactgactttttatccaagtgtacggtggatttaatgaaagtaagttttcactcattgattccttcattaatgacagctattatttttaattaagttacaaataaccttaataaatcatctttttgtttccttttcagtgtgctcatggataacatgaaacacctattagagctaaataaattaataatgaaatcacagcaggtaaacttacacattaggctgattatgcattctcatgattttactctcaacttcttgctggtaactgtattgtatatgattaaatagattgtccaaagggaatgctatgattggaattcgctgtccttgagttctctctttttttcaaaattctattatttctgactaatgttgaacattatctacttataatttaagttactgtcttccttttgctgtctggaaatagaggaattgaaaactggaactttagataactaaggctagtagataaactcagtgatttaagtattacaggtttgtccttacatacagtaatgtgctttaacttttttatttttaataacaggaatcttgggatttagaggaaaaactgcttgatattagaaagaagagattgcgtatgtagaacactttttttttggcagaacacattttgcttactttatagattgataaggccagatctcttagccactgagaaatttcctaatttccgacttccaaaattccttaaaatttttgacatggcaacttaaaaagtgatataaagtacattttgttctgtttattctcattgttttagaactttattttcgttttttgtttgctttttctgagacagtcttgctctatcacccaggtggaatgcagtgacttgatcttggctcactgcaacctctgcctcccaaattcaagtgattctcctgcatcagcctcctgaatagctggaactacaggcacccaccaccatgcctggctaatttttgtatttttatgttaaaaaaaattttttaatatggtatttttttttggagacagaatctcactctgtcgcccatgctggagtgcagtggcacgatctcggctcactgcatcctccgcctcctgggtttgagcaattcttgtgcctcagcctccagagtagctgagattacaggcatgtcctatcacacctggctagttttcgtatttttttagtagagatgggatttcaccatgttggccaggctggtcttgaactcccgacctcagatgatccacctgcctcggcctctcaaagtgctggttataggcatgagccactgcacctggccaaattgttgtatttttagtagggacgggatttcaccttgttggtcaggctggtctcaaactcctgacctcaagtgatccgtctgccttggcctcccaaagtgctgggattacaggcgtgagccacagtgctgtgcctcattagtttagaactttaaatcacaaaattaatacattctcagaaggggaaaaataaaaggatgtagtaaattataatgcaaaagtcatgcctcttttctgtgtgaccacagtttggtatttatcagtctagacttttccatatccatataaacatttatatggacatggaaatttctatatatatatatagagagagaatttctatatatatataaattatatatataattatatatatttatatattatatatataaatatatataatatataaatatatataatttctaaatgatcaaatgatatgtatggatctacagccttatcacttaatttatcatgacatgagatggttttttgtattgaaactgttggaatgtttatttcaaaggcaatacacactgtagaacatttggaaataaaggtatacaaaggaaaagttaaattttttttattttccatcaaaagataatcagtcttcaaagcttttttcagataagggtcttgttctgtcacccaggctggagtgcagtggcgtgatcatagttctttgcagttcagtgcagctttgaactcctgggctcaagccatcctcccacctcagctcccaagtagctgggaatacaagtgcactccaccatgcccagctaacttttttgttttttgttgacatcgaatcttgctgtgttacccaggtttgtcttgaacttctgccctcaacgatcctcctgccttggactcccaaaagtgctaggattacaggcatgagctaccacacctggcttgtatttcttttttttttttttttttttttttgtgagatgctgtcttgctctgtcacccaggctggagtgcagtgctgcaatctcggctcactgcaacttctgcttcccgggttgaagaaattctctgcctcagcttcccgggtagctgggattacatgcgccaaccagcatgcctggctaattttttgtatttttagtagagacagggtttcactgtcttggccaggctggtcttgaactcctgatctcgtgattcatccacctctgcctcccaaagtgttgggattacaggtatgagccatcgcacccagccattttttttctttttctttttttttttttttttgagatggagtctccctctgtcgcccaggctggagtgcagtggtgcgatctcagctcatggcaatctccacctcctggattcaagtgattctccggtctcagccttctgagtagctgggactacaggcacccgccaccacgcccagctaattttttgtatttttagtagagacggtgtttcaccatgttagccaggatggtcttgatctcctgacctcgtgatccacccacctcagcctcccaaagtgctgggattacaggcatgagccacctcgcctggccaacctttttttgtttgtttgtttttgttttgaaatagtttcgctctgttgtccaagctggagtgcagtggcgcgatcttggctctctgcaacctctgtctcctggattcaagccattcttctgcgtcagcctctcgagtagctgggattacaggcgtgccaccacgcctggctaatttttgtatttttagtagatacagggtttcaccatgttgtccaggctggtctcgaactcctcacctcaaagtgttctccccgcctctgcctcccaaagtgctgggattataggcgtaagccactgtgaccggcctttttgttttttgagacagggtcttgttctgttactcaggctggaggcacactcatggctcactacagcctcaacttcctggactcgagcaatcctttcacctcagcatccctgatagttgggactacaggtgcatgccaccatgcctggctaattgttttttttctgtagatatcttttttttttttttttttttttttgagacggagtctcgctctgtcgcccaggctggagtgcagtggcactatctcagctcactgcaagctccacctcccgggttcacaccattcttctgcctcagcctcctgagtagctgggactacaggcacccgccaccacgcccggctaatttttttgtatttttagtagagaccggatttcaccatattagctaggatggtctccatctcctgacctcgtgatccgccctcctcgaccacccaaagtgctgggattacaggcatgagccaccatgcccggcctttttttctgtagatttcttaaatttatttttctatagagacaggattcattcaccatgttacacaggctggtatagaactcctgggctcaagtgatctgcccaccttggcctcccaaagtgctaagattacagacgggatcctgtgatccactgtgcctggccagatttgttggttgggttttttttttttatacggaatttctctcttgttgcccaggctggagtgcaatggcgtgatctcggctcactgcacctccgcctctcaggttcaagcgattctcctgcctcagcctcccgagtagctgggattacaagcgcccgccaccactcccagctaattttgtctttttagtagagacggggtttctccacattggtccggctggtctcgaactccctacctcaggttatccacccacctcggcctcccaaagtgctgggattatacgcatgagccaccgtgcccagccggtgttttgtttgtttgtttttattgagatggagtttcgctcttgtcacccaggctggagtgcaatggcgtgatctcggctcactacaacccctgtctcccaggttcaagcagttctcctacctcagcctcttgagtagctgggattacatgggattacaggcgcctgccaccatgccccactgatttatatttttagtagagacgggtttcatcatgttggccaggttggtctccaactcctgacctcaggtgatccaccctcctcagcctcccacagtgctgataacaggcatgagtcactgcaccctgctcagatttgtcatttgtaaacattatatagatttgcctgttagcaaataatctcagggtcattagtagtattggtcatcttgtctattcccccatgtttttttaagtagaatcagggtcttgctatgtttcccagggtggtctcgaacttctggcaatcttcctgcctcagccttccaaagtgttggaattataagaatgagccacccatgctcaggctatacccttttgatgattcattttctccactgcattccaacctcctttaatatacattaatgttgaagaacaggcccctgaaatacatccatttatatttccaagtagtttaattcttagactatttccagtaatacaaaaaatgattgatgatgtttatccctggagaggggaatcttacttttttttttttcctgagacagagtttcactcttgttgcccaggctggagtgcaatggtgcaatctcagcttactgcaacctctgcctctgggttcaagtgattctcctgcctcagcctcctgagtagctgggattataggcacatgtcaccatgcccagctaatttttgtatttttcatagagatggggtttcgccatgttggcggggctggtctcgaactcctgacctcaggtgatccgcccacctcggcctcccaaagtgctgggattacaggtgtgagccaccgtgcctggccaaataagattaattttaaatgaaaagtaagattccttggccgggcgcggtggctcacgcctgtaatctcagcactttgggaggccgaggcgggtggatcactggaggtcaggagttggagactagcccagccaacgtggcaaaacccctatctatactaaaaatgcaaacattagccaggtgtggtggtgggcgcctgtaatcccagctattcaggacgctgaggcaggagaatcacttgaacccctgggaggcggaggctgcagtgagccgagattgtaccactgcactccagcctaggcaacagtgagactccatctcaaaaaataataataaaataaatgtttatatgtttcatttttgtaatttaagagggaaaaatatatgtatttcctacctattttggcaacccaaaataagccctcattacatgatgccacttgaaacatctgtagacagctgttattgtcatacagaaatacctggaacatttcactaagggcattgctaagtacgaaattaaaatattgttattttgcaccagggaagtcattttcagatcgtaataaagttgcaacctaaaatgctgcttattaaaatttttctcttgactaaaataaccaagaagtgatctgcttcataatttttcaagatccttgtttatagaggtattatatatggtatattattttatttttaacctaacagaattaaaacaagcttcagaaagtaagcttttagaaatacagactgaaaagaacaaacagaagattgatttggacagtatggaaaactcagagaggataaagatcatacgacaaaacctacagatggagataaaaattactactgttattcaacatgtgttccaggtaacatttatataaactagcaagagttttaatcttgttgcccaggctggagtgaagtggctcgatctcagctcattgcaaactccgcctcctggttcaagcaattctcctgtctcagcctcctgagtagctgggattacaggcgtccaccaccatgcccggctaattttttaatttttagtagagacggggtttcaccatgttggctaggctggtctcaaacccctcaccttaggtgatccgtctgcctcagcctcccaaagtgctgggattacaggcatgagccactgcgcctggccaactatttgatgatgctatcatacagtattgacttaactttcagctagtttttgatcttgatgaaataattcaatgtttaatattggtctgtttgtatatatctggaatgtgtgtatacttaatgtttaaggtcttgatttttcttttttcttttttcagacgcagtcttgctctgtagcccaggctggagtgcagtggcatgatctcggtccattgcaacctcctcctgggttcaagcgattctcctgcctcagcctcctgagtagctgggattataggcatctgccaccacacctggctaatttttgtgttttttggtagagatggggtttcgccatgttggccaggctggtctcgaactccgatgtcaggtgatccacctgcctcagcctcccaaagtgccgggattacaggcttgagccaccgcacccagcacgctgcaagtatttttaacaagtaaaacctatccatggaaactgacgaggcataaaaaattattgtaaacattgtaaatattccctaacattatggagatcaaggctaaagccttactaaaagtggaaatgaaagtagaagaatgctgctgggtgtggtggcttatgcctgtaatcccagcagtttgggaggccaaggcgggtggatcatgaggtcaggagtttgaggccagcctggccaagagaccagctgagccaatacgttgaaaccctgtctctactaaaaatacaaaaattagccgggtgtggtggtgggcgcctgtaatcccagctactcgggaggctgaggcaggagagttgcttgaacccgggaggcggaggttgcagtgagctgaagaccgcaccattgcactccagcctgggtgacacagagcaagactccgactcaaaaaaaaaaaatagaagaatgtattatcatttttttcttatgatcacagagctacacatgtagtaaatgttaattacttgataagattcatgaaaaatgatattctaaaatcttgttaaatttttaaagtacttgtaactttaaaacaattttttttctttacagaaccttattttggggagtaaagtcaattgggcagaggatcctgcccttaaggaaattgttctgcagcttgagaagaatgttgacatgatgtaataagaattcatttctgacatattttacatttctggcaatctcaactcttatttggaatacttctgtgcatttgtctgtccaccgtaattttagaaaagcatatccataacgtttacagttgtagtacagttgtggttagttatttgtagtgggattgaaagtaatttttttctttttatatttctatatttagtttgtttttttgttgttgttgttttttgagatggagtctcgctttgttgcccagactggagggcagtggcgcgatctcggctcactgcaacctctgcctcccgggttcaagcagttctgcctcagcctcccaagtagctgtgactaaaggtgcacgccgccatgcccagctaattttttgtattttagtagagacggggtttcaccgtgttgcccaggctgctctcagaactcctgagctcaggcagtccaccgcctcggcctaccgaagtgctaggattacagacgtaagccaccgagcctggtctagtttgcattttttttctatcagttttataagttaagaaataaaaggaattaatgtta

SEQ ID NO: 358 - DNA, 32744 bp, Homo sapiens
  source 1..32744: mol_type = other DNA
gaacgccaaccgcctgggcctagcgcagcttcctccgcccaccacggaagtgaggcggggatactaaagcgacggagcccggtggacggaagtgggtgttggaggctttaaggtagctttaaattcgtgttgtcctgggagctcgcccttttcggctggagtcgggctttacggcgccggatggctctggacgtgaagtctcgggcaaagcgttatgagaagctggacttccttggggagggacaggtgaggctctctggaaggacggggagggccccaagcggacagccccgcgccgcctccacctttgcgggttttcccgtggaggccagaggtctggcttggctgctcgttctcgttgggggaaaccgtccagacgcacttgctgcccattctttacatcctgggggtgaatccctgaggggcctctccttgctgaagagtagcctggagctggacggagactgacccgccacgtttccagccgccgcgagtctgctcaggaactctgggctctttgcttcgcgaaatgtaaaaatgcaaaaaggcaaacacaaaaactcccataaacttatgttatttctatttttctttctagtttgccaccgtttacaaggccagagataagaacaccaaccaaattgtcgccattaagaaagtgagttacctttttatgttgtttttaagtctccttgaagatgtctgtattattaattgactgatagccattttattagtcttgaccatactctgataatgagttactcatgtcattttcagagacaaaataattaattagtgctttgtgttcccaaacggaactctagggttgaacccgttttaatttctattgaaatgaagaagaagctgtatgttatttttactgcataaattcatatgttgtgggcaagtactgcccatcttttcggtcctcagaactattggataccatgatctttctaggtcactgtttatacctcacctgcatccactcagtgtgtcgtatctgtattttctgtgtacggatttaccatgaaagactttcactagcatgaacaacattgatgtgaggtctaaaatgagttcagtagcttcttatattcattcaaaagacctgggtcggattcagtagcttcttatattcattcaaaagacttgggtcgggccagccgcggtggctcacgcctgtaatcccagcactttgggaggccgaggtgggcggatcacttggggtcaagagatccagaccatcctggccaacatggtgaaaccctgtctctactaaaaatacaaatattagctgggtgtggtggcacctgtctgtaatcccagctactcgggaggctgaggcaggagaatcacttgaacctgggaggtggaggttgtaatgagccgagatggtgccactgtgctccagcctggtgacagagggagactccatcttaaaaaaaaaaaaaaaaagatttgggtcataattacataactcacgttcacctacattgtttcttttaaccttcaaaacaatctataaagtggttaaaagtaaccctattttatacttgaggtacctgagactgagtgactaggtgacttgtcaagatcacacagctagtgattgctgaagctgggatttaaatccaggtgtcctgatgttgcttttgttaccgttgctactttgaatctgcttctcctgcttcaaaaaccctaactccttggaagttatccatatttaacattaattccccctttttttggtcatcttccagcctccaagtactgtcttgcattcatttaaaacctgactgactacttcttctcaattattcctgccataatttttttattttttattttattttattttttattttttttgagacagaattttgcttgttgcccaggctggagtgcaattgtgcgatttcggctcactggaacctctgcctcccgggttcaagcacttctcctgtctcagcctctccagtagctgggactacaggaacctgccaccacgcccagctaatatttgtatttttagtagagacagggtttcgccatgtcggccaggctggtctcgaactcctgacctcagttgatccacccacttcggcctcccaaaatgctgggattacaggtgtgagccactgtgcctggccttctttttttttttttttttttttttttaacttttttactttttttatgtccgtgttttctggtttatgttttatgatccaccactacagccactccctttaaaacccttaactctactgaatctttcttcatctttctttcttttgtggtggcggggcaggaggaggtctcactctgtcgcccaggtggaagggttagagtgcagtggcacagccatagctcactgcagccaccaactcctggactaaagtaatccttccaccccagcctccaaggtagctgggactatagacacatgccaccaagcctggcctagtcatctttttaattctgtctctggttcactatatcatagccacactgacttttctgtccctgtacaaattaaatttattccagtcccagaatcacaggatcattgcatttggtctggcttcttggttggtatattttccgtctagaacatggcatggctgattccttatcatccaggcttcactcaaatgtctcctccatagaggcctttgttcattccagctacatgtatgcctccctccttccctatgctttgctatatttctgtcatcgatgtggcatttgtcgaaatttgaaatcctcctatctatgagtttattgtctgtttaattccattcacactgtacctagggccatggctagtacatttgtagacactgttaaaaatgtattggcctttcagctgggcgcggtggctcatgtttgtaataccagcactttgggagctcgaggcaggcggatcacctgaggtcaggagttcaagaccagcctggtcaacatggcgaaacccctgtctctactaaaatacaaaaattagccaggcatggtgcccctgctagtctcctggcctcaagtgattgtccttgcctaggcctccctaattgctgggattacacgtgtgagtcactatgcctggcctatttcttgaggtgttttttctcccccagttttagacgttgtctatactttctactatgaacattgaggatttggtgttgtagaccttattccaacactcataatttctactcccgttcatttgctaggatgtgtttaattttataaaaagggaaggaatcaataaataagttactctgtactcattcacctgttgagtcttggactttagaaatactgatgtatctcatccttttaaaaagattatgtggaatttgtttcccaatttatttaaccaatcacctattgatggccttttgggttatatctcatttttcagtgtgtgtcttaaatctgtgtatctcaaaacaatatatagtattgcatactttttttttcctttttttttttttttgagacagcaacttgctgtgtgtttccctggctggagtgtagtggtacaatcatagctcactgaagccttgacctcctggtctcaagcattccatctgcttcagcctcccaaccagctaggagtacaggtgcatgccaccgtgccccactaaatttgttgttcttcttgtagagacagggtctcactctgttgactagactggtcttcaactcctgggctcaagtgaaccttccaccttagcctcccaaagtgctgagattacaggtgtgagcccctgtactcagccagtattgcatactttaagctatatatgtatatttggcatattcttctgcaacttgttattcttttttttttattttatttttttttttgagacaaggtcccactctgtcgcacaggctggagtgcagtggcgtgatctcggctcactgcaacctccacctccccaggctcaagcagttctcctgccgcagcctctcaactgctgacctcaactgatctgcccacctcggcctcccaaagtgctgagattacaggcttgagccaccacacccagcctgcaacttgttattctgagtcaacattatttccgaaatcctctatatcgtatgatacatgtagatccagttgattcatgctcgttgattattagattccattatatgactacactgaaattttctatccaaactctcgttgataaacatttaggctgctttttaatgttttcctttaatacattccttctctggatagtcatctgtgagtcatcttgtatgcaggtttgagtttctctagagaatgtatctataattgaaacaaattatgaattgatgcttcagagtatcacaaccatcagctttaccagatatggtcaaattgctctccagaatgattggaccagtttactgtcccaccacattctcaacatcatttgcattgtcagactttaaaacgtttgtcaattacgtagattgaaaatggtatgtacttattgtttcaattaacatttctctgattactggtaaagttcatcatcttttcttacacttactggcttcttagattttctcctgttttctgttggattacgtactttttttgtcctattgatttattggacttattcatactttttgttttttttaatagagacaaggtttcactttgttgtccagtctggtatcaaactcctggccttaagcaatcctccagcatcggcctcccaaagagctgggattacaggtgtgaaccacagcaaccagccagaattcttttatattctggatattgatcctttgtcagaaatacacattgcatatatcatttcccagtctttggcaaggcttttagtttatttatggtatctttgaggtactgaaagttaaattttaatatgattgaatttgttaatttttttgaaatctttaaaggcttcctttttatgtgctttcctgtttctggattacaaagaattctgtacttgtaaaatttttaaaatattgattttaatacttagatctttattccatcaacaagtttttcctttgttgtatgatatgaggatccagtattttttttttttttcaatagagacagggtctttctatattggccaggctggtcttgaactcctggcctcaagccatcctcctgcctcagtctcccaaagtgcttggattacaggcatgagacactgtgcctggctaagattgagtattttttcttcagttgtcccagtactattaatagtctgtccttttcccaatgagttgtaatgccaaattccccatacccttgcaataccaagttccagtattggaacttgggtccaatttctgggcacactattctgttccagtggtgggtttgtttgttttttttcccattgctgttgaaatattacagtgactttaagaagtcttaaaatctgtcaacttccatacaccttgtttttcttcttcaaaatcattttggctactctatgagacagttgggaaatgtgaatcaggaaaatttgaataggaactagatattagatgctactgtggcattattgttaattttgttaggtgtcaaaatggcatggttatgtaagaatgtctgtattttagagatgcttacttaagtacgttggagtgaaatgacatgaagtctggggttttaaaatattttaggcaacaaaaaggagaggttggatgaatgaagtaagtgtggcaaaatattggtcactgttgaatctgggtgatggagtagagggctttatgaaattactctattttttattatgtgggaaaatgttaagaattttaaaatcaactgttcttagctccttccttttttgagacggagtctccctctgtcgccaggctggagtgcaatggcgcgatctcggctcactgcaacccccgcctcccaggttcaagcagttctcctgcctcagcctcccgagtagctgggattacagacacatgccaccacacccagctaattttttgtatttttagtagagacggggtttccatgttgaccaggatggtctctatctcctgacctcaagtgatctgcctgccttggcctcccaaagtgctgggattacaggtgtgagccaccgcacctggcctcttttatttttgaatggtactctttgtgtatatgcaccacattttctttattcattcatttgttgacagacgcatagattgcctccaaatcttggctattctgaatagtgctgcaataaacatgggagttcagatatctcttggacatacagattctgttggcatatatacatagcaatggaattgctagatcaaatgatagttctatttttagttttttgaggaacctccaaactgtcctccatagtggttgtactaatttacattcccaccaacaatgtacctagggttcccttttctccacatccctcaccaggattcatccttatcttttggataaaagccatttaaacttaggtgagatgctctctcattgtaggttttttcttttttttttttttttttttttttgagacggagtcttgctctgtcacccaggctggagtgcagtggcgcaatctcggtttactgcaacctccgcctcctgggttcaagcaattctcctgcctcagcctcctgagtagctgggattacaggtgcacactgcatcaccacacccggctaatttttgtatttttagtagagacgtggtttcaccttgttggccaggctggtctcgaactcctgaccacgtgatccgcctgcctcagcctcccaaagtgctgggattacagacatgagccaacgggcccggccctcattgtagttttcatttgcatttttctgatgctcagtgatgttggcaccttttcttatgctgtctgccatttgtatgtcttcttttgagaaatacctactcagatctttcgcccatttttaaattggattattagatttttttcatatagagttgtttgagcttcttatatattctggatattaatctcttatcagatggatagtttgcaaatattttctctcattctgtgggttttctcttcactgtgttgtttcctttgctctgcagaagcatcttaacttgatgtgatcccatttgtccatttttgcattggttgcctgtgcttgtggggtattactctagaactctacccagtccaatgttctggagaggttttccactgttttcttttagtagtttcatagtttgaagtcttcaacttaagtctttaatccattttgatttgatttttgtatatgatgagagatatgggtctagtttcattcttctgcatatggatatccaattttcccagcaccacttatttattttgtttgcaacaaagaaagagtttaattgtcacagggccaaccaagtgaggaagacagtagataattctcaaatctgcctccctgagaattcgggggctagggtttttcaaggatagtttggtaggcagtgggctaaggaatggggaatgctgattggttgggtcttggataaaattgtagagagttgaaactgtcttcttgccctgactcagttcctaagtagtggtcacagaaccagttgagtcagtttcttcatatgggctcctggtccaagtggcaccagttggtccatcaaaatgcaaggtctgaaagataccccaaccaccagttttacgttttacaatagtgatgttatctataggagcaattgtggaggttgcaaaattcttgttacttttggctacataactcctaaacaataattctaacctcgtgtaattttacaaagatgcttttagtctctgagcaaggagtgggttaattttgggaaaggactgttaatcatctttgttttaaagctaaactttaaactgaatttctcccatagttagcattgccaacactcaggaatgagcaaagagcttgtgagattaaaagcaaagatagggccaggcgcagtggctcatgtctgtaatcccagcactttgggaggcggaggcaggcggatcacctgaggttgggagtttgagaccagcctgaccaacatggggaaaccctgtctctactaaaaatacaaaattatccgggcgtggtggtgcatgcctgtaattccagctactctgcaggctgaggcaggagaattgcttgaacccaggaggtggaggttgcagtaagctgagattgcacctttgcactccagcctgggcaacaagagcaaaaactgtgtctcaaaaaaaaagcaaagatggagtcagctatatcacgttttactcactgttgtaatttttgcaaaggtggtttcaaaaatatgcctttttggcatgttgattgttgtgagctggttatcctgagaaactgcagatacaggagtagttctgaaaagttgcccttttttaagggaagtgtacgtttgtaaaggagtatctctttgacagggtgtctccctctctgcaccaggaagagaagaaagactagaaagactaaatctctagagactgtcaatgcagaaggcatcaacttaagtctgtacagcaaacctaacctctgcttaaggcacagcaccatttattgaagaaactgtcttttcctcattgtatgttattggcaccattgttgaaaatgagtttgctgtagatgtatggatttttttctgggttctctattctgttccattggtctgtgtgtctgtttttatgccaatatcatgctgttttggttattatagctttgttgtatgaagtcgggtaatgtgattcctcccttttgttcttttttcttaggatagctttggctattctgggtctttgtggttctacacaaattttaggattgtttttcctatttccatgacgaatgtcattggtatattgatagagattacattgaatctatagattgctttaggttgtatggacattttaacaatattgattcttccaatccatgaatatgaattatctttccatttttttggtgtgttgtcttcaatttctttcaccaatgatagttgttttttttttttttttttttttttgagatggagtctcgcactgttgcctgggctggagttcaatggtgcaatctcagctcactgcaacctgtgcctcccgggtttgcgccattctcctgcctcagcttcctgagtacctgggattacaggcgcataccaccacagctggctaattttttgtatttttagtagagacggggtttcactatgttggccagactagtcttgaactcctgacctcgtgatccgcctgccttggcctcccaaaatgcggggattacaggcgtgagccaccatacccgttcagtagtttttattttagagatctttcacttaatttggttaattcctagatatttaattttatttgtagctgttgtgaatgggattactttcttgatttctttttcagattgttcactgtgggcatatagcagggctactgatttttgtatgttgatttttgtatcctgcaacttttgtgaattatcagttctagtcgttttttggtggagtctttaggttttcccaaatataagatcatattgtcaccaggtgtggtggctcatgcctgtaataccagcactttaggaggccgaggtgggcggatcacctgaccaacatggagaaacctcgtctctactaaaagtacaaaaaaaattagccaggcatgatggcgcatgcctgtaatcccagctacttgggaggctgaggagggagaattgcttgaacctgggcggtggaggttgtggtgagccaagatcacaccattgcactccagcctgggcaacaagagcaaaactccgtctcaaaaaaaaaaaaaaaaaaaaagatcatatcgtctacaaacaagaagaatttcacttctttgcttgctcttgctaggacttccagtactatattgaataacagtggtgaaagtgggcattcttggtgtgttcaagctcttaaaggaaatcagtttttccccattctgtatactgaccatgggtctgtagtatatggcttttattatgttgagatatgttcttctatacccagttttttaagagtttttatcatgaagggatgttagattttatcaaatgctttttcagcatcaattgaaatgattatatagtttctgtccttcatttgttgatattacatatcacgttgattgattatagcatatgttgaaccatccttgcatccccaggataaatcccacttggtcatgatgatctttttacgtattgttgaattcagtttgctagtattttttgaggatttttacatgaatgtacatcaggatattggcctgtagttttcttactttgatgtgtctttgtctgattttggtatcagggtaatactggccccatagaatgagtttggaagtatttacttctctgtttttttggaatagtttgagtagtattggtattagccccctcccctcccccgtcctccctccttttcccctcccttccccctccccttccccctccccttcccctcccttaccctaccctcttatttttttaattttttttttctcgctctatcgcctacccaggccctggagtgcagtggcgtcatctcagctcattgcaacctccacctcctgggttcaagtattctcctgcctcagcctcccaagtagctgggattacaggcatgcaccaccacgcctggctactttttatatttttagtagcgatggggtttcactatattgcccaggctggtctcgaactcctgacctcaagtgatcggcctgcctcagcctcctaaagtgctgggatagccactgtgcccagcctagcccttcttcaaatgtttggtaaaattcagcattgaagccatcaggtcttgggctttttgctgggagattttttattatggcatcaatctcattacttgttactggcctgtttaggttttcagttttttcatggttcaatcttggtaggttgtttgtgtctaggaatgtatctgtttcttctaggttttccagtttcttggcgtatagttactcatagtagccactaattatcctttggatttctgcggtattggttgtagtgtccccttttttcacatctgtttttatttatttgcatcttctctccttttcttttagtctaaaggttgggtaagttttttagtggtcagggtttttattgggactggtcatgcaggcattttctgcctggcatgtaccaaaaatccagacttaatcatggcgaaaggtgaaagggaagcaaggcacctcttatggtggcaggagagatttttttttctagagcaggagtggaagtttgtttgtttgtttgtttgttttttgagatggagtctcgctctgtcgccaggctgggagtgcagtggcgcgatcttggctcactgcaatctccgcctcccaggttcaagtgattctcctgcctcagcctcctgagtagctgggattacaggcgcatgccaccacgcctggccgatgtttgtatttttagtagagatggggtttcaccatgttggccaggatggtctcgatcttctgacctcgtgatctgcccgcctccgccttccaaagtcctgggattacaggtgtgagccaccgcacccggccagaagtttattaaaaagctctagaagagtaggaaagaaatgaaagtgcacttgggagagatccaagtgggcaacttgaagaacatgtgtccaattttgatggtcttttcaaaacaccaacttgttattttgttgatcttttgtatttttttgtttcaatttcatttatttctgctctgatttttattattttcttctaactttgggattggtttgctcctgcttttctagttctttaagatgcatcattgtttatttgaaggttttgtttttggtttttttttttcatgtaggcagttacagctataaacttccctctgagtactgctttccccgtatcccaaggtttttggtatgttgtgtttccgttataatttctttgaagaaatttttcaattttcttcttcatctgtccattgacccactggtcattcaggagtgtattggttaattttcgtgtattacatagtttccaaaattcctcttgttattgatttctggttttatcccattgtggtcagaaaagatatttgatatggtttcagttttttggaatgttttaagacttgttttgtggcctaacatatggtctgtccttgagaatcattcatttgctgaggagaagaatgtttaatctacagccattggatgacattttctataaatatctattaggtccatgtggtctgtagtgcggattaagtccaatgtgtctttgttggttttctgcattgatctgtccaatggtgaaagtgggggtgttgaagcctccacctattattgtatggggtctgcctctttagtgctaaaaatattttatatatctgagtgctccattgttgggtgcatatatattttcaatttttatatcctcttactgaattgacgcctttatcattatatagtgactttgtcttattttacagtttttgcttgaaatctattttatttaatataactactcctgttcttttttggtttccattggcagtgaatatcttttttccatgtctttcagtctgtgtgtgtctgtatagttaaagtgtgcttcttgtaggcaacagatctttggggcttcttttttttttttatccattcagtcactctgtgtcttatgattgaagcgtttagcccatttatattcagtgatattattgataagaacttttattcctgccattttcttacttgttttctggttgttttgtggtctttccttccttctgtcctttcttcctgtcttccttgtagtaaaggtgattttctctggtggtatgttttaatttcttaatttttatttttttgtgtatctattgttatgtttttagatttgaggttacatgaggcttgcaaataatataacccattattttaaactgatgacaacactgattacataaacaaaccaacaagcaaaaagaaaactaataaaactctgcgttttaactttgtctccccactttgttgtactgtcttgaaaaattgttattgtttttgattggttcattttttatctttctgctggatatgagtagtttacataccacaattacagtgttataatattatgtgtttttctgtgtacttactattaccagtgagttttgtaccttcagatgatttcatattgctcattaacgtcttttctttctgattgaagaactccctttagcatttcttgtaggacaggcctggtgtttataaaatctctcagcttttgtttgtctgggaaagtctttatttctccttcctgtttgaaggataattttgctgaatatactattctaggttaaaagttattttccttcagcactttatatcatgccagtctctcctgtcctgtaaagtttctactgaaaagtctgctgccagatatattgggggctccattatatgttactggtttcttttttcttcttgctgcttttaggatcctttctttttcttttcttttttttctttttgagacggagtttcattcttgtttcccaggctggagtgtggagtgcaatggcatgtcgttggctcaccgcaacctcctcctcccgggttcaagcgattctcctgcctcagccttcccaagtagctgggattatagtcatgtgccaccacgcccagctaattttgtatttttagtagagacggggtttctccatgttggtcaggctggtcttgaattccctacctcaggtgacccaccctcctcggcctcccaaagtgctggaattacaggtgtgagccacagtgcctggcctaggatcctttcttattccttgacttttagagtttgattattaaatatgttgaggtagtcttctttgagttaaacctgcttggtattctataaccttcttttctttttttttttctttttttttttttttttggagacggagtcttgtttttcttgcccaggctggagtgcagtggcacagtcttggctcactgcaacctctgcctcctgggttcaagtgattctcctgccttagcctcctgagtagctgggattaccagcgtgagccaccgtccccaggtcccagtgttccataactttcttgtacttgaatattggtacctatttctgcatttgggaagtttcccgttatccctttgaattaactttcttctttgcctctctctctctacctcctttttaaggcccaaaacacttagatttgcccttttgagcctgtcttctagatcttgtaggcacgtctcatttctttattttttttcttttgtctcctctgttttcaaatagcctgtcttcaagctcattaattctgccttctgctttatcaattctgctattaaaaggctgatgcggctggacacagtggctcatgcctgtaatcccagcactttgggaggccgaggtgggtggatcacttgagctcaggagtttgagaccagcctgggagacatggtgaaaccccatctctacagaatatagaaaaattagcttgacatggtggtttgtgcctgtggtcccagcttcttgggggggtctgagtggagaggatggctttagcctgggaggcggaggttgcagtgagccgagattgcaccactgcactccagcttgggtgacagagtgacagagcaagactctgtttcaaaaaagggaaaaaagtgtgggtatggtggctgacactagtaatcccagcactttgggaggccacggtgggtggatcatttaggtcaggagttcgagaccagcctgaccaacatggtgaagcctcgtctctactaaaaatacaaaattagctgggcatggtggttcatgcctgtaattccagctacctgggaggctaaggcagaagaattgcttgaacccaggaggcagaggttgcagtgagctgagattgtgccattgcactccagcctgggcaacaagagcaaaactccgtctccaaaaaacaaagactgatgcattcttgagtatgtcacttgcatctttccactccagaatttctgcttaattctttttaattctttcaagtatttgttgaatttacctgataggattctgaattccttctctgtgttatcttgaatttctttgagttttctgaaaacagctatttcgaattctctgactaaaaggtcacatatctttctctgcaggattgacccttagtgcctaatttagttcatttggtgagggtatgttttcctggatggccttaatgcttgtgagtgttcactgccatctgtacattgaagagtcaggtatttattatagtcttcacagtctggacttgtttgtaccattcttattggaaggtattccaagtattcaaagggaatagagtgttgcaatctatgtctttggtcactgtaatcgtatctgcattagggggtaccccgaacccagtaatgctgtagttcttatagacttatagaggtaccatcttggtggtcttggataaggtccagaattctctgtattaccagactctgtattaccattctttcttcccctttcttcaggcagaggagttgctcctgtgtccatcagcaccacaggcccatgaagaggggattattgccagggtaccaccagtgttcacttaaggcccagggctcctcagtcagcttatgctggatgctgccaggcctgggactcatcttcagggtagtgggttcccctctgttccaggggtaggtccagaaatgccatccaagagccaaggcctggattcatggaccctagtagcccacctggtgctcttccccagggcaaccaagctggtccctaagctgcaagacagaatctcctttactcttccctctcattttctcaaacaggagtctctgctggtagccactacagctgtgaatgtgctgtgtcatacctgaagccaatatgtctcggagtttcacctgaggcccatggtgaggccctggttaccactgctgattattcagggcccaggggctctatagtgagcaaatcatgaatcctaaatggtctactttaagaaattctgtgggtttttttgtttgttagaagtagaatcgcctgttctgttgcccaggctggaatgcagtggtgcaatcatagctcactgcagcctcgaactcctgggctcaagcaatcctcccacttcagccttccaagtagatggaactacaggcacatgcaaccatgccccggtaactttttttttttttttttcgagacagagtctcgctctgtcacccaggctggagtgcagtggcacgatctcggctcactgcaagctccgcctcctgggttcaagcgattcttctgcctcagcctcccaagtagctgggactacaggcgtgtgccaccatgcctggctaatttctgtatttttttaatagagacggggtttcaccatattgtccaggctggtcttgaactcctgacctcgtgatccacctgcctcggcctcccaaagtgctgggattacaggcatgagccgccgcacccagccaatgccccagtaactttttacattttttgtagagacggggtcttgctatgttgcccagactgatctttaactcctgtactcaagcaatcctcctacccaggcctcccaaaatactgggattgcaggcatgagccacttgtgtttttgtttttttgtttgtttgagacagtctctctctgttgcctaggctggagtacagcagtgtgatcatggctcactgtagcctgggctcaagcaatcctcctgcttcagcctcctgagtacttgggactgtaggcacgtgccaccactcctggctaatttttaaaaatgttgagtagacacaaggtcttgctatgttgcccaggctggtcttaaactcctgggatcaagcgatcctcccaccttggcctgtcaaagtgttggaatttacaagtgtgagccactacaccccgccagtcttttcttgattactgacagttttctaaaaagcagtgagagaatgttctttacccaggtaatttattttgtgtaagactaaacctgttaatgtaatttgttatgtttattcagagtaacaacattttaaccatcacaatttgtaattttgctttttgaaaaatgtggtgtctaagagcatattattgggcttattaccaactctacagcatgttattttctgtatctttcctcccaagtagcctaatttgaagttacgtatttatttttaatcagggtacccttagttatttggtccacattgaaccttgaaaaggtaaaatagatttttcttaattttattatttgaatgtgtagttcagaaacttaagggacaagggtaggtatttgattctctcttatattgttaattttatctttctgatcatgattcctactctctttttgcctagtaggtacatattggttgctaattgtttttttttctgtggcgaagtatttgaagtatttacacattattcattgattctaaataatttaacacatttttaatatatttgggtttttttccgtttctaccagatcaaacttggacatagatcagaagctaaagatggtaagtatttcatgtaatctgacagataggaaaagttttctccttttttttttttttttttttttttttttttaaaaagacagggtcttgctctgtcacccaggctggagtactgagacacaatcgtagctcactgcagcctcaaacttaggtactcaagcagttctcccacctcagcctcttgagtagctagggctgtaaacatgtgccaccacttgtggttaatgttttattttttgtagagatgaggtctggctgtgttgctcaggcttctctcaaactcctggcctcaagctatcctcccacctcggcctcccaaagtgctgggattacaggcttgagccaccatgcccagcataaagttttcattctcactgaagaaacgagcaaagtatgaattaataagttagtaatggttctggatagagttactgcagggtccccgaagagtaaagatagactcagcatagagaaggagtatttggtgatttttacttactggatattcagagaaacattccaaatcacccacataaatggaaggcagcaagcttaattagtttgtctttctgtcttcattactgttttaggtgttacaagccattgttttttctgtttctgagtttctaattactttgaaaattcaggatacattttcatgaaagtacataaagcttactatggaatagatacatgaggaaattatttcattaaactttcttccaaagtcttatttattaggattcatcataaaatagctcttacaaaagagacccattgtctgtgtaagtgccaatactatatcttatttttattttgtttattttttttgagacagagtcatgctctgttgcccaggctggagtgcagtatcgcaatctcggctcactgcaacctctacctcccgggttcaagcgattctcctgcctcagcttcctgagtagctaggattacaggtgcacaccaccatgcccagccaattttttgtatttttagtagagatggggttttgccaccttggccaggctggtctcgatctcctggcctcaagtgatctgcccacctaggcctcccaaagtgctgggattacgagccaccgcgcccggcctgtatctaatttttaattttgaaatctgtcatttgtattggaaaatatactatcttatcactagtttgcttttagcacaaacaatatgccactaatatttgtagggcaagagtagggaagcttatcacctatatgctgcacacttatatatgttgttagtctagtagtggtgttcagatcctggtatagataaggtgaaatatttttcaccatttgtcgtagtctttgttaagctattttaaaagtaaagcaatattggcctggtgccatggcttacgcctgtaatcccagcactttgggagggtgaggtgggtagatcgcctgagctcaggagttcgaaaccagcctggccaatatggcaaaaccccatctctaacgaaaatacaaaaaattagccaggcgtggaggtgcacacctgtggtcccagctactcgggaggctgaggtgggaaaattacttgagtctgggaggtggaggctgctgtgagccgagatcatgccactgcactccaacctggctgacagggtgaaaccccatctcaaaaaaaataaataaataaaaataaagcaatgtaaaagaacaacagatttgacataaaaattgtcaaagtagcccttatttttgtgggtaatgttcactattttctgagattactaacctttctttaaaaatatgtgtttgtggctgggtgtggtggctcacgcctgtaatcccagcacttcaggaggccaaagcgggtggatcacgaggtcaggagttggagaccagcctgatgaacatggtgaaaccccgcctttactaaaaatacaaaaattagccgggcgtggtggcgcgtgcctgtaatccctgctactctggaggctgaggcaggagaattgcttgaacccgggaagcagaggttgcagtgagccgagatcacgccactacactctagcctgggcgacagagcgagactccatctcaaaaaaaaaaaaaaaaaagaagtgtttgtaaggtttgagatttcagaattattcactttttgctttgcctttttatataggtataaatagaaccgccttaagagagataaaattattacaggagctaagtcatccaaatataattggtgtgagtatgatcaaaactgttactgggatttgggactctgccttttcttaatataatggatgttgattaaaggctcagcaagatgacttgttctggatgagccttgtagaagcttaaaggaaatacattttctatcccagttgttttggtaggcattgtcttcaaaactataccactgattaaataaatgaaatattgacatgtaggctaattttgtcggaaataattttgaagtctagggagctctagcatgtagtggctgagagtgtcaacctgaattcaaaacctttctttctgcctgtgtgagaccttgagtgtgttcactcacaactccccagagtccctgcctcatagggaagttgtgagactagccaattgaatagatgtaaagtatctggaatagtgcctaccatagaaaatgtattcattcattcaatgatagctgctgttatttagaggatttcttaagaatcacatttgggacttttcttttgaattggagactggaatgaggttttcattggttaatttcttaattctaactccaaatatttggggaaagaggttgggtatttttttaagtaaaatttaatatttttatgcttcaaaatactaattcctttagtactgtccaaaaaaggacaaatgtcaaatttaatcaaatgatttaagctttatagggaattaccaacagtttaaatgctttttaaatttttaaaaattgcctcagttgctatgatactgtcaggtattaaatagtgaatcacattttaattttttaactttgcagctccttgatgcttttggacataaatctaatattagccttgtctttgattttatggaaactgatctagaggtaagattaagattcctggagaaattcctttgtcccagtttatcaaacaagaacctaaatatttgttttctacccaagaagatactggtagtaaaagaaaaaaagcttaattttgttgaaatttggatgtactctgaggcaaaaggatctctagttattttcttctaatcatttagtgatatccccagtgttacatacaaagatttggatttcattggcatttctgccttctaagttcccatagctagttgacgtcatttttggagaaatgagcattagacctataagatttgtttgcttttttttttttttgtgatggagtctcagtctgttcacccagcctggagtgcaatggcgtgatctcggctctctgcagccatcacctcctgggttccagtgattctctcacttcagcctcccaagtagctgggattacaggtgccaccacgcccggctaaattttatattttaagtagagacggggtgtcaccatgttggccaggctggtcttgaactcctgacctcaagtgatctgcctgcctcagcctcccaaagtgctaggattacaggcatgagtcaccatgcctagcaacctataagaatttaaaatttatttctggccagtgcagtgactcacgcctgtaatctcagcactttgagaggccaaggcaagaggattgcttaagcccaggagttcaagaccagcctggaccccatagatcctgtctcagctttacaaattatattaaaaaataaagaaacttatttccatataatcagagtaatgtcattcttttgaaagccaagtttttttgtttgtttttgtttttgttttgtttttttgagacagagtcttgctttgttacccgtgctggagtacagtggcgcgatctcaactcactgcaacctctgcctcccaggttcaagcaattcttgtgcctcagcctcctgagtagctgggattacaagcgcccatcaccatgcccagctaaaatagagatggggtttcactatgttggacgggatggtttcaaactcttgacctctggcgatctacctgcctgagcctcccaaagtgctgggattataagcgtgagccaccatgcccggcctctttcttttagataaatacctagcagtggtattgctagatcacaagattattgattagtggtatcgatcacaatattagtgatgctgttatagatcacaatactaatggtattgatcctggaaggacctatcataataggctatggactcaccactaggctatggattgcaccattgcactccatcctgggtgacagagtgagattcccatctcgaaaaaagaaaaaaaaaagaaacaaaaacgtatgccagaattcagttggtacagatgtttggctttattaataattatcaaaactggaacaatccaaacatccctcattctaactgtacaaacaaactgaaatactactcaggaatagaaacacactattgataaatgcagcaacatagatgaatctgaaatgcattatactaagtgaaagaagccaggctaaaaagactatgtattgaaccatttcatttatatgatattctggaaaaggcaaaatgaaaggaaccagaaaccagatcagcggttatgggggctttggggtaaaggaaaggagtaagtacagaggggcctcagggaatttggggaggttacggaactatgctttgattatagtggtggttacatgactggatgcatttgtcaaaactcatggaactatacactaaaaagggtatgctttaccttaaatctgattttaaaaaaagaaaaggggaacttttagttcctaactgataaatctagaataaactgacattaggcacagctcataaataatgccatcaaaactcagtcttacgctttaactaagctccattttcttctctgttgcattcttcatgtgtacagttctcaatatggtgttccagatgcttctaggtatatgtttgtagagtttaataatacctgaggaacgaaagtgctttcttttctttgattctagcacaagtacttggcctggttgattgacttgtcttgtatccctgaaccaatcacttggccaggagactgcagtgtgataatggggatgcctgggtcatgtgcctacctctggaggccttaggttgactcagtcctaccttaaccatgtggactaagctgagaagagatggcttcccaaaggaacactaactgctattgtcagaagatgcaagcagaaacaacaggtgtttgctactttcatgcgaaagcagtagaggacaaagcactgctttcttttcaaaccagaaatgctctccctacccatctaactctggagattttgacagggcttcctgaggaaacttagataacctcttttgagagtctcctgtattgatacttacattttaagtctgtaaattgttttatgtggtagagtttatttgaaataataaagggtacctgtatattgtatacttgctttacaggttataataaaggataatagtcttgtgctgacaccatcacacatcaaagcctacatgttgatgactcttcaaggattagaatatttacatcaacattggatcctacatagggtaaggtttttaatattgcttctttatactagtcaagttttatatagccaatttggtacatagtggtctgaatatgtaaattgtttaacaatgaatttatagctgactgttttatcccatctttttgctatatattattcccttcacttgttccagcagttggtgctgtaaggactccatattactttgtgaaatttagaactggaagagatccagtccctcatttttttttttttttttttttgagatggaatcttgctctgtcacccaggctggagtgcagtggcgcgatctcttgctcactgcaagctccgtctcctggtttcatgccattctcctgcctcagcctcccgagtagctgggaccacaggtgcccgccaccacgcccagctaattttttgtatttttttagtagagacggggtttcaccgtgttagccagaatggtctcgatctcctggcctcgtgatctgcccatcttggcctcccaaagtgctgggattacaggcgtgagccattgcgcccggcctcctcattttttaatagatgaagagctaagttgctaagtgacctgaccatggttatattttttttcaaggttggctgctgataatggacagagtattaaaacataggttttgacccaggcatggtggctcacttttgtgttgccagcactttgggaggctgaggcaagtagatatctcgagcccaggagttctagaccagcctgggcaatatagtgaaaactcatctctacaaaaaatacagaaattagctgggtgcagtggtgcacacctgtagtcccagctgctcaggaggctgaggttgggggatcacctgagcccaggaggtgggggttgcagtgagctgagacctcaccactgcactctagtctgggtgacagagtgaaaccctgtctcaaaaaaaaaaaaaagaacataggtcttttggctttaagttcagtattctttgtgctacaatgttgttgtggggaaaaaaatatagagatggtcttggattaactcatacaatgccaaaatactagaaaagtaatgtttcttgtagctctaaaattcaaggtacaaaatacagtttatgaaatagtgggaacattcagcttttagaacaaagctgataatttagctaggtagatgctagctacctagctatttagataagtagctaagaatatataatttataactagtaattctcatatcgtaagtttggaatccctcttaggttattgctgatgtctttttagcatggattttgaagaatgtcatcctcattcttatacattaacaacgtatattatgaaagttcatatttattattaatagtaggaaccatttattgagtgcctactatgagccagttattacactagactacagaaaatatcagatttaatcctcacagaaactctatgaagtatgtaaattatggcttagtgaaattaagttccttaccaaggttatatattataaccaatccaattttgctttgatgggattttatatcagtgggaaaaaaattgattgtttagatttcaggtgttaccttgtttttgctaagtttaaagttatgccaactaaatgtagcactacagtgttctcccctaccctgcttatttgtttgtttaaaacttccgtcatataggatctgaaaccaaacaacttgttgctagatgaaaatggagttctaaaactggcagattttggcctggccaaatcttttgggagccccaatagagcttatacacatcaggttgtaaccaggtaagaatctcttaaagctacatgtgcaggagtttgatcagaaatgagcatcaactggcttctctgaactatcttggcagagttaaggaatcattgttgatagataccgtcttaaaaaatactgccatttggccaggcgcggtgactcatgcctgtaatcccagcactttgggaggccaaggcaggcagacccacgaggtcaggagtttgagaccagcctggccaacatggtgaaaccccgtctctactaaaaatacaaaagaattagctgggcatggtggcgcacgcctgtaatcctagctactcaggaggctgaggcaggagaattgcttgaaccagagaggcagaagttgcagtgagcagagattgcaccaccgcactccagcctgggcgacagagaaagactccctctcagggaaaaacaaaaaacaaacaaaaaaaaaacctgtcatttttatgttaggtatactttaccacgatgaaaaaatacatagccccttttcaaacagagtctaacttaatcctaagacatttaccttgtaaatgggaacaatttatactttaacattttagttagataatctagaatttcagtggatattcttctacctaatcatctgatttattggacccatttttattatgttggtcagtgctgattctgtatccttctatgtaaatgaaaattctctaaacagagcaatgtcttgatatttgaatttttcatattggtaattatattttccatttgtatttttgatgtgaaaaaacagaaaatcacattaaataggaatgatagattttataatttttgtcccagtggcattttgttaatttccaagaccgttttaaggatctgcaaagattttcaaattctgtattttttctttttcttttttgagacaggatctcgctctgttgcccaggctgaagtgcggttgtgcaaacagtactcactgctgccttgacctcttgggttcaagcaatcgtgctacctcagccttccaagtatctggggccacaggcacgccccaccatggctggctaattttttaaagtttttatagagatgggtttcgccatgttgcccaggctggtctcaaagtcctgcactcaagcgatcctcccacctcagcctccaatagttttgggattacaggtgtgagccattgtgcctggccccaaagtctctattttaaattattttgccaccttcttccaaatagatgtcactgagtataaatcacctaagccctgagtaagaagtaggggatgtgagtaattgtttatgtaattgctagagcagttaagctcaacattcaggaactcatagaaacagggacctgtgtacaagagcattgttaacagagctttctcatctaccagtttctcatattttctctgtctgtaaatcaaatgctgctggtaaatcaaattaagatgaagactctgggaattgacaatgggatttagcagtgtggacatgactgataagcttgataagagcagttttgatggaatggtaaggatgaaagcctgattgaaaaggttctctgtgtgtgtgtgtgtgtgtgtgtgtgtgtgtgtgtatgtgtgtgtggtgttttgttttgagacggaatctggcactgtcgcccaggctggagtgcaatggcgcgatctctgctcactgcaacctctgcctcccgggttcaagcaattctcctgcctcagcctcccaagtagctgggattacaggcgcccaccaccatgcctggttaattttttgtatttttagtagagacgggtttcactatgttggccaggctggtctcaaactcctgacctcgtgatccgcccgcctcggcctcccaaagtgctgggattacaggcgtgagccaccacacccggcctgaaaaggttttaagagaggatggaagaaaaggaattggagacagtaagaatagacaattctttgaactgggcagagaatgaggaggcacctattaggggaggtagggtccagagaagtttaagactggaaaaatactggtatgtttgtacattgttgggaaaagtctagtagaaaacaaaagactgctgtaggagaaaaaggagagaactgcaagagtattatatttaaaacttcatgaaagagtatggtatctagtccttaaagtaagggattgcctttaaaaacagaaaacagacaaggatcgttcatccctagagatagaagtgctttgataatttcatgctaaaatgatactaattctttttgttctttaggtggtatcgggcccccgagttactatttggagctaggatgtatggtgtaggtgtggacatgtgggctgttggctgtatattagcagagttacttctaagggtaagtctaaattaatgtacgcactttaatattgttgttgcagttatttgttctgacagtttgtataagaattcttgtcctaggccaggcatggtggctcacgcctgtaatcccagcactttgggaggccgaggcaggtggatcacttgaggtcaggagttcgaagccagcctggccaacatggtgaaaccccatctctactaaaaatagaaaaattagctgggcatggtggcgggtgcctgtagtcccagctactcgggaggctgagacaggagaatcgcttgaacctgggaggcagaggttgcaatgagccaagattgtgccactgcactccagcctgggcaacagagcaaggctccatctcaaaaaaaaaaaaaaagaaaaagaaaaagaaaagaattcttgtcctgccaatgtctttacaacaaaaagcctacaaatagtccaatttttaaaaagccaaatgtagcattttttaatgttaatatgaaatgagaatatcttccatttaggacaataagaactttactgtagaagttttatacttcagaacatagaaattcacttgtaatatggcagtatctctataacaactaaatatgttcagataaacttttgtcctcctgagggtttttttgtttgggtctgttttaagtgcgctttaggaaatgtataataccaaccactgcagctactactctgtataacttaagccttgtgtgagaccattattttagttctgttgaaacagaacagatacaatgttactatagcatttctgtgactgagaccatcatcttacagtaaaaaaaatcccctgcttcccctcaccagagagaaagatgctgacttggaaacttctctttagctatgaagtttagatctccagaaagactagcccttacgaatgatgaaggtaaagggatacaggggaatccttctgaagctagtttttttctctccatattctgacccctgctctccctctccttaagccatatgtatttaaagaaattcaaaccaagattgaatagcttttttatctccttgaacacagaaaacaacttttgtacaccaaagagaaaaacactaaactaaaaatgtttagtttaagcatagtggtggctcacgcctatagtcccagctacttgggaagctgaggtgggaggatcacttgtactcaggagtttgaggcaagcctggacaatatagcaagaccccaatctcttaaaataaaaaaaagtaaattctgtgcatcattttgagaaacttacccaatgggcatttgtagaagaaacccacacattcaaacttggaaggtaatatgggaatcacagtgctaacagggggtcctgtgaatcagctggcatgataactgctacttacctgaacatagagtataccagaaattcacactgagaatttatcaaccaccacaatccattcatggccaagaagaaaacagaattccatagcccctaatgttatgactgatcactccattgagaaagcaaatgaagagagacagcagttgagagtagacaggttagagattgtggacctgttaacaatcatacttggaaatttattagccattggcattgttgctggaatcatctttaaagttataaggaaaatgacatgcagactaaagaattgtactcttctgccataccttttgtcctattttaagctgttcttgtgctcaattgaaaaggtagaaatgttgcccatatgaatgcttagccagggatcaccagatagttattaaggatcttcagatagtaatgaatacttccaaaatgaaaggcagactgaaacaaactaaaaagaaacttggaaaaaatggaaacaaccaaagcagaagaaaattcaccgcccccagccccctttccaaatattcagagatctaagagattatagtgcatctatagaataagcacaccatacttttttaaaaggggaacaataaaataagagacacttgaactattaaaaatagaagatagccaaaagcaaacaaaaacagtgaaaggaatgggaaagtaagctgcaaaactctttcattaactaaaatcaaaagatgaagagatggctaggcacagtggtacatacctgtggtcccagctacgtgcgaggctgaggcaggagaatctcttgagcccagcagttcaagaccagcctggataacattgtgaaaccctgtctcaataaaaagatagatggactatagtagagaaaagataaaattaacagattgatccaggattctagaatgtaccaacagaaaacaaggaaaatggagggtaggaaatctcaaaatagtgaagcactgctagatgtgaatcgtcagactaaaagtgccatgaagagtacaattatgaggccgggcgcagtagctcatgcctgtaatcccagcactttgggaggccgaggtgggtggatcacccaaggttgggagtttgagaccagcctggccaatatggagaaacactatctctactaaaaatgcaaaattagttgggtttggtggcacatgcctgtaatcccagctactcaggaggctgaggcaggagaatcgcttgaacccgggatgtggaggttgcagtgagctggagatcacaccattgcactccagcctgggcaacaaatgtgaaattccgtctaaaaaaaaaaaggccaggcacggtggctcacgcctgcaatcccagcactttgggaggctgaggcaggcagatcacgaggtgaggagatagagaccatcctggctaacacagtgaaaccccgtctctgttgaaaatacaaaaaaaattagctaggcgtggtggcgggcacctgtagttccagctactcgggagactgaggcaggagaatggcatgaacctgggaggtagagcttgcagtgagccaagatcgcaccactgcactccagcctgggtgacagagcgagactccgtctcaaaaaataaaaaaaaaaatgagtacaattatgaaaattacaaagaaaactttcaaaaaaaaattctaaaggctctgcatgaaaaaaaaaaacctgtgccaagacacactgttgtgaaatttcagaatacgaaggggtaagaaaaatattttatttgcacagagaagaaaagcagcatacatagaaaagaaaataaagtattagggaaaaagaatggcatgagccttctcaacagcagcactggaatctggaagtgttcacattgtgagggaaaatgatgctcaacctagaattctttgcctgttcatattttcagtttgctctgagggtaactacaatttattacatcagaaatttacatctaggccaggcagggcagctcactcctgtaatcccagcactttgggaggccaaggcgggtggatcacttgagctcaggagtttgagacccacttgggcaatgtggtgaaaccctgtctctaccaaaaatacaaaaattagccgggcatggtattgagtgcgtgttttcccagctactcaggaggctgagttggcaggatcactggaacctgggaatttgaggctgcaaggaggtgatatcgtgccacatcactccagcctgggtgacagagcaagacactagctaaaaaaaaaagaaaaaaagaaatcaagaaattagccagacttggtagtgcatgcctgtagtcccagctgcttgggaggctgaagtgggaggattgcttgagcctggttgtcaaggctgcagtgagccacgtttgtgccactgcattccagcctgggtaacaggctggggttcacctttaattgggctctgcaggcgctgccgcactctccacctggtgtgtatagggcatttggggcctttagagggcgcacttgcggtcagcaggctgaagaggctgcggcggcgaaggctggggagctgagctgagctggtgcagagacagcacaggagaaaaacagaaccgaaaaattcacaccgaattagaggagacagaccttgtctcaaaaaaaaagtttagggctgggtgcggtggcttatgcctgtaatcccagcactttgggaggccaaggcaggtggatcacctgaggtcaggagttcgagaccagcctggccaacatggtgagacccggtctctactaaaaatacaaaaattagctgggcatggtggtgggcgcctgtaatcccagctactcgggaaggtgaggtgcttaaacccacaaggcagaggttgcagagagtaaaccaacgggaagacatgagatgcagggaacataagattcaacacaggaaaaaggcagttcaaattctcatttaatagtgaaggaaagttctgggaaagcaggtatgcatcaggcctggagagtagctagtccagattggagcaggtggggtgaggacttcagcaggggtggcttccaggaaaaaaaaaaaaggaaccgatggatatgattggtttagtcatatagaaatcgatatttaataactggaatatttagcttttatataaaccaagttgtcaaagagcaggcattaggagttggtggcggagggctaggaaatcattacctttaggaaaaccaaattgtataagaaggggaattaatcttaattttggctctgcactgagcaaaagttacgtaattatcaaaaatgagagggagatgatgggtcaaagaaccaatttttattataagtctttagtactatttagtgttttaacaaggttcatgtatttaatacaaataagacattttaaacacacagcttaagtcccaaagcagctctttctttagggaaaaatagttttcttagtatggatattttcaaacatgcaaaagcaaagactagtaaaatgagcctctatctatactcatcaaccagtttcaatagtttcaacatatgattcattttatcagtactctcccacactagatatttttgccacaaattccaaacatgtaattttatccatgtttctttagtatttttctctataaggattccttttttttttttttttttttttttttttgagacagagtctttgtcgcccaggctggagtgcggtggcgtgatctcagctcattgcaacctctgcctcccaggctgaagtgattctcgtgcctcagcctcccaagtagctgggattacagccgtgcaccatgacacccgcctagtttttgtattttttagtaaaaatggttttgtgatgttgaccagctggtctcaaactcctagcctcaattgatcc

SEQ ID NO: 359 - DNA, 32744 bp, Homo sapiens
  source 1..32744: mol_type = other DNA
cacaaatgtgggagggcgataaccactcgtagaaagcgtgagaagttactacaagcggtcctcccggccaccgtactgttccgctcccagaagccccgggcggcggaagtcgtcactcttaagaagggacggggccccacgctgcgcacccgcgggtttgctatggcgatgagcagcggcggcagtggtggcggcgtcccggagcaggaggattccgtgctgttccggcgcggcacaggccaggtgaggtcgcagccagtgcagtctccctattagcgctctcagcacccttcttccggcccaactctccttccgcagcctcgggacagcatcaagtcgatccgctcactggagttgtggtccgcgtttttctacgtcttttcccactccgttccctgcgaaccacatccgcaagctccttcctcgagcagtttgggctccttgatagcgttgagtggaggccctgccgcgacttggcagtagcttattttgttcactcctctctggctggtgtgggggaggtgggggcattaggccagggtgaagcaggggaaccacttaggagtctgttaagatgatctgaacttcagaacaagatgttattaacagagtgaaagtatttggattctgggtatattttgaaatcggaggcaacaggtttttcagatagattcgataacggaggttatcctgaatagttgaaaagataaagttgccttttgctgaggtgggaaagagaagattgccagtagagcaggtttctcaggagttcagtcttgggcatagcatggtaggggtgaatttggctggagtgagttggagagtaggagaagagaaatccaaggcaacatttgaccagcctgggcaacatagtgtgactccgagtctgcaaaaattagacgggtgttgtggtgcgcgtctgtggtctcagctacctggaaggttcaggccttggaaggctcagggaggtggaggctgcagtgatctgtgattgcgcctctgcactccagcctgggcgacagagccagaccctgtcttaaaacaaaataaacggccgggcgcggtggctcaagcctgtaatcccagcactttgggaggccgaggcggccggatcacaaggtcaggagatcgagaccatcctggctaacacggtgaaaccccgtctctactacaaatacaaaaaattagccgggcgtggtgacgggcgcctgtagtcccagctactcgggaggctgaggcaggagaatgtcatgaagccgggaggcggagcttgcagtgagccgagatcgcgccactgcactccagcctgggcgatagagcaagactccgtctcaaataaataaataaataaataaataaataataaaaacatcggtaggcatatttcaaggaattctatttaaaaaaaatttttttagagacaagttcgctctctgtggcccaggctggagtacagtggcatgatcctagcccatggcagcgttgatctcttggcctcaagcgaccctcctttggagtcgctgggcctaaaggagtgagccaccacgaaattttattataaatggagggtagagaaattgggcaataaatggagggggaagtgagttaagaggaattttaattatgtgtgtgtggttttaaaagaggggggtcttgctctgttgcccaggctgctggggtgccagtggcgcaatcatgaatcactacagccttggactcctggcctcaagctatcctcccacctctgcctcccaaagtactgggattactagtgtgagccactgcactaagataggagcaacatgtttcagcatgtttgtgggttgataggaaagatgagaatgggaaagttgatgtcggaaagaagacaatggctagagcaatgtcctagagtaggtaagaagggatggatttggcctttgttggaaacattagcggttcttttggtgacagctatatagttaacacatctatgatacgtgaatgggcagataggatggcaggagattttgaaagttctcttgattcttactgttctcttagtgaaagaagcaaggttatcagctagaagctgggatgggagaggaaagagaagatgggaagtagatagttctttagaagagtgggcaagggttggactagggaagtttagtggaaatattgctaggcaacataaagagcctacttgagattcgtggtcatgagttgaaggagaccagacagcaagattgtgtatgagggcacccacagagtaaatggagagttgaaattaatgcagttgtgattttaccacgtggatatgaagaagtgagggggagaagtacaaaggagttctcttaatgattgaccatggaatttaagctggctaagaaaggaagtgagaggccgggcgcggtggctcacgcctgtaatcccagcactttgggagactgaggtgggtggattacctgaggtcaggagtttgagaccaacctggccgatatggcgaaaccccatctctaataaaaatacagaaaaattagccgggaatggtggcaggtgcctgtaatcccagctactcaagaggctgtggcaggagtatcccttggacccaggaggtggaggttgcagtgagccgagatcacgccactgtactccagcctggacgatatagtgagacttcacctcaaaaaaaaaaaaaaagaaaggaagtgaggattttaagaccctgagagacagtttaaaaagtgggaggatcggccgggcgctgtggctgacacctgtaatcccagcactttgggaggccgagttgggcagatcacaaggtcaggagttcgagaccagcctggccaatatggtgaaaccttgtctctactaaaaatacaaaaattagccgggcatggtgtcacgtgtctataatcccagctactcgggaggctgaggcagaaaaattgcttgaacctgggaggcagaggttgcagacagctgagatcactccattgcactccagcctgggcaacaagagcaaaactttgtctttaaaaaaaaaaaaaaaaaaagaatacaaaaattagccgggcgtggtggcgcgtgcctataatcccagctacttgggaggctgaggcaggagaatcagttgaacacgggaggcgaggtttgcagtgagccgagattgcgccactgcactccagcctgggcgacagagcaggactcctcttggaaaaaaaaaattagctgggcatggtggcaggtgcctgtagtctcagctactagggaggctgaggcaggaaaatcacttgaacccgggatgtggagtttgcagtgacccgagatcgtgccactgtactccatcctgggcgacaaaatgagactctgcctcaaaaaaaaaaaaaaaaaaaagtgggaggatcaatgtactgccagtcctaatgaagtggaatgattgtccccatcaaatcactagtaggagtaagttgcagagcctagaaggtgatggttaagagagtgggattcttgaaactgcatttatggagaggttgtggttattggttataataaataaatacagttgaagtgagtgagtagctgagatttggggatgtatcagttcattcttacactgctacaaagacatacctgagaccaggtatttataaagataagaggtttaatcagctcacagttctgctgcctgtacaggcttctcttgtggaggcctaaggaaacttacagtcatggtggaaggtgaaggggaaacaagcacagtcttcacatggccagcaggagagagagagaagggggaagtgctacatactttaaaacaaccagatcttgtgagaacgcttatcaggaaacagcacttggggatggtgctaaatcattagaaatcacccccatgatccagtcgcctcctaccatgcccacctccaacactggggatcacaattcagcatgagatttgggtaggaacacagagctgcaccacatcagaggatgtacaagattgtggtggagaggagtttagagacctgcaaatatagggtaattgaagggatcatctacatggatatttaaatcaccaaaaattatgacaggagtagtgttggagagagaactgcgatgtaaacattaaggaatgaggaagagtgactcggtaggctgtaggtgactgcaataggaaacgataatagactgtgagtctggtgacaagattttccttctttctttttttccccccccccgagacagggcctctttttgttgcccaggtgggagtgcagtggcgcgatcacggctcactacaacctcctcccaagctcaagggattctcccacttcagcctctcaagtagctggaactacaggtgctgaccaccatgcctggctactttttgtcaggattttcaaggctgggaattttgagaggggaatggaggagaataatctgaaagtgcaagtaaggagcagggaagatttcttttttcttttttttttttttttttgagtcggagtctggctcagtcgcccaggctggagtgcagtggcgagatctccgctcactgcaagctccgcctcccgtgttcacgccattctcctccttcagcctcccgagtagctgggactacaggcgcccgccaccacgcccagctaattgtttttttgtatttttagtagagacggggtttcaccgtgttagccaggatggtctcaatctcctgactttgtgatccgcccaccccggcctcccaaagcgcttgggattacaggcgtgagccaccgcgccagccagagcagggaagatttcttccccacatctccagtaggtacagtgatatgaagtgtgtggaggagaaaagaggaaacatctatcatttgagatggctgcgaaaggaaaaggcatcctcagggagctagattttacttagagcaagaaatgaagggatgattcagaggttaaaagagtggattttatgaattactcaagggagcacagtggaagtttcaggaagtggtaggagaaggtagaagatggcagggtgttgggaataatttgagaaatctgagctactggaaatgactgagaatcagatataaaggcagtcctggtggtccgttctggctgccgttgctgtgtaacgaatctgccaaaacttagtggcttgaaacaacaaagaacattttattatctctcattgtttctgtgggttaggaatttgtgagagccgtgctgggcagttttcgtgcggctgtctcgtggttgcacctacatagttgctagagctacagtagctggggactgagcagctagggattggcaggctatctctttttttcatgtagtctcatgaagatttctttatgtggtttcaatgtgtgggctggtttggatttccttatagcatggtggcctcagttggattgctgttttgtgatccttttcatccctccttgtcctgtccccagacaaccactgatctactttctgtcaccatagattagcctgcatttttaagaatttttataaacgtggaatgatagagtaccttttttgtcacgtttcttttatttatcatagctattttgattttcatccattttattgctgagtagtatcccattgcatgtatatactatactgtattcattcgcttgcttgtgaacatttgggctttttccagtttgggactgttaacaagtagagccactatgaatattagtgtataagacttcatatagccaaggctggcagatcgcttgagcccaggagtttgagaccagcctgggaaacatggtgaaacctctatttttattttaaaatcaaaaattaaaaattttctataaaaaattttaaagaagactttgtatagacatacgctttcatttttcttgagtgaatacttaggtctcagggtagatgtattttaagtctttaaggagctgtcaaactcttcctcaaagtggtggttgtaccatgttactttttaatataacagagattaattgagcaaagaaaaattcaaaagttggacagcccccacaactaaataggttcagaacagctcccccattttgcattttgaccagcaatgtatgaaagttccatttgctcagtgtccctgcaaacacctggtatggtcagtctttttaattttaggcattataatagatatagtggcttcttgtgattttaattagcatttcctaatgaccagtgctgctgttgatcatttcatgagtgtatttgccatccgtatatcttttttggtgaagtgtctattcaaatcatttgggttttttttttttttgttttttttttttggagacagtgtctcactctgtcacccaggctgttgtgcagtggtgcaatcacacagcctactgcagcctccacctcctgcgctcagtcttcttgtctcagccttctgagtagctgaaattacgagcacacgccacaatgcctggctaattttttaaaattttgtagaaacaaggtctcattatgttgcctgggcttgtcgtgaactcctgggctcaagcaatcttcctgcctcagcctcccaaagattgggattgcaagtatgagccactgcacccggccaacttacccatcttttaattgaatttttttgttgttgaggtttgagagttcttcatgtttgctgggtacaatatctttatcagataggtaacttgcatgtattttctcccggtttacactttggtttttcattttgttaacaacgtctttttaagaacagaaaatcttaattttgctgaaatctaatttttcagttttttctttgatggttttgagagaggaggtaaaaaaagactaggtaagccgatagttagacagagtcctcggtagaacttcccttctaacaaaaagcagcccaagaaatcacttctcttctaacaaggagcagcctggaagatcgggctgtaaacatgtataaggaagcagctctggcacagagggggagcttcctgggtaatcagcaagcttcacatacgtaaggtgggtatgtgaagtaaacacagtatgtgaagtaaacacagtggaccttagtacatactcagataaggaagctggaagcttgcatgttgtgagttgttggggttgcctgcagctgcacggagagaaaggggtacctggggccaggcatgtccaccatggtggctccacctccccttatttagcacatgcacaataggaaagagataagcaatgtggagtagctcaggccaaggacctgcctgcataataaaaggttggggtgggggatgccagagattcacgctctgtgcagatggcaacacctggtcctaactggttttttgctccctatgtgtagataagctacccccttcccattagctcatttataaaaatgcttgcatttcactgtggaatgggaactcttttcaggacctctctctgcaggagagagctagtctctttcttttgcctattaaacttctgctctagcctcacacccttggtgtgtcagcgtccttgatttcctcagcgtgagaccaagaacctcgggtgccaccccaggcaacaaggccatttcagtttgttcttttgttataggcaatccatgatcacagatttttctctcttttttttttttacacagtttagagttttagttttacacttaggtctgtaatccattttgtattaattcttatatgtggctcagtgtaggtggaaatttggtttgtttttgcataaggatttccaatagttttaccaccatttcttgaaactactatgctttctctattaaaccacatttgtaactttagttaaaatcagtcacatatatcacagggctatttctgactctcaattctgttacattgtctattagtgtatattgatgtcagtactacacttttaattactattgcttcagggtatgtcttgtaaaccaaaaataaaattataggccccccccgcccctgcacaaccaactgaatggacccatcctctcagccaagggcattccaaaattaacctgaaaaactagttcaagccatgatgggaagggggagttggacatgtctcatcacaccctactaccttttggaattactgatagaacagactcttaaagtctgaaaagaaacatttacaacctaccctctctgaagcctgctacctgggagcttcatctgcatgataaaaccttggtctccacaaccccttatggtaacccaaacattcctttctgttgataataactctttcaactagttgccaattagaaaatctttaaatcttcctatgacctagaaacctccctacccccactttgagttgtcctgcctttcctgacagaactcatgtacatcttacatatattgattgatgcctcatgtctccctaaaatgtataaaacaaagctgtaccccaccaccttggggacatgtcatcaggacctcctgtggctgtgtcataggagcgtctttaactttggcaaaataaactttctaaattgattgaaacctgtcttagctacttctggtttacagtcttaaagttagataatgtaaattgtccagctttggtttatttttgtccttagtagttccatataaattttagaatcagcttttcaatttaatacactactttcctcttagatccacaattaaatatatttgatgctaacaattctgttttatgtttttcgttttttttttttgagacaagagtttcgctcttgttgcccaggctggagtgcagtggcgcgatcttggctcaccacaacctccacctcccaggttcaagcaattcttctgcctcagcctcccgagtagctgggattacaggcatgcgccaccacgcccggctaattttgtatttttagtagagacggggtttcaccatgttgatcaggctggtcttgaactcctgacctcaggtgatccacccacctcggcctcccaaagtgttgggattacaggcgtgaaccaccatgcctggccagttctgttatttttaaaacccaagtttccctggtcatatcttggttggatgaagcgtattttcaatagattaccctggaaaggctagtgagtacggtattcttctacattttagacttttcttagtcttgctacttcaaggacagctaggctgcatataaaattcttggctcatactttttccccataaatttctatgagaaagtctaatgataactgattttctttattttgtaacttagtctttttgcttagaggctctctgaggatgggagggggttcttcctcccatccctaggaatttttcttttttttaaattcctaatcactagaccaccaggaagattgtttgttttgttttgtttttattcttcagggaccccatttatacatacgttaaataaatactgtttgccaatgtatcaaccattttgcttcttatttatttttgttcctttggttctttttcatggctttgctttggtgctccttagattttcagtcagatgtatttgtccttgggtaccttgtaatcagtattaccttttcttctgtcgctttgttttctgttcgttttgaaattacttgtttcctggtctggcaataacagttgagatatgaggagtttgagctgccatctgtctatgtatcttgctttaagactgcactcttctattgatatcactggccttgattttgtgatttctttatttcttcaggaccacccttcattttctactgtttgcttcctttttttttgagatggagtctcactctgtcactcaggctggagtgcagtgatcttggctcattgcaacctctgcctcccgggttccagcaattctcctgcctcagcctcccaagtatctgggactacaggtgtgcaccaccatgcccggctaagttttgtatttttaatagagacggggttttgccacattggcaggctggtctcaaactcctgatgtcaagtgatccacccaccccacccacctctgcatcccaaagtgctgggattacaggaatgagctgccgtgcccagcctcccccctacccccctttttttctttcgagacagagattataggtgtgagccactggacccagcctgtttttattccttttaccaaatctccaaggaatatcttcccttccaagtgcgaatgtaaccttaagtcagttaacctctttgtgattacttttcttatctgcaaagtgacttaatgatcttaagtactttttttttttgagacagggtctcactgtcaccctggctggagtgcagtggcacgatctctgatctccactcactgcaatctcctcttccctggttcaagcggccctcccaccttagccttctgggtagctgggactacagatgtgaaccaccacgcccagctaatttttgtactttttgtagagatggggttttgccatgttgcccaggctgggattattaagtactttttatcatacagcaagattgacattttatattggaatacatttgtctctatataacggagattaacaggaaaatgacaagcctgggtgcggtggctcatgcctgtaatcccagcactttgggaggctgaggtgggaggatcacttgaggtcaggagttcgagaccagttttgccaagatgatgaaagcccatgtctactaaaaatacaaaaattagcccagcttgatggtgggcgcctataatcccagctatttgagagactgaggcaggagaatcacttgaacctgggcagcagaggttgcagtgagccgagatcatgccactgcactccagcctgggtggcatagcgagactcttgtctcaagagaaaacaaaacaaaacaaaaaaaaaacaggaaaatgacaaaaagtaatattacaactcagtgaattttataacaaacttttttggaattcattgactaatactataccaaatccaaaatactctctagtataccaaatccaactctaccctatagtataaattggattctatttggacttgtctcactaatccctcatacagtgtgttttattttttattgaagtaaaaaaatttgtcattttaaccatttttaagtatatagttcagtaatattaagtatgttcatgttgttgcgcaatagatcttcggaagtttttcgtcttgcaacctgaaactctacccattagcaaattcccatttctccttacacttagcccttggtaatcatcattcttttttttttttttttgagatggagttttactcttgttgcccaggctggagtgcaatggtgcaatctcgactcaccacaacctccgcctcccaggttcaagcaattctacctcagcctcccgagtagctgggattacagtcatgcaccaccacgcccggctaattttgtatttttagtagagaaggggtttctccatgttgaggctggtctcgaactcctgacctcaggtgatctgcccacctcggcctcccaaagtgctgggattacaggcgtgagccactgcgcctggcccattctttctaattctataaatttgactacttagttaccttacataaataaattcttatagttagtgttatttttgcttccatgccttttttgttgttgttcatgctcttacttggaatgcgttctattttgtctacctatgcacatcctgttgggttttttttttttttgggggttttttttgtttttttttgtttttttttcccagacaaggtctcaatttgttacccaggctggagtgcagcggcgccatctccactcactgcatcctcaacttcctgggcccaggtgatcctctcgcctcagcccctgcaggtagctgggactataggcatgtgccaccatgcccagctaaatttggtttttttgtttgtttgtttttgagacagagtctcactctgtcacccaggctggagtgcagtggcacaatctcagctcactgcaatctctgccgcccgggttcaagtgattctcctgcctcagcctcccaagcagctgggattacaggtgactgccaccacgccagctaagttttgtagttttagtagagatggggtttcaccttgttggccatgctggtctcgaactcctgacctcgtgatctgcctgcttctgcctcccaaagtgctggaattacaggcatgagccaccacgcccggccagaatttttgtatttttagtagacacaaggttcttaccctgttgcctaggctggtctggaagtcctggactcaagcaattcacctgccttggcctcccaaaatgctgggattacaagccaccatgcccggcctaaatcctgttgttttgttttgttttattttgttttgttttgttttgtttgttttttgagacagagtctcgctatgtctctcaggctgtagtgcagtggcgcgatcttggctcactgccacctctgcctcccaggttcaagtgattctcctgcctcagcctcccaagtagctgggattacaggcatgtgctactatgtccggctaatttttgtatttttagtagagacagggtttcaccatgttggccaggctggtctcgaactcctgacctcgtgatccacccacctcggccacccaaagtgctgggattacaggcgtgagtggtttttatttcttaggccggtttcctccatatgatcttgcagtagacattaatttctttcctttttaattaaaatactgtttgtatttcacattttgatgtttgttaagatttgttttatattgttttttgttttgtcttgtgtgatagtcttaaatccctagttagataataactggagagtaccatgtttctatatatctctcagtgacttgcacagtgctagcagatagtgctaaaaaattatttattattattattattttgttattgttgttgttgttgttagacagggtcttcctctgtcacccaggctagagggcaatgggatgatcatagcttactgcagcctccaacaactgggctcatgtaattctcctgcctcagcttcccaagtagctgggattacaggcatgagccaccatgtctggacaaaaatatttccaggtgcagtggctcatgcctgtaattcccacacttgggaggccgagcgaggctggaggatcacttgagcctaggagttcaagaccagcttggctaagatggcgagaccccgtccctacaaaaaattttaaaaactagccaggcatggtggcatgcacctatattcccaactactcagtgggctgaggtgggagggtcatttgaacacaggaatttgaggggagaaaaaaagaagagagaaagagaagtgaaggaaggaagaaaggaaggagggagggagagaagaaagaaacgaaagaaaggaaaagaaaaggaaggaaagaaaattggtaccaggaaagcaggaaagggaaatggaagtaaaaaaataataataataataaaatgaaaattggttagtcactattaacaatttgtatccttataatctggaaacattataatttcaaaagaaaaaatattctttggatcataggttctgaggtcagaacagcattcccgtagtctagatgaagtcaagttttatctgatcttaattgaaataaatatagctggccttgaacaaatctactcatggtatgtggataggaattaaattgtaggggcattcacttgatggcattcattcttagaacatttacctatgtctagcttttggagtaaagtcacataacctctaaccaggtaagtttcctgtggctttatttaggattttaaatactcattttcagtgtaattttgttatgtgtggattaagatgactcttggtactaacatacattttctgattaaacctatctgaacatgagttgtttttatttcttaccctttccagagcgatgattctgacatttgggatgatacagcactgataaaagcatatgataaagctgtggcttcatttaaggtatgaaatgcttgcttagtcgttttcttattttctcgttattcatttggaaaggaattgataacatacgataaagtgttaaagtacatgttattcagttttcattttgaagattagatggtagtatgagttagttaaatcaggtgatatcctcctttagaagttgatagcctatatatgtcatcctttgtggaggcaatttaaataaaatttaaaacatttattcctggctgggtatggtggctcactcctgtaatcccagcactttgagaggctgaggcgggtggatcacctgaggtcaggagtttgagaccagcctggccaacatggtgaaaccccgtctttactaaaaatacaaaaattagccaagcatggtggcacgtgcctgtaatcccagctgcttgggacactgaggcaggagaattgcttgaacctggggggcagaggttgcaatgattgcaccactgcactccagcctgggcgatagagtgagactccatctcagaaaacgaacaaacaatgtattccttttagtatttttacattgtatcaaactatggaagtcctctaattgagattaataagaaaaagacaatctgaattataattttaaacatttaacaagcatgtagtaaaataatgatgaagataaatagcattagtacagcaattaatatttgtagcatgctgacagtgctctgtgtgcgtttcatatattaaattactctaatcatcccaaatcctgtaagttgggtatcaattcaagtgttcctattgggtaggaatatacagttcttttaggaaatgtagtatggttctgtgtctcaaacaggacacttacacagttggccaacatcatcaccttctccattctctgagatgtttagtcttactgagcactaaatatgggtcatcaatagtccagactaccttgagcaaacaatagtccagactaccttgagcaaacagagcatatactcatacagtgtataaagagcaccaagcatacagatttcatgtctttctcatagttactcttgtaacatgagctaaagatcagacctctatgtcacctttgtaactgatttctagatttttttttttttttgagatggggtcttgccctgtcacccaggctggagtgtagtggcgtgatcatgcctcattggagccttcaactcatgagctcaaacaatcctcctacctcagcttcctgagtagttgggaccacaggtgtgtgccaccacacccagctcatttttgtattctttgtagagatgcagtctcaccctgttgcccacgctggcctggaactcctgagctcaaaagatccctccgccttgaccttccaaagtgctgggattacaagcatgaaccactgcacccggcctagatttttaaatgtgctttccagtatacactgaaactagaagtcgactaaagaattaccaagagaattctataaaatagagattgaaatggggctcgatgtgggatgggttggtgatattgcagggagaagtaatctgagtaaaggaggaaaagaactgatttgggaaaacgatagttttagtagtgagtttgagtatgaattaagttgagattgaatttgaattaagttgaggttgaatatgaattaagttgaggttgagtttgaggtatgaattaagatgtgaaattgatcattggaaatgttagattgagaaaagtcacagctggattaatagcttcagaagtgtgtttgcagacagttgcaactaaagtaataagaatagatggccttggccgggcgcggtggctcacgcctgtaatcccagtactttgggaggctgaggcgagcaaatcacgaggtcaggagttcaagaccagcctggcccacatggtgaaaccccgtctttattaaaaatacaaaaattagctgtgcacagtggtgcacgcctgtaatcccagctactcgggaggctgagacaggagaatcgcttgaacctgggaggtggaggttgcagtgagctgagatcagtgtgactgcactccagcccggtgacagagtgagactctgtgtaaaaaaataaaataaataaaataatggccgtaagcaagtaaagaaggatggccagctcttattgggaatgcctaaatctaaggcttgatcagaagtaatgaaaccgttggggccctacattgctatgacatccaaagggccatgaatatcaggaagaaagataattaacagggtctaatgttacagagaggttgagagcaaggagatttgattaaaagggtctttagagctgatgtcaggtgtatgatgcctttaagagcagtttttatagtgcagggggtggtcaaaagagaaaataggtgctttctgaggtgacggagccttgagactagcttatagtagtaactgggttatgtcgtgacttttattctgtgcaccaccctgtaacatgtacatttttattcctattttcgtagcatgctctaaagaatggtgacatttgtgaaacttcgggtaaaccaaaaaccacacctaaaagaaaacctgctaagaagaataaaagccaaaagaagaatactgcagcttccttacaacaggttattttaaaatgttgagatttaacttcaaaggatgtctcattagtccttatttaatagtgtaaaatgtctttaacttaagtgattagtacagtgtttctattgacatatacttatacaacttcaaaaacaactattaaattttctgttatttaggaacatgcatattagtcatgaaagtataaagaattagatgggaatgataaatgctaaaatcaggacatgtgttccatttgtgaatggaaggcagggagaaggtgccgtttggaaggagtacccaagagccgtaagctgaattggcagtgttttacatcttaagctgagagatagatttttttttcccctttttctttaaaaactctaaaactgttaattccaaggaacccagaagtctaggtagattatttctgctagttaaaagcagtagtcctgaaagctgaatattttggtgtcttttgagccaactttagtttcatcattaccaagggggaagagagctaacagttgatgagcacttgctctaggccagtccagagtgctgggcaccatacgcattttatctccctcccgctattcacaacaaatatgggaggtagtttatattatagccatctaataagatggggaaactaagactcaaagagattcagaaacttgtccatgattataaatgtaagagagttggaattcagatttatgtatttagaccccaagcctttctcattacatcattttgccttccaaatctctaccctctatccttcacctccccactgatcaaaacgagatgatagtttgccctcttcaaaagaaatgtgtgcatgtatatatctttgatttcttttgtagtggaaagttggggacaaatgttctgccatttggtcagaagacggttgcatttacccagctaccattgcttcaattgattttaagagagaaacctgtgttgtggtttacactggatatggaaatagagaggagcaaaatctgtccgatctactttccccaatctgtgaagtagctaataatatagaacaaaatgctcaagaggtaaggatacaaaaaaaaaaaaattcaatttctggaagcagagactagatgagaaactgttaaacagtatacacagttgtcagtttgatccaccgaggcattaattttttcttaatcacacccttataacaaaaacctgcatattttttctttttaaagaatgaaaatgaaagccaagtttcaacagatgaaagtgagaactccaggtctcctggaaataaatcagataacatcaagcccaaatctgctccatggaactcttttctccctccaccaccccccatgccagggccaagactgggaccaggaaaggtaaaccttctatgaaagttttccagaaaatagttaatgtcgggacatttaacctctctgttaactaatttgtagctctcccatgaaacttttgtagcttaaatacacaagaattttttgaaaaggaaataagataatgatgcaaaatagttaattttttaaaaaaatgttagacactgcagtggatgcaacaaaatactttatatgaaagatttatccagttaacttttgtggagtattaggtattagactaataattagcacacttacttaagttagaaagtataataatgcgccggacgcggtagctcacgcctgtaatcccagcactttgggaggccaaggtgggcggatcacaaggtcaggagatcgagaccatcctggctaacacggtgaaaccccatctctactgaaaatacaaaaaaatttgccgggcgtgatggcgggcacctgtagtcccagctactcgggaggctgaggcaggaggatggtgtgaaccccggaggcagagcttgcagtgagtcaagatcgtgccactgcactccaacctgggcgacagaatgagactccatctcaaacaaaaaaacaaaacaaaacaaaaaaaagtgtaataataatttatcattagctggatgatatgctgttgtttcccatgtcacctgtataagatatgtaaaataagaacacattatttacatctaatatagataaaatcctgaggcgctctcagattgttttgtagagttcaaatgtaaatattgttttcatttatggtccttttggttataagtaacagaaatcaactctaaaaagatttttattataggttagattatgtcatggaaccttaaggcttgtccctttctagttcttttgtgtaaagcggtgatttcttccatggagggaatggtatttaggcaatttttttttttttttcgagatggagtcttgctctgtcgctcaggctggagtgcagtggcaccatttcagctcactgcaacttccacctcctgggttcaagtgattctcctgcttcagcctcccaagtagctgagattacaggcacccgccaccacacccggcttattttgtatttttagtagagatggggtttcaccatgttggccaggctggtcttgaactcctgacctcaagtgatctccccaccttggccttccaaagtgctaggattacaggcgcctagcctaggcagtcattttcaaaaaacaagcatgactcaccaaaagttttaagattttctgtgataatgttcttattgaggcttacattatattacagtttcttgaatctaaaatgatgtaccctcttagaatatatacatcatgcttcattggtctcagggggctgatttttataaggagagatttgctagttttcacaatatgtcctctaagttggcatgtatagctaaacaggctttcataaaaatatacaatttagttaatgaaatttgggatatagtcttttatgattgaaataattttgctaaatagactgtctctgatttattaggtaatcaccactcttattttgttttacttccttaatgtctacatagaaaggaaatgagaaaaatccagaggttgtcatttgacttatgagtctgtttgacttcaggatttggtacatgaaatttcacttaatctttttgatatgtataaaacaaatattctgggtaattatttttatccttttggttttgagtcctttttattcctatcatattgaaattggtaagttaattttcctttgaaatattccttatagccaggtctaaaattcaatggcccaccaccgccaccgccaccaccaccaccccacttactatcatgctggctgcctccatttccttctggaccaccagtaagtaaaaaagagtataggttagattttgctttcacatacaatttgataattagcagaatagaggattgtaaaatgtcattgtagaacatcccttgggccagattctaatgggtagaaatttgaactaaacctctgggttttgtttgtttttaatgcctttctgttacccagatgcagtgctcttgtagtcccaagtctaagctctaggttgccttctttcctggcagaagttggtgtctatgccataaggaggtagttcctgttagaagggatttaattataccttatataaggaattagtgtttgcccttctaggtatagttggatgttagcttctgatgtaaactggatttctttttctttctctctctttttttttttttgttttggaggcagagttttgcccttgtaccccaggctggagtgcagtggtgtgatctcagctcacagcaacctccgcctcctgggttcaagcaattctgcctcggcctcccaagtagctgggattacaggcgactgccaccacacccggctaatttttgttttattagtagagatggggtttcaccatgttggccagactgatcttgaactcctgacctcaggtgatccacccgccttggcctcccaaagcgctgggattacaggcgtgagctgccgcacccagctgtaaactggatttctaatggtagatttttaggtattaacaatagataaaaagatactttttggcatactgtgtattgggatggggttagaacaggtgttctacccaagacatttacttaaaatcgccctcgaaatgctatgtgagctgtgtgtgtgtgtgtgtgtgtgtgtgtattaaggaaaagcatgaaagtatttatgcttgattttttttttttactcatagcttcatagtggaacagatacatagtctaaatcaaaatgtttaaactttttatgtcacttgctgtcttttcgtcctcgttaaatttaattttgttggtcttttgttgttattggttggttttctccaaatgctagctatgttaagaaatttaaggccaggtacagtggctcatgcctgtaatcccggcattttagaaggctgaggcaggaggatcacttgagctcaggagtttgagaccagtctgggcaacatagcaagacctcgtctttgtttaggggaaaaaaaagaaatttaagtaggagattatataagcaaaaatacaattaatttccagcattcactatataatataaatctccagactttacttttttgtttactggatataaacaatatctttttctgtctccagataattcccccaccacctcccatatgtccagattctcttgatgatgctgatgctttgggaagtatgttaatttcatggtacatgagtggctatcatactggctattatatggtaagtaatcactcagcatcttttcctgacaatttttttgtagttatgtgactttgttttgtaaatttataaaatactacttgcttctctctttatattactaaaaaataaaaataaaaaaatacaactgtctgaggcttaaattactcttgcattgtccctaagtataattttagttaattttaaaaagctttcatgctattgttagattattttgattatacacttttgaattgaaattatactttttctaaataatgttttaatctctgatttgaaattgattgtagggaatggaaaagatgggataatttttcataaatgaaaaatgaaattcttttttttttttttttttttttgagacggagtcttgctctgttgcccaggctggagtgcaatggcgtgatcttggctcacagcaagctctgcctcctggattcacgccattctcctgcctcagcctcagaggtagctgggactacaggtgcctgccaccacgcctgtctaattttttgtatttttttgtaaagacagggtttcactgtgttagccaggatggtctcaatctcctgaccccgtgatccacccgcctcggccttccaagagaaatgaaatttttttaatgcacaaagatctggggtaatgtgtaccacattgaaccttggggagtatggcttcaaacttgtcactttatacgttagtctcctacggacatgttctattgtattttagtcagaacatttaaaattattttattttattttattttttttttttttttgagacggagtctcgctctgtcacccaggctggagtacagtggcgcagtctcggctcactgcaagctccgcctcccgggttcacgccattctcctgcctcagcctctccgagtagctgggactacaggcgcccgccaccacgcccggctaatttttttttatttttagtagagacggggtttcaccgtggtctcgatctcctgacctcgtgatccacccgcctcggcctcccaaagtgctgggattacaagcgtgagccaccgcgcccggcctaaaattatttttaaaagtaagctcttgtgccctgctaaaattatgatgtgatattgtaggcacttgtatttttagtaaattaatatagaagaaacaactgacttaaaggtgtatgtttttaaatgtatcatctgtgtgtgcccccattaatattcttatttaaaagttaaggccagacatggtggcttacaactgtaatcccaacagtttgtgaggccgaggcaggcagatcacttgaggtcaggagtttgagaccagcctggccaacatgatgaaaccttgtctctactaaaaataccaaaaaaaatttagccaggcatggtggcacatgcctgtaatccgagctacttgggaggctgtggcaggaaaattgctttaatctgggaggcagaggttgcagtgagttgagattgtgccactgcactccacccttggtgacagagtgagattccatctcaaaaaaagaaaaaggcctggcacggtggctcacacctataatcccagtactttgggaggtagaggcaggtggatcacttgaggttaggagttcaggaccagcctggccaacatggtgactactccatttctactaaatacacaaaacttagcccagtggcgggcagttgtaatcccagctacttgagaggttgaggcaggagaatcacttgaacctgggaggcagaggttgcagtgagccgagatcacaccgctgcactctagcctggccaacagagtgagaatttgcggagggaaaaaaaagtcacgcttcagttgttgtagtataaccttggtatattgtatgtatcatgaattcctcattttaatgaccaaaaagtaataaatcaacagcttgtaatttgttttgagatcagttatctgactgtaacactgtaggcttttgtgttttttaaattatgaaatatttgaaaaaaatacataatgtatatataaagtattggtataatttatgttctaaataactttcttgagaaataattcacatggtgtgcagtttacctttgaaagtatacaagttggctgggcacaatggctcacgcctgtaatcccagcactttgggaggccagggcaggtggatcacgaggtcaggagatcgagaccatcctggctaacatggtgaaaccccgtctctactaaaagtacaaaaacaaattagccgggcatgttggcgggcaccttttgtcccagctgctcgggaggctgaggcaggagagtggcgtgaacccaggaggtggagcttgcagtgagccgagattgtgccagtgcactccagcctgggcgacagagcgagactctgtctcaaaaaataaaataaaaaagaaagtatacaagtcagtggttttggttttcagttatgcaaccatcactacaatttaagaacattttcatcaccccaaaaagaaaccctgttaccttcattttccccagccctaggcagtcagtacactttctgtctctatgaatttgtctattttagatattatatataaacggaattatacgatatgtggtcttttgtgtctggcttctttcacttagcatgctattttcaagattcatccatgctgtagaatgcaccagtactgcattccttcttattgctgaatattctgttgtttggttatatcacattttatccattcatcagttcatggacatttaggttgtttttatttttgggctataatgaataatgttgctatgaacattcgtttgtgttctttttgtttttttggttttttgggttttttttgttttgtttttgtttttgagacagtcttgctctgtctcctaagctggagtgcagtggcatgatcttggcttactgcaagctctgcctcccgggttcacaccattctcctgcctcagcccgacaagtagctgggactacaggcgtgtgccaccatgcacggctaattttttgtatttttagtagagatggggtttcaccgtgttagccaggatggtctcgatctcctgacctcgtgatctgcctgcctaggcctcccaaagtgctgggattacaggcgtgagccactgcacctggccttaagtgtttttaatacgtcattgccttaagctaacaattcttaacctttgttctactgaagccacgtggttgagataggctctgagtctagcttttaacctctatctttttgtcttagaaatctaagcagaatgcaaatgactaagaataatgttgttgaaataacataaaataggttataactttgatactcattagtaacaaatctttcaatacatcttacggtctgttaggtgtagattagtaatgaagtgggaagccactgcaagctagtatacatgtagggaaagatagaaagcattgaagccagaagagagacagaggacatttgggctagatctgacaagaaaaacaaatgttttagtattaatttttgactttaaattttttttttatttagtgaatactggtgtttaatggtctcattttaataagtatgacacaggtagtttaaggtcatatattttatttgatgaaaataaggtataggccgggcacggtggctcacacctgtaatcccagcactttgggaggccgaggcaggcggatcacctgaggtcgggagttagagactagcctcaacatggagaaaccccgtctctactaaaaaaaatacaaaattaggcgggcgtggtggtgcatgcctgtaatcccagctactcaggaggctgaggcaggagaattgcttgaacctgggaggtggaggttgcggtgagccgagatcacctcattgcactccagcctgggcaacaagagcaaaactccatctcaaaaaaaaaaaaataaggtataagcgggctcaggaacatcattggacatactgaaagaagaaaaatcagctgggcgcagtggctcacgccggtaatcccaacactttgggaggccaaggcaggcgaatcacctgaagtcgggagttccagatcagcctgaccaacatggagaaaccctgtctctactaaaaatacaaaactagccgggcatggtggcgcatgcctgtaatcccagctacttgggaggctgaggcaggagaattgcttgaaccgagaaggcggaggttgcggtgagccaagattgcaccattgcactccagcctgggcaacaagagcgaaactccgtctcaaaaaaaaaaggaagaaaaatatttttttaaattaattagtttatttattttttaagatggagttttgccctgtcacccaggctggggtgcaatggtgcaatctcggctcactgcaacctccgcctcctgggttcaagtgattctcctgcctcagcttcccgagtagctgtgattacagccatatgccaccacgcccagccagttttgtgttttgttttgttttttgttttttttttttgagagggtgtcttgctctgtcccccaagctggagtgcagcggcgcgatcttggctcactgcaagctctgcctcccaggttcacaccattctcttgcctcagcctcccgagtagctgggactacaggtgcccgccaccacacccggctaatttttttgtgtttttagtagagatggggtttcactgtgttagccaggatggtctcgatctcctgaccttttgatccacccgcctcagcctccccaagtgctgggattataggcgtgagccactgtgcccggcctagtcttgtatttttagtagagtcgggatttctccatgttggtcaggctgttctccaaatccgacctcaggtgatccgcccgccttggcctccaaaagtgcaaggcaaggcattacaggcatgagccactgtgaccggcaatgtttttaaattttttacatttaaattttattttttagagaccaggtctcactctattgctcaggctggagtgcaagggcacattcacagctcactgcagccttgacctccagggctcaagcagtcctctcacctcagtttcccgagtagctgggactacagtgataatgccactgcacctggctaatttttatttttatttatttatttttttttgagacagagtcttgctctgtcacccaggctggagtgcagtggtgtaaatctcagctcactgcagcctccgcctcctgggttcaagtgattctcctgcctcaacctcccaagtagctgggattagaggtccccaccaccatgcctggctaattttttgtactttcagtagaaacggggttttgccatgttggccaggctgttctcgaactcctgagctcaggtgatccaactgtctcggcctcccaaagtgctgggattacaggcgtgagccactgtgcctagcctgagccaccacgccggcctaatttttaaattttttgtagagacagggtctcattatgttgcccagggtggtgtcaagctccaggtctcaagtgatccccctacctccgcctcccaaagttgtgggattgtaggcatgagccactgcaagaaaaccttaactgcagcctaataattgttttctttgggataacttttaaagtacattaaaagactatcaacttaatttctgatcatattttgttgaataaaataagtaaaatgtcttgtgaaacaaaatgctttttaacatccatataaagctatctatatatagctatctatatctatatagctattttttttaacttcctttattttccttacagggttttagacaaaatcaaaaagaaggaaggtgctcacattccttaaattaaggagtaagtctgccagcattatgaaagtgaatcttacttttgtaaaactttatggtttgtggaaaacaaatgtttttgaacatttaaaaagttcagatgttagaaagttgaaaggttaatgtaaaacaatcaatattaaagaattttgatgccaaaactattagataaaaggttaatctacatccctactagaattctcatacttaactggttggttgtgtggaagaaacatactttcacaataaagagctttaggatatgatgccattttatatcactagtaggcagaccagcagacttttttttattgtgatatgggataacctaggcatactgcactgtacactctgacatatgaagtgctctagtcaagtttaactggtgtccacagaggacatggtttaactggaattcgtcaagcctctggttctaatttctcatttgcaggaaatgctggcatagagcagcactaaatgacaccactaaagaaacgatcagacagatctggaatgtgaagcgttatagaagataactggcctcatttcttcaaaatatcaagtgttgggaaagaaaaaaggaagtggaatgggtaactcttcttgattaaaagttatgtaataaccaaatgcaatgtgaaatattttactggactctattttgaaaaaccatctgtaaaagactgaggtgggggtgggaggccagcacggtggtgaggcagttgagaaaatttgaatgtggattagattttgaatgatattggataattattggtaattttatgagctgtgagaagggtgttgtagtttataaaagactgtcttaatttgcatacttaagcatttaggaatgaagtgttagagtgtcttaaaatgtttcaaatggtttaacaaaatgtatgtgaggcgtatgtggcaaaatgttacagaatctaactggtggacatggctgttcattgtactgtttttttctatcttctatatgtttaaaagtatataataaaaatatttaatttttttttaaattagctgtatctgtgattgtatttcttttttgcatattattttgccctttggcccatattttgatatggatgccaccatagcattttgtgtatgtgcatgtgtattcccacttaatgtcacatttttcatgtctttacatattcttatttttgtttgtttttgagacagagtctcgctctgctgcccacgctggagtgcagtggtgcaatctcagctcactgcaacctctgctatccgggttcaagcagttctcgtgcctcacccacgtgagtagttgggattacaggcatgtggcaccatgccccactaagttttgtatttttagtagagatggagtttcaccatgttggccaggctggtctcaaactcctgccctcaagtgattcgaccaccctggcctcccaaagtgctgggattacagccgtgagccaccgcacacggcctctctatttatttctatacatagcttttcacattatattatgtttatatattgtttatatctgtatttcctctttcattagagaaaaggtagtacatcttattcttcatggtgtctacaatatctggcagtttttggaagtcaagcgtgagcttagagcatagactggtgggattgtcaaagaagagggcaactggaagagaactgtcagttatttttggatcagtctttaattcatcatgacgggttaggcattagttgtatttcttgctaattttgaagaagacttattaacaaatcctacattaggtaaatggttttgaaagttgagttaatcataatggtgtttgacctaggactatttttaggccctatttatcttaatatcgaataatgaagcagcttcccccttagatatagacagaaaacatcaaagccaccacactacctggctggatttatcctagtaataaaatcaaaactgagctagttctctggctttcattgtaataattgtccttgtggttgtaaggaatctagatgaaaattacatggtctgttctacagccacagctgtacctacattcagaagacagacaaaagttgctgtgtttgaagagatccttcattaagggatcagacagagattactttgagacatattctaagtttaacttttctgcagggttgccattaacagaaataaactacagagttaatttctttttgtttttgatacagtctaactctcacccaagctggagtgcagtggcgcaatttcagctcactgcaacctctgcctcccaggttcaagcaattctcctgcctcagcctcccgagcagctgggactacaggcatgtgccactatgcctggctaatttttgtatttttagtagtagagacgtggtttcgccacgttggccaggctggtctggaactcctgaccccaggtaatccacctgcctcggcctcccaaagtgctgggattacaagcttgagccactacgcctgacccagagttaactttttaaaaaagtttttatgaacttaagtcttgtgatgtttgaaataatggattcaatttagacatcaaattccagaagttactaagagcagctgggcgcggcagctcacacctgtaatcccagcactttgggaggccgaggcgggtggatcacctgagatcaggagttccagaccagcctggccaacatagtaaaaccctgtctctactaaaaatacaaaaattagcccggcatggtggcacgccctgtagtcccagctacttgggaggctgaggcaggagaattgcttgaacccgggaggtggaggttgtggtgagccgagattgtgccactgtactcaagcctgggctaaaaagcgagactccgtctcaaaaaaaaaaaaaaaaaaaacacgttactaagagcaactctgggccaggcacggtggcttacacctgtaatcccagcattttgggaggacgagacaggcggatcacttgagcccaggagttcaagaccagcataagcaacaacgcaaaacccctgactctacaaaacatgaaagaattagcaaggcatggtggtgcatgcctgtagtcccagctactggagaggctgaggcaaaaggatcacttgagtacaggaggttgaggctgtgtaatgagccgtgttcacaccattgcacttcagcctgggcaacagactgagaccctgtctcaaaaaaaaaaaccaaaccaaagcaacaaacaaaaaacaagagcaactctgcttctgtacacttttttttttttttttggtagtgacatgatctatgttgcccaagctggtctcgagttcctgggttcaagccattctcccacctcgggctcccaaagtgctaggattacaggcatgaatcaccatgcccagcccttctgtacacttttcacagtgtacccttttgtgttttttaaaatgtttgtgtatacatttattgtgaatttttaaaaaacatgtaattaaggccaggcatggtggctcatacctgtaatcctagcactttgagaggctgaggtgggtggatcacctgaggtcggtagttcgagaccagcctggcccaacatggtgaaaccccatctctactaaaaatacaaaaaaaaaattagctcggcatggtggtgggcgcctgtgatcccagctactggagaggctgaagcatgagaatcacttgaacccaggaggcggaggttgcagtgagccaagatcgtgccactacactccagcctgggtgactcagtgactgtctcaaaaagaaaaaaagtaattaagttctgtcatgatatatcatcattaccctttttgaacttttaaaattttttatctttagaggtaattcatataatgttcttcaatagataagtgcttttctgtcaatatatcttggagaacacaccatatcagtatttaaaactctcattcttcctatttctccacatcctctccagcacccgttgtttcctgactttttaatgattgccattctaactggtgtgagatggtatcttattgtggttttgatttgcatttctctgatggccagtgatggtgagcattttttcatgtgttttttagctgcataaatgtcttcttttgagaagtgtctgttcatgtccttcgcccactttttgatggggttgtctgtttttttcttgtaaatttgtttgagttcattgtagattctggatattagccctttgtcagatgagtagattgcaaaaattttctcccattttgtaggttgcctgttcactctgatggtagtttcttttgctgtgcagaagctctttagtttaattagatcccagttttggcttttgttgccgttgcttttggtgttttagacatgaagtccttgcccatgcctatgtcctgaatggtaatgcctaggttttcttctagggtttttatggttttaggtctaacatttaagtctttaatccatcttgaattaatttttgtataaggtgtaaggaagggatccagtttcagctttctacatatggctagccagtttcccagcaccatttattaaatagggaatcctttccccattgcttgtttttctcaggtttgtcaaagatcagatagttgtagatatgcggcgttatttctgagggctctgttctgttccattggtctatatctctgttttggtaccagtaccatgctgttttggttactgtagccttgtagtatagtttgaagtcaggtagcgtgatgcctccagctttgttcttttggcttaggattgacttggcgatgcgggctcttttttggttccatatgaactttaaagtagttttttccaattctgtgaagaaagtcattggtagcttgatggggatggcattgaatctgtaaattaccttgggcagtatggccattttcacgatattgattcttcctacccatgagcatggaatgttcttccatttgtttgtatcctcttttatttcattgagcagtggtttgtagttctccttgaagaggtccttcacatcccttgtaagttggattcctaggtattttattctctttgaagcaattgtgaatgggagttcactcatgatttggctctctgtttgtctgttattgctgtataagaatgcttgtgatttttgtacattgattttgtatcctgagactttgctgaagttgcttatcagcttaaggagattttgggctgagacaatggggttttctagatatacaatcatgtaatctgcaaacagggacaatttggcttcctcttttcctaattgaatacccgttatttctttctcctgcctaattgccctggccagaacttccaacactatgttgaataggagtggtgagagagggcatccctgtcttgtgcgtgttttcaaagggaatgcttccagtttttgcccattcagtatgatattggctgtgggtttgtcatagatagctcttattattttgagatacgtcccatcagtacctcatttattgagagtttttagcatgagggattgttgaattttgtcaaaggccttttctgcatctattgagataatcatgtggtttttgtctttggttctgtttatatgctggattacatttattgatttgcgtatgttgaaccagccttgcatcccagggatgaagcccacttgatcatgctggataagctttttgatgtgctgctggattcggtttgccag

SEQ ID NO: 360 - DNA, 32744 bp, Homo sapiens
  source 1..32744: mol_type = other DNA
agattgctgaaacaaaggaccaatgcccagggcggtccttaattcctccctgcagtttgaaactgtcaggttgccgtctaggtagcggttgtgcttgctgaggctgcacttgctgacactgcagctgcgacgcggctaagaggcgcagagcgaggagtcgggatttggtcgcgagcggcgacggtgggtagcagcgctccgggcagatcctgcgtccctgcatccctggcgaaagtagtggagggagatttaaagttccttggcgcgtgtttcctccccctgggctcttccccagaccgcgagtgattcagctgttgtgccggaaggtcccaaagtttcccctccgaggcgtgcaggaagaggaagtgagcaggagtgagggatgctgagcgattactgtcatcagaggttccggtcacttaaaacgttgagaaaaaataaccatgtataaagctctgttgtgcttaagtaagatttttcttaaaacaggctgggtcggaaggtgatggaagaaaacttatggccttttgcttactgcaatggcttttctcctctgcttctagtccctgctttggggaggggctggcgcgcccctttccttgagtgcagctaggcctggtgaaaggcacaggcgacatcaccctgctgctagtttgcatgttaattcgctcttcctttgcctcttgggggttccatttgaattcccagacccctgttttgctgtcagccagataattaccaagatgttattttatgtttctggcaacagagaagcacacaaaagttttgatcttgttttctgataccttggattagagactactgaaaatgtagtgaactaatgtgcgtccgccacccattaaagcagttttcatttttctcctttgtttctgaacctagaaacagtaaggaaaatgctactgttctagagtttcaaataactcataccttgttgacataaagcagggcagatggaagatagcatattttccaagagtgcggtgggtttttttgtgtctgcagtgtgtccatattaagaaacaatttttgagatctgaccatacttactagctcatttttaaataatcagcacccccccccccccacccctgttacctgcctggtctcaaatcctgaaggaagaagtgaataaaaatataaatggaccaagttatcacagtggtagatttgaagtcagtgaagcagccattccttgctgcagatacatgcacttattttatcctccctaattggcttaactaaagacagtcatgctgagatttagtttacttaacatgtgtatgcacagtgatactcactggaaaaagttgaactttcctttccacaatttagttccagcctgtgtttccattctatttttgcacttttccctgtatcttccttttctatttcaatttcctcatctctcatttatttttcagcccactgtgactaagacctgtaattgttttactttccagtgaaattgttcaagcaaacgtctcagcaacctcctaatctccaaattctatccaatcctcatggttctttggcatctaattctattttcttctcaaagttgtgatattgcttccatagttctaatgttctgacttcctttgctgactcctcttctttgctgactgttcttctcttgccctttagatgttagtggttctggctttaaccctcttctcattcacagtcgtagtccttaactctattagggctatggtcccctctgaacgcatatttaaagcgaaagatcttctttctagaaaaatacacattcacatttatgataaaaatattgcatacgagtcgggtatagggacctgatatggttaggtcttgtgtccccactcaaatcccatcttcaattgtaatctccacatgtaggggaagggaagtgattggattataagggcgatttcccccgtgctgttctcatgatagtgaattctcacgagatctgatggttttataaatggtagtttttcctgcactctctcacatactgtctcacctgccgccatctaagatgtgcctgcttccccttctaccatgattttaagtttcctgaggcctccccagacatgcggaactgtgagtcaataaaaattcttttatttataaattacccagttttgggcagttctttttttttttttttttttttgagacggagtctcactctgtcgcccaggctggagtgcagcggcgcgatcttggctcactatgagctccgcctcccgggttcacgccattctcctgcctcagcctcccaagtagctgggactacaggcgcccaccaccacgccaggctaattttttgtatttagtggagacggggtttcaccgtgttagctagtatggtcttgatctcctgacctcgtaatcctcccacctcagcctcccaaagtgctgggattgcaggcatgagccaccgtgcccggcctgggcagttctttatagcagtttgaaaaacgtactaatacaggacctcaggataagaactttttctcacattccttttttataggtggtctcatccattcccttttttcagcagttcccattatgccagtgattcctcaaactggatctccaacttatacctccagtgcggcgctcccacaatgcttaactccaggaaacaccattcacagtgtagccattgtgaatggcagttcttggagtagcgcactacgtagccagtgtgaccacagactgcatacttgcagctttaccctagtgcctcagaggcatcctcacacccagctcatctgatatggcactcattgtccttcctcccaacctgctcatcttcctaccttccttgccttggtgagtggcactatccatctagttacccaaaccggagatctggaagccaccaacagttctttttaaccccttgatctattattgatcattttctctttccatcaccataacacaactgtcttgtagtcataccctccatccccttcccattgctacttcctagacttaggtcatcatttatcttcttaattactatcaaagagaacatttatctcttagactactgcagtcagctctcaattgatctctctctcttttttttttgagacggagtctctgtcacccaggctggagtgcagtggtgcgatcttggctcactgcagcctccacccccagggttctagctattctcctgcctcagcctcccaagtagctgggattacaggcacctgccaccaggctcggctaattgttttgtatttttaatagagacagggtttcgccatgttggccaggctggtctcaaactcctgacctcaggtgatccacctacctcagcctcccaaagtgctaggattacaggcatgattcactgcacccagcctgatctctcttaatatccaaattcatcctcaacgctgctggaatgatctttctgatcatgtaacttttaaaaaatatttcaataacttgtctagaataaacacccagatttttaatatgacaagttttgaccttccatgatctggctgctccttactttttgtttcatccttagccaatcctttgcacccattgctttgtccttaccaaactgcttgctgttcgtggcatacatgtccatggctctgtctttgcttatattgctctactgcctagaatatctacacctgtgtttataccttttatccatctttcaggatgagacctactcatctttcagatctcaacacctgggtcatcttctctaaaaactttctgtgcctcctttcctgcttatttacagtcatgcaatcttaccccatgaaaaatagctactcctatctctctactttgtatctgttattttagggcctatcagcagtttattcatcagtcggtcacttatataatatacatgcctggccctctctacagattgtaaactccttaagaatgaggacttcattttacattcctcaccaatgtcttacatattactggtattcagatagttcgaatagtcactatttgttctttgaataattcggttacttgttactaaaagtacttttaatgattttttgattaggactttcaacaaattctctatgcatatatttgattctgttgttctgtataagctcacttttcttaaaataatatttccaaaggtaagtttcccaagaagggaatttgcacaaattgtttgttctctcttggttctgtgtcttagaggaaagtacacagcacccaggttgtcacacattgctcaagaacagtgatcacaatctattatgctcaacaggccccgctggggatttttctgaagacctgactacgttataaactcactaatattgggactgggtcttcaactgttttttgcccagtgattttttgcctgtaggtactcaatatgttgaatgaatgattttagcatatcacaggaagattgcagatttggatactgttgcacttatatatatctggaaaggattttatcttaaatatcaaggaaaaaagctaaagttagcttctactgttttagagcatttgtgcagaatgtcatcagatgaggagaaatactcacttccagttgtgcaaaatgactccagtcgaggcagttctgtctcttcgaatcttcaggtaggaaaaaatttctaaatttaccatgactttttttattttaaacaaatgaatgtaagggaaaactaggattttttaataattttttcatccatttacaagggagtttttcaatttataataatatcaaacttcaggaattactgtacacattttaggagtgactttacattgttttaacttttcagaaaatattgatgaactcttcatacactctgtacaaaggcttcaaccaacacagtaagaggtgaaacaaatgttcaagaaacatttttttgtttaaatttttttcattttagctacctctcatgaatgctactttcacttttaatgcaaattaatacaatatcaaaccatccaaagttctagagctcaagattcccttgtgttctacttgctgaggtttggtctctgttgtcacaacattcagtacaatctgctgcccaggacctggacattgacagataaaatgaagtgggtcagttaactacagagggtgtggtatttacatgaaatgttttaaatttctcttatttctaaatatttcatcatcaaaaatatggatttagatttctggagtagattttaaatatgagaataatgacatggtatatcttaaattttacagttgtattactcaaggggaaaggctgtttatgcctaagcatatgaaattgttattgattctgtacgatatgagaaaagctttaggaaaatattttatgaaacaaatttgttcctttaatcgaaattatggatttcaaaatggggaaggtattgggaaaatatctgaatatttacaggataaaactagtctggagttgtggcagagcttttgcaccctagccttcccttttgatggtacctgtcccatgtagtcctctcttcaggtgacagtacttcctccacccttcatcgctgtctgattgaaacttgaagatagaactgattaactcatttatactaaaatgtaaacaccttgtgagctctcaaatttcatttcgtgaagagataaagctttaaatcaaaagaataactctctagagtggaattttagagagacggaagaagaacctgccagaaattattttgtgttattgtttacccacctataatgtaagctcaactgagagtctattactgtcaactaatgttcctactggttcttggactgaagttgaaagcctctccatattccctgtacatacagtgttattactttgggtttcactactggaagcacttcaaaatataaatacaaaaaaaaatcttaaaaataacataaaatacacatttttacatatgtagtaaatatgtaaatccaaacatttaatacaaaagcccctcataaataaatattcctcttaaggaacttttttgttactctctttttatgcgaatgcttcataagccagaaggtggtaaatgctgagggatgggcagcatccatagtgcttatacactgaaaatttcctctaaccacagctcctatcagccaagttgctctgactctaatggttgaggcatgggtggagctatatttcagggtcatatcaattcagctcttgggggttggggaggggggcaaaattacaagttttgaatgttaacagaggttatgtttggcaattaagaaagccaatattgtttattttgattcttaattttaaattttatttttaaataacttatttggcttgtgtctacatatatgaaactctaaaatagtcatttaaataactgattttttctaaatgttttcttgaaataagttggaatatatggtcatggaatactattgacatatacttatttatttcccctttaagccatagcaattgtggtaaaatatatgaaatatatgaatatgtatgaagtatatgatttgaaatatgtgtttggatcttttttttccttctcttatccagagcagaagtcagactagggaagccacaagtgaaagccactgacttccacttctccctccgttcctacatgctagaggtggtgataggctaactctgagtagagctgacttggctaaatctagttgcaactgacaccacagcaggaacactataaaaagtttatgaacctcacaatataagatcaccatcatattaatctgctcaggctaccataacaaagtaccataaattcataggcttaaacaacagacatttatcttctcacagttctggaggctagaagtcccagatcacagcccaaaagggtcagtttctggtgagggctctctttgtggattgcagacaggtgccttcttgctgtatctttgcatggcctttcctcagtacagtatgtgcaggtgggaggagagcatgcacaaggttcctggtgtctcttctgatgagtacattaatgctctcagggccccaaccaatgaccttatttaaccttaattactttcttgaaggcctcatctccaaatacagccacactgggtgttagggcttcagcatatgaattttgaggggacacaaacattcagactccgtaactccataacagccacacttttatatattcttagccaaaatcaaaagtatattttgggtgtttgggaagtataatagtgctttaacagaaaccaagtaagggtggtttaagtgggttccttacagtttcattctgtctctcataaattctgagctgatacgtagtcctgagatcatctgaggacccaatcccttctctctttttgctgtaccatgagctgttgaccgtgtttgcattgtcaggtactggtgcactgacagtgtactaccactagcccatgggaagaggggaccagcaggaagcagcttcgtttttaaggacttcacctaaagttgtacacatcatttccagttgaatcccatagaccaggtctcttggccacacctagctgcagaggaggctgggaaatgtagctgggtggccatttgcccaaatcaaaccctggggctttattaagttaaagaaattaaaaagaaatggatgctgctggattagttacagtctctatgcacttgaaattttatgtattagtttattaggaccaacacacacattcaggtttataggaactagtaaatatcttgtgcatggccccaatttattaagctctttgggaatttctttttgataattagaaaaccaatatgctttgggaagtgtattttttttaacctaaggatatttaaatctatttaaataatcatagttacttttgtcaatgtaaaaattaaatgttggtgctcgcttcagcagcacatatactaaaactggagccacacagaaaattagcatggaccctgtgcaaggaggacatgcaaatttgtgaaatgttctataattttttaataatttttttaagttttataatataaaaaaagttgtattgtgatatcctaaatgatttgtttcctaataagagccttctgtctcagtgataaccattatgtaaaatactgatttttatttgctactaggaaatgtaagtttaaaactcagacagatgtttattctcatgaaggtgacatcactaacaaaaatggttgattatagcaatatgaaggagattctggttgaattttctaaagattttctctttgaaatatctctctcttcctcttctgtcgttagccttaaaatatataaaaatcagtatttgctatacctaatgtttactgcgtgtaagtatctatgttaaatatgtgaatcaggccgggtgcagtggctcacgcctgtaatcctagcactttgggggtccagggctgtggatcaagaggtcaggagttcaagaccagcctgaccaacatggtgaaaccccatctctactaaaagtacaaaaattaggtgggcgtggtggtacaaacctgtaattccagatactcaggaggctgaggcaggagaatcgcttgaacctgggaggcagaggttgcggtgagccaagaccatgccactgcactccagcctgggctacagagcaagactccatctcaaaaaaaaagaagaaaaaaattgtaaatcaagaaatcaaggttgaagcgcaaaccaggtcactcttgtacatgtaattgccataaaagctagcagttttcaaatatataaaagcataagcttttttaaaaaacaattttacttaaaattccgatataaaaaagcagatgaaaacaaaactacagtagtatagatttattttgtaaattcaaatgcaatcagttaataaaaacagttaagctgccttgataaatgtacatttgaaattggggggtaatagaaggccattgcagttttataaacttaagtatccagtttgcttctatattttgtttaggttacataattttttttcagttccaaaaatggtatctttttaatagcatgtctcatcttcaattaaaccaatctgacatataaaattaagtgatagaaaatttttgattcagtgttgagtcactcacagaaccttatcacctcttcatactttgttgttgtttccccagagacaggatcttgctctgtcacccaggctggggtgcagtggtgccatcttgtcttactgcagcttccagttcctaggcttaagtggtcctcctgcctcagcctcctgagtagctacaactacaggcacacaccaccacacctagcaaatttttgtaaaaaatttattgtagagatgaggtctcactttgttgctcaggcttcaagccatcctcctgcctcagcctctcaaagtgctgagtttacaggcatgagtcactgcacccagccctcttcaaactgttaatcataaatataaaaatcacacaagaagcactcgaggaactcaagcttggaataagtggtaaaactttgtaatataataagcatgggactctattatggtaattaaatttctttaaaacaaattcagttgaatatattataacattgtaactgttacactacattattgattattggcctctcttaggaagaatatgaagaactgcttcattatgctatagtgactccaaatattgaaccctgtgcttcacagtcatctcatcctaagggagaattggtgccagatgtcagaatttctacaattcatgatattcttcatagtcaaggttatatatatttttcaagatatctcttaatttaaaatattactgagtttattaatgatactgacaggattgtgaaaatgcctgtccagatcagtgattcttctcaaccatttatgtgtattagtatcatctaggggagctttttacattttaatatattattcctgactctcgtgtgacagcttgatttttctttgaacttcatttgactcttacttttatgaagaataataaagttgaagcaatgctatggcaactgcatggctttttggtatgttgtatctcagtacttgttccaacagttttatgccaggattaacctgaaaactaaatgcccaagactaaaattaaagatggtaaccctgagagtctcttaaattactttacaaacctcatgctagtgctttatcagcagtatttatatgggcatggaggactgtttgaataattatcacaaggtgaacccatctgtggaccatgtcagcaacagaactgaaagctactataaaccaggatgtgtgttgatagatgagtgaaaagtggagaaaagaggataaagctccttttacctccattccttattcaggtgaagacaacatcccaaactctaaataaatgttctttcaaagggcacagaaagccttcctaaaacagtcctgataaggaccagttatcacactataggcgtaactccaaggatccctgtccttgaaggcgcatgacatagcctactcagaggccaaaggctcctgggcttctgctaagtcatagctctagtgtctgttgtctctcattctctgtagacgtggatttttcactgttcctctgtctttggcctgttgcagtggaacaacaaacaggaccacaggatgagagccttaaaatacaggccaggcagtggctcatgcttgtaatgccagtactttcagaggctgaggcaggaggattgcttgagcccaggaggttgagacaagcctaggcaacatagcaaaaccctagctctacaaaaaaattagccgggcagagcagcctatagtcccagcaccttgggaggctggggtgggaggattgcatgagctcaggagttcaaggctgcagtgtgccatgattatgccactgcacttcagcctaggcaacagagcaagactctgtttaaaaaaaaaaaaagaaaaaactttcgagatgctgtagtcaacagttcaaggtaatcatctgggatttaagaccattgttcttttctcttatgtaagatagcatttatttattctctgccatttccaaaaaggatttgagattaaaacatacgttatatagtaagtttagatatcctttagtcatcttgattcacaagtagactttgttaaagtcttctatgtaaattcatcatcccacattctctttattcttggtatctcagttgcttgatagaaggcatggtatgtggaaattggcaaagtatgtgtaagcctctaacagtcattcttgagaggtttttcccagtttcctttttgccatctgttgactacaggttcctgaagtggaagcaaatgttttgggggagccagtgccacttgagtttgattgtggctagtgaaaagcagcgggcctctggaaatacccagtgtcataagagagcagatccttttctaagttctaatgtcattcacccacttattctcttagtgtgaattgaatgctatagtagactacattatctctcatctatatttggtgcataagttggagcttatcaatgatatagtaagtctttttctagtctcagatttttatctgttcttgtcctttgttttagtgttcctatatccccagcatgttgtattttgtttgttctaaaatattatgtactgctaccttcttaaattatgtgtgattagacattttatttaagagtggttcagtttaattttaaaaagctttctttttggcaggaaataactctgaagtaagagaaactgcaatagaagttggaaaaggatgtgatttccatatttcaagtcattcaaagacagatggtatgatttttctttagcttatttgtattaatatacaacattttgtggtttgatgaatattatctatgtagtaagaggaataatttcagcatattatttattagcaggattttaaaatgctattattgctaatttaagtgataatatttaaaataatttgataagataccaaaatagtacaattaagacaggtcaatgcattatagtgtgtagtatcctttcttaaaattgctaagttagagggcaagtcttttaaaagatttaatgggatattagatagtttggccaattcaagtttttatgtaaaccaatgcactgtttcccaactttcaggcatttgcgtaccagtgtaaggattttcatcctatctttatgccacctgttacgccatcatttagtgtttttctttaaaagtctgctttgtctttgttaaaagggaagattagcaaatcttaaagaggctttttggggggattgttttttgtatttttttaattttgtttggtttttgagacaggatctcactctgtcacccaggctagagtgcagggctccctgcagcctcaacctccttggctcaagtgatcctcctgcctcagcgccccctcccccagtagctgggactacaggcacatgccaccacacctagctaatttttaacttttctgtagaggtgggatctcactatgttgcccaggctggtctcaaactcctaagatcaagtgatccacttgccctggcctcccaaagtgctgggattacaggcatgagccaccatgcctggctttaaagaacttttaaaagcatactagaactggactgagacttttttcttgactagtcagaataattaattaaaatgtaatattgtggaatatttttctatttaatgttatttaatgtggtaaccatttttgtcaccacgtaagtaatgcctctaacccttagtttcctcacttgtaagtagaagtcttaggcatcataatctctgacagcccttacaagttctgaagttacatgatttgatttcttaaaaggtaagtgttgagatattttttaaattgaaaagcagagtctatcgctttctttgtgagtacagatctagttggcaaaatcaagtaaaagagaatattcatgtacattgtcattccacctgttctttgggtttcttaaccatcctcagaacatgcagatagcatttcatagtatgactagcccagaccttgtgttatgttttttataccaaacacacatgttagggaattattttcccttttgcaaagaagtctttacataagcagaatatgtttgcaaaaaaactaaaatcttacaaattttaaaaaagaattcttgaaagatttaagtaacaagttctctatcatagattcatctttccttcagtaggaagaaagctcttccatctttgttattaggatgctcgtagcaaatgtgagatatgtgacaagtgatgacagatagtctctaattccagcataaatatgtgagaaaatattaacttttctttctcagtgctttttttttttttttttgagacagagtctcgctctatcacccaggctagagtgggtggcacgatctcggctcactgaaacctctgcttcccgggttcaagcaattctcctgcctcagcctcccaagtagctgggactataggcacgtgccaccatgcctggctaattttttgtatttttagtagagatagggttttaccatgttggccaggctggtcttgaactcctgacctcatgattcgcccacttcagcctcccaaagtgcggggattacaggcatgagccaccgtgcccagcctttcagtgcttttttagaaatagatacctgttctctttagggccctgactctcccccacctccctggatatgggcaggggatgagcgttttatatatatgcacatacatatagagatgtgtacatttctcacctctacattgaagcctaacagtgtacttaacaacagagtatctgcaaaactaaattatgagtctctttctacttaaattgtttaattttaataggttttttgtttgtttttgtttttggagacagagtctcattctgtcacaggctggagtgcagtggcacgatctcggctcactgcaacctctgcctccctggttcaagcaattctcctgcctcagcttcccgagtagctgggactataggtgcgtgccaccacacccagctaatttttgtatttttagtagagatggggtttcaccttgttggccaggatggtctcaatctctggacctcatgattcacccgcctcggcctcccaaagtgctaggattacaggcatgagccaccgcgcccggccgaattttaatagtattaaaaccaatcccagtgttaaacttacagagtaatattgacctatatacaaccacactgaccttggtcaattacttaactttttctgaacctcagtttctcatcagtaaaatggagataataatacctattttttagggtagcatgtgttatgagaactaatctttataatgtttttattacagaaacagaaagcacttcattaatggtgatatgatacagatgatgatagtttcacctcaggctggacctggatatatgaaggatccttatctgggatagaggtcatttgctgggagagaagggattgggagtataggaggtatctcatgccagtctgtgctaaatcactgacaatactgaaattaaaaatagattaaggtacacctgaaaggtagtttctctgcattttttctcagcctccataagtagcagacgtcttttagccttccagtatggttccttaccaacttgagttattttcaatttggcttgacagctacaacttttcttttattcagagtcatcaccagtgttatcgccaaggaagccttctcacccagtcatggattttttcagttcacatcttttagctgactcttcctcaccagcaacaaattctagtcatacagatgcccatgaaatacttgtgagcgattttcttgtttctgatgaaaaccttcagaagatggaaaatgtgcttgatctttggagttcaggtcttaaggtacggtacagcagttcttcaattacagttgtttagtatgtaatgtaatagttttactctcatttatactgttttgtttttttgagttaaactttctaaaaatcttttgtttcctgagatcagtttagtgtcttaagtcttgcttctcaatctttaatgtacttacgaatcatagcgggagcctgttaaactacagcttcatatgcagtaggtcttcagcagggcctaagatcgtgcttctttttttctttttttgactcttgtttgtttgtttgattttactttaagttctgggatacatgtggtgaacatgcaggtttgttacataggtatacatgtgccatggtggtttgctgcacctatcaacctgtcatctaggtttcaagccccacatgcattaggtatgtgtcctaatgctctccctccccttaccctccaccccctgacaggccccggtgtgtgatgttcccctccatgtgtccatgtgttctcatttctgtcaagctcccaggtgttgctactggttcagaaactgtactttgagttgccaggttttaagtggttgctggaacggttctacatgctccattgaatttcacagatactttgaatggctcagcctgtgtgtaactgagacatactgtgcctttaccatatcgtagttgtgactaatagaaatgtctccttttatgcaataacgaaagatccaattttagcaatggatattcattttatagccactcctatagcaactatgatgtgtaagtgataaaactataaaagttgatttttattttgatactactggcctttaagtaaaacaaagtattgcagaaatagtaagtgggttttatttatttatttatttatttatttttattattattatactttaagttttagggtacatgtacacaatgtgcaggttagttacatatgtatacatgtgccatgctggtgcgctgcacccactaactcatcatctagcattaggtatatctcccaatgctatccctcccccctccccccacccaacaacagtccccagagtgtgatgttccccttcctgtgtccatgtgttctccttgttcaattcccacctatcagtgagaatatgcggtgttgggttttttgttcttgcgatagtttactgagaatgatgatttccagtttcatccatgtccctacaaaggacatgaactcatcattttttatggctgcatagtattccatggtgtatatgtgccacattttcttaatccagtctatcattgttggacatttgggttggttccaagtctttgctattgtgaataatgccgcaataaacatacgtgtgcatgtgtctttatagccgcatgatttatagtcctttgggtatataccccgtaatgggatggctgggtcaaatggtatttgtagttctagatccctgaggaatcgccacactgacttccacaatggttgaactagtttacagtcccaccaacagtgtaaaagtgttcctatttctccacatcctctccagcacctgttgtttcctgactttttaatgattgccattctaactggtgtgagatggtatctcattgtggttttgatttgcatttctctgatggccagtgatggtgagcattttttcatgtgttttttggctgcataaatgtcttcttttgagaagtgtctgttcatgtcctttgcccactttttgatggggttgtttgcttttttcttgtaaatttgtttgagttcattgtagattctggatattagccctttgtcagataagtaggttgtgaaaattttctcccgttttgtaggttgcctgttcactctgatggtagtttgttttgctgtgcagaagctctttagtttaattagatcccatttgtcaattttggcttttgttgccattgcttttggtgttttagacatgaagtccttgcccatgcctgtgtcctgaatggtaatgcctaggttttcttctagggtttttatggttttaggtctaacatttaagtctttaatccatcttgaattgatttttgtataaggtgtaaggaagggatccagtttcagctttctacatatggctagccagttttcccagcaccatttattaaatagggaatcctttcctcattgcttgtttttctcaggtttgtcaaagatcagatagttgtagataagcggcattatttctgagggctctgttctgttccattgatctatatctctgttttggtaccagtaccatgctgttttggttactgtagccttgtagtatagtttgaagtcaggtagtgtgatgcctccagctttgttcttttggctcaggattgacttggtgatgcgggctcttttttggttccatatgaactttaaagtagttttttccaattctgtgaagaaagtcattggtagcttgatggggatggcattgaatctgtaaattaccttgggcagtatggccattttcacgatactgactcttcctacccatgagcatggaatgttcttccatttgtttgtatcctcttttatttccttgagcagtggtctgtagttctccttgaagaggtccttcccatcccttgtaagttggattcctaggtattttattctctttgaagcaattatgaatgggagttcactcatgatttggctctctgtttgtctgttgttgatgtataagaatgcttgtgatttttgtacattgattttgtatcctgagactttgctgaagttgcttatcagcttaaggagattttgggctgagacaatggggttttctagatatacaatcatgtcgtctgcaaacagggagaatttgacttcctcttttcctaattgaataccctttatttccttctcctgcctgattgccctggccagaacttccaacactatgttgaataggagtggtgagagagggcatccctgtcttgtaccagttttcaaagggaatgcttccagtttttgcccattcagtatgatattggctgtgggtttgtcatagatagctcttattattttgagatacatcccatcaatacctaatttattgagagattttagcatgaagggttgttgaattttgtcaaaggccttttctgcatctattgagataatcatgtggtttttgtctttggttctgtttatatgctggattacattattgatttgtgtatattgaaccagccttgcatcccagggatgaagcccacttgatcatggtggataagctttttgatgtgctgctggattcggtttgccagtattttgttgaggatttttgcatcaatgttcatcaaggatattggtctaaaattctcttttttggttgtgtctctgcccggctttggtatcaggatgatgttggcctcataaaatgagttagggaggattccctctttttctattgattggaatagtttcagaaggaatggtaccagttcttccttgtacctctggtagaattcagctgtgaatccatctggtcctggactctttttcattggtaagctattgattattgccacaatatcagctcctgttattggtctattcagagattcaacttcttcctggtttagtcttgggagagtgtatgtgtcgaggaatttatccatttcttctagattttctagtttatttgcatagaggtgtttgtagtattctctgatggtactttgtatttctgtgggattggtggtgatatcccctttatcattttttattgcatctatttgattcttctcgcttttcttctttattagtcttgctagcagtctatcaattttgttcatcctttcaaaaaaccagctcctggattcattaattttttgaagggttttttgtgtctctatttccttcagttctgctctgattttagttatttcttgccttctgctagcttttgaatgtgtttgctcttgcttttctagttcttttaattgtgaagttagggtgtcaattttggatctttcctcctttctcttgtgggcatttagtgctataaatttccctctacacactgcattgaatgtgtcccagagatcctggtatgatgtgtctttgttctcggtggtttcaaagaacatctttatttctgccttcatttcattatgtacccagtagtcattcaggagcaggttgttcagtttccatgcagttgagcggttttgagtgagattcttaatcctgagttctattttgattgcatgtggtctgagagatagtttgttataatttctgttcttttacatttgctgaggagagctttacttccaagtatgtggtcaattttggaataggtgtggtgtggtgctgaaaaaaatgtatattctgttgatttggggtggagagttctgtagatatctattaggtctgcttggtgcagagctgagttcaattcctgggtatccttgttgactttctgtctcgttgatctgtctaatgttgacagtggggtgttaaagtctcccattattaatatgtgggagtctaagtctctttgtaggtcactcaggacttgctttatgaatctgggtgctcttgtattgggtgcatatatatttaggatagttagctcttcttgttgaattgatccctttaccattatgtaatggccttctttgtctcttttgatctttgttggtttaaagtctgttttatcagagactaggattgcaacccctgcctttttttgttttccattggcttggtagatcttcctccatccttttattttgagcctatgtgtgtctctgcccgtgagatgggtttcctgaatacagcacactgatggatcttgactctttatccaatttgccagtctgtgtcttttaattggagcatttagcccatttacatttaaagttaatattgttatgtgtgaatttgatcctgacaggatcaatgacattatgatgttagctgattattttgctcgttagttgatgcagtttcttcctagtctcgatggtctttacattttggcatgtttttgcagtgggtgttaccggttgttcctttccatgtttagcacttccttcaggagctcttttagggcaggcctggtggtgacaaaatctctcagctttgcttgtctgtaaagtattttatttctccttcacttatgaagcttagtttggctggatatgaaattctgggttgaaaattcttttctttaagaatgttgaatattggcccccactctcttctggcttgtagagtttctgctgagagatcagctgttagtctgatgggcttccctttgagggtaacccgacctttctctctggctgcccttaacattttttccttcatttcaactttggcgaatctgacaattatgtgtcttggtgttgctcttctcgaggagtatctttgtggcgttctctgtatttcctgaatctgagcgttggcctgccttgctagattagggaagttctcctggattaatatcctgcagagtgttttccaacttggttccattctccccatcactttcaggtacaccaatgagacgtagatttggtcttttcacgtagtcccatatttcttggaggctttgctcgtttctttttattcttttttctctaaacttcccttcttgcttcatttcattcatttcatcttccattgctgataccctttcttccagttgatcgcatcagctcctgaggcttctgcattcttcacgtagttctcgagccttggttttcagctccatcagctcctttaagcacttctctgtattggttattctagttatacattcttctaaatttttttcaaagttttcaacttctttgcctttggtttgaatgtcctcccgtagctcggagtaatttgatcgtctgaagccttctcagctcgtcaaagtcattctccatccagctttgttccgttgctggtgaggaactgcgatcctttggaggaggagagtcgctctgctttttagagtttccagtttttctgctctgttttttccccatctttgtggttttatctacttttggtctttgatgatggtgatgtacagatgggtttttggtgtggatgtcctttctgtttgttagttttccttctaacagacaggaccctcagctgcaggtctgttggagtacccggccgtgtgaggtgtcagtctgcctctgctggggggtgcctcccagttaggctgctcggaggtcaggggtcagggacccacttgaggcaggctgcccgttctcagatctccagctgcgtgctgggagaaccactgctctcttcaaagctgtcagacagggacatttaagtctgcagaggttactgctgtctttttgtttgtctgtgccctgcccccagaggtggagcctacagaggcaggcaggtctccttcagctgtggtgggctccacccagttcgagcttccgggctgctttgtttacctaagcaagcctgggcaatggcgggtgcccctcccccagcctcgctgccgccttgcagtttgatctcagactactgtgctagtaatcagtgagacttcgtgggcgtaggaccctctgagccaggtgagggatataatcttctgttgcgccgttttttaagcccctcggaaaagcgcagtattcgggtgggagtgacccgattttccaggtgccatctgtcacccctttctttgactaggaaagggtactccctgaccccttgcacttcctgagtaaggcaatgcctcgccctgcttcacctcgcgcacggtgcatgcacccactgtcctgcgcccactgtctggcactccctagtgagatgaacccggtacctcagatggaaatgcagaaatcacccgtcttctgcattgctcacgctgggagctgtagactggagctgttcctattcggccatcttggctcctcccccacttttttttgtttgtttttttgttttttgttttttttgctattattaaaaaactggagaaaatgacagtttttctgaaacatataatttgagaaaactaagttgcatattcacatatatagagaaattatggcccatgtgagttctgtggcatttatatttttccctcatttggaaccttaaattctagaaataattcttcagcatggttttaccattttccccccttggaacaggtttcatacttagaatagtgtaagtcaattggagtgttataccaccaaccatttaaattgtgtttagttaatatgttgtccagtttttttttaataacaaattattatttggtctttttatttgtgccagtcagtagggtgacagaacatagcagtccattataacagataataatctgtgataaatggcttgggaaaacaagtatcaactctcatggtttctttccactatcacccatttctaaataacttcccagtcagtatggcttagcctatgccatagttatgtgtttccctttattcctgatccatcttcatatggacatttaatccttgaataaacaaaggaacatagtgaatgagacctgaaatttttttaagtgacaacaagatttcatacaaaattagttaaaataggaaaaaattagcttccctagtatgatgaatgtgaactgcacagacctgtgactgttgaacttacatatgtttttcattaatgtgttccaattgttttaatgacttttgtgttgatgcttgttctgatttttttaatgtttctttatttcagtgtagttttaagaagtgatattaacgaacaaactacttaattgtcactatattaatttttcagacaaacatcatatctgaactaagtaaatggagacttaattttattgactggcaccgaatggaaatgagaaaagagaaagaaaaacatgcagcacatttaaaacaactgtgtaatcagatcaatgaattgaaggagctgcaaaaaacctttgaaatctccattgggagaaaagatgaggtcttcttttttatatttctttttaactgagattcagtaaatgtcttgctagataataaattctaagaaatgattatttacctcatacaagatacaggttctatcagaaactgacagaaaaattcatagccattggatttattcttcctattaaacatatcagcataatgtcattttaccctcaccattgacttctgtgttcttgatgttttaagagtgtttgctttgtaaactacattaaaacatcaccttgtaacccataaatgtataaaactattatgatttgtcaatttaaaaaaaatttttttttaaaaagagtatgtgctaaatgtaagtacactagtttttttctttctaatcctttcttcctaaccttaagcgaacgtgaaggaacgagcattatctacattttaaaccatccttttaggggtcattttaaggatctcacattctttttttaatctctctctttttgaaacagggtcttgctatgttgcccagagtggagagcagtggctattcataggcataatcatagctcactacaatctcaaactccggggctcaagtgaacctcctgcctcagcccctgccagggactgcaagtgcataccaccatgcttgggtttaagcatctcaaattctatctgtgatggatgtgttttcattaatgaaggctttcttcattttattgataaacacagaaaacatcttttatttcactttcctttagcttcttaagaattcgagggtaagattcaagtctgtgctaattttttgcctcctgacacagtacctggagcaaagcagatgggcaacaaatctgtgcccggctataaatggatgtccggaggggcatccacttatggataggagagtggtgttgttcagaagaggaggacttgggcagacacctcagctgcttgtctgcagaagtagcacttaagtgttttcatgaattaaagattataatttttttaaacataccttgatttcgtataaaattgaacattttatagaattttttttgaaacaatggattttaatgtcagtcattttctttgttatactcaaaattctgtcccatggtttttaagtttaatttttttattttgaagtatcacaaagaatatagatatcatatgttcagtttatgagaatgagtaaagtggatagacaggtactacgattcagcttaacacatagaatatttccagtagcttagaatgtatgcccttttcctctctggaaattatttaaagagcagttataaatatctcttggtaaatgtgcccaatttacaaaatctctttctaatgtgactatttttagaaatttatttcagttattcagttcttttataagagagaatattatcttaggattttaaagccttctgaatttttttttaagaacaagagtaataatatcactgaagaagtacatcaacatataacattaataacattagttatatataatgttattaatatgttatatgtataacattaattatatatatttacttatatatataacattttatgtatgacatatgttatatatgttattaatagttatatgtataacatgttattaataggtatatataacatatataatatatagttatatatataactataacatattaatagttacatatataactattatttgcttttataggtttgtttaatccagaaaatcattggacagtcgttgaggaacttctatatccaagatagtagtagggaccagaaagatatttaaatatctaaatattctggcccctgccctcaaatctagtgaataaagacatggtgtatataggagaactttcaaatgtataattgttttacctgaattgaatgtcagtagctaatttgcatatacataaactttttattggtgattaccatatacacataatgaagacttccttcttcttttgttccctttcattagttgatatctagtatattcatgtgagaaagttttaccatctttttaaagataataatgaggttaactgaatgaatatagtagtgatccatacctatcctctctagcattttttgatatatgagaaaatcactttaccaattgctgttattttaatatcacaataattgggttaattgctgtttacaggtgatttctagcttgtctcatgccataggcaagcaaaaggaaaagatagagttgatgagaacattcttccactggcgaatcggccatgtcagagccagacaggatgtaagtgtcaaagcagaagacagctgatggatgttagacttctgaattcagaagtgctcaggatcacttattatagttgttttctaataagtcaaaatgaatttgtgatttaatgttcctcttatttcaaaggaatttgattttgatgtagtttggaaaaaatacagtttagatcttattgacatataatatatatatattacaatagatacatcatttcctgcttcatagtaggttaataaggattgttcctaaattgtaaaggccctggtaatagaaccccctcagatgtggttattggagaaagaagttatgtttaacatatcaaatgcttcctatattgtttctacttttaaaatgcctgaatacaacttattcataaagaggctttactatatttatacattaaatcacagtataaatgtttgttatgtagacttgccttagagtgagagtcagagaaagccatacctgtacagctttttaaaagttatccttagcttgtagtatatcatttaaacttgaacatcttttattttaagtaagagctgagttggtatatcagtaaatagtgaactgaaagagaatactaaattgttgtatcaaaagtggaaaagtatgagtatatcccacaacaagacatagtttagagacacatgaatataggagatgaatatatatatatatgctttccatgtatattcatgtgagctatggaataatctctgtgtatttagtttccaagagattagtatttaaggaaaaagctagtacaggttgagtatcccttatccaaaatgtttggcaccaggagaattttggattttagattatgtttcatatcacaccttatgcacaaaattcatttatgtttcatatttcaccttatacatatagcctaaggtaattgtatacaatatttttaataattttatgcatgaaacaaagtttgtgttaagtacttctgtgtggaatttttcacttgtggtgtcatgctgacactcaaaaagtttcagatttttggattagagatgctcaacctactttatcctggaataagatttctcctttaagaatactttctggatttttcatttttttaattaatcccagtagattaaatccacattaagtaagctggttaaaatgaatatttatactctactttgaaacttgtcaagtgaaataatgagaatacatatttatttttaaatgttagccagaatagttgaggctactgtcacttttggatagtttttcaaactgaagaaattgagaattggaactacttcttcaaaagaatttaaattcattgataaaagaaaaatagcataagtttttatttggattggcaccatatatgatggcagggtttataaattaaatcttgcttgtggtggccatcaaactgaagagaaagcagtgtcatctgaagccacagccaccaccatttcctgccttctagccactctgttattctcctggtcctgctaaattcataactaagatggcaagtggtgatttgctcattttctttcatttggttgtattctttttctctaacttgattagttgcataaagcaatgatgtaatggataagagctcagtctctggagtcaggcaagtctggctttactcatctacttatgtgaactacgtagcttgcttaacctctctaagcctgttctcctatatgcaagatgagaataatatgattacatagaattaaataatgtgtatatgtacacttaccaccatgttatgtttattattactaccaatatatttatcaatcaactgtgtttttgaagttatattttacttttatttaggtttatgaaggtaaactagctgaccagtactaccagagaactttactgaagaaagtctggaaagtctggcgttccgtagtgcaaaagcagtggaaagatgtggtagaaagagcttgtcaagcaagagctgaagaagtttgtatccagatttccaatgattatgaagccaaagttgctatggtaagcatctttttctggttttcactttcttctaatacaataaaaagatagatagactcactattaattaatagacttcttcttttggtctttaatcaagaatgcagacaaaaaaatgaaaacgtttattcttgtgttaatttaatgtttattgtatattcttacatggttgatataaggagttgtatagaaattgaaattattagttgggcgcggtgcctcactcctgtagacccagcactttgggaggccgaggcgggcagatcacctgagtcaggagtttgagaccagcctggtcaacatggtgaaaccccgtctctactaaaaaaattagctgggtatggtggcacatgcctataatacccgctactcgggaggctgaggcaggataatcttttgaacctgggaggcagaagttgcagtgagctatatcacactgttgcactccaacctaggcaacaagagcagaaatccatctcaaaaaagaaaaaaagaaattgaaattattttttcccattgacttttaataataaaattaacattgttttcatgggaaaacatttggaattgaaatgaaataaaatccattctaaagaatgcaataggcctcttgaagttaaatattaaaatgaaaaaataactcattacagcattaaattgttaagattaaaaataaatccataatacaaataattttctgcagttcactacgacatgcaaaaaatgcagtcccctgaggtttggcctatgggaaagtgtgttgtacctagggtcactctgcacttcaaatactgaaggtaacatttacattataaaaattctgttaatattgcaggcatgtagtttattttatttttttctgaaagggctgtctgtggctcttaatgtattttgtttaacatcctacataaaagttttacagtaaaaaatggtgtatctttttgtgaaatgaaaatacatcagcaatattcaatgggactggataaaattccccttgtttgaaccttgattttaaggttaggaatgaaagcattttgttgatggagataatagaggtaagaggtaccttttaaaataaattgcacatagcagaagaggtaagtgacaaactttttaatatttcacatgagaataatctcaaagtatatatctatttttttgacagtattcttctttgtatctcaaattgttttgctttttaaacattcttattttagttatctggagctttggaaaatgcaaaagctgagattcaaagaatgcaacatgaaaaagagcactttgaagattccatgaaaaaagctttcatgaggggtgtatgtgcattaaatcttgaagccatgactatatttcaaaacagaaatgatgcaggttagtatttcattaaagtttctctgcctaatttcaaaaaaagatttgaggagattttggtgattggtatggtctacagtacaaataatctgcagtaggtatgtttcatccaggtgctgctattcttaattctatggtgtcatatccagacttaaatctgccatgaaaatgagctcagtcatggttacttatggtatcttagatctgatcaagtacactgtcactcctaagtatttaagctaaatgttgaaaataatattttaatgtatagcattattttaaatctcttttaactaagaattttaatgcctttttaagtacaaaacttctaattttgtcttttcttaagtagccaaatattttggactattttggtaagtatttgttatctagtcatggtttctcattttagaaattcctaatcttcctgtttatgaaaggcctcaactaagctcattgcagcaaacataaatatagacctatctatagaagtaattttattttttttaaaaatccacatattgtctgacataagagtggtttgtgtagtagttttgtcagcatggcgtagaaaagcccataactagaatcctttgccaccaatttacccaggggcctgttttcctcattcggccttagatttcttctctgagcgaaggagataatataaaccttccttacctgcttcctaggggcttcttgtgggatgcagtaaaacatatctgaaaacactttaaaagacaaaatgcactttaacgtgtaagatgatagtcatgatgtaattattaatagttttaattcaagtcaacgtctcaagattttgtaaatgattaacatgatttcaatccaatgaataacttctctgtgcttgtgatgcccttattttaaaacatcaacaaacatttattatttaaagcatgcatattgtggataggagtaagtttaggcaaattgctttctatctgaagtggttgtggtttgtgggccatatttaatttagaaactgagaatcatggaatctcaaggctgaatagtttattttggtaatacctaggtgagtacttgatttttccaataaatggtcttttatttgagtatcagggttgaaaacaaactcaccaccttcaatgatagaatagtctgtttcagttctaagtatcagcaagttgtgtgtcacaaattgagaaatttaattgtttacttgggagaaatatgagtttcacaagtaaagtgacaaattcctattagaacttcttacattaaattacaagaaacctgtttcttataacctacttaaaaagattttgaattgacttaggagtatttcccaccttaatacatttaccatcttaaaatgtaaattgaaatgcaactgtgtctcctaaaggccaatatccataagaggatttgaagaaaatgtcttctgctaattacacaacatgatttcttttgctcctgttacttttgaaacaatcgatgagaaagatgacaagaatggtaaagcatgcattagcaataatgttggtagagctaccaaaggcaaaaaagttcagtataattcagtggatctgctttgtgatatttaggttttatgacattttaatgacacctattttttttagttctcataagaaaaaaaaattacttttggcccccttctattaaaacaactgttttttataggccaggcgcggtcgctcacacctgtaatcccagcactttgggaggccgaggtgagtggatcacgaggtcaggagatcgagacgatcctggctaacatggtgaaatcccgtctctactaaaaatacaaaaaattagccgggcgtggtggcaggcacctgtagtcccagctactcaggaggctgaggcagaagaatggcgtgaacccaggaggcagaggttgcagtgagctgagatcatgccactgcacttcagcctgggcgacagagcgagactatctcacaaaaaaaaaaattgttttttataatgcagtttttaataatgtaaagttcctaatgcatctgtcttgttagagcaaaataaatatttggttttttatttgtaccgattctttgctgtctgtaatttgcagtacctctcatgttgtgcagtatcttaaatcttacaaattagaggtttttatgaagaagttagaacatgacaaaaagtccttaaaattatatctgccaattttactgtgccaattaggcacagtaaaaaaaaatacttgacaagtgaaaaatttattccagctaaaatgagattaattattaaacttaagagttatctgatatcagcctatattagcaagagttgatcacctgcctctcttccctgaccttcatactgtttctacatctcctaatgtctgccaccatctaaagatagacactcagaatctctaccaaaacaagttaaaactcagtgtgtgttttgttttcaaattaaaagtattttatattgaattagtccctttcatcagaggagttcaaaggatctaggtaggcactgtaatcattgttaaacttcttaaataagctaactaactaatactctgcaaattttctatacagatagtctaaggaaaggacttatgcagaggcccaaatttctggagggaaagagaactacatagaaaaccatttaaacatacaacttacataatgccctctgttcagatgttctgaaacagctcattgactgaatttctaaaccctcaccacactgtttgataccacacagatacagtcttaagcagaaactaaccaaattataatactggagcgaaaacatctaaaattggaagaaaccctttgtactagccctggaatttgacattattggctccttagatcaagattaaggttcagttttgagggaaggttagtgattggggtgtcactacaaatcagttaggtgcacaaatatgctcttatgatttatataatttatctgcaagaacccatttcttttacagtgtaaaaagtgaagattttagttttattgatttatttttgttttctgacgactcaagaacaaaaataaattgttaggataggcgcaatacatgaaaatgagggagtatagtgatatcagaaagtggttctaaagattgattgcaggtcattttggccatctatcaggatatttgtatgaactaatacaaaggaacctagatctccaggctcactgtgatcatattttttgtgacagttgtgatggcaatatactctacttagctaaggtcccagctgagtacataatttattttcatcttttatttaagaacaaatgatccattagctttcacatgtggaaggaagtagtctgaagtttttagtggttaatgctgacattaaccagttaatactgacaaactgtattaactgaacattgtatctaatatactgtaaacatctaaatttttgttaggaccaaactttagccagtatgtgttttcattgtttggaagataatagtagtcctaacctggaagaatttgaatggaattaatttgtgatttatagggatagactccacaaataataaaaaggaagagtatggtcctggtgttcaaggaaaagaacattctgctcatttggatccttcagctcctccgatgcccttaccagttacatcaccactgctgccatccccaccagccgccgtcggaggagccagcgcgactgccgttccctcagctgcttcgatgacttctaccagggctgcttccgcatcttctgttcacgttcctgtttctgctcttggtgcaggatctgcagctactgctgcatcagaagaaatggttagtacagtttatacaggtcccaccttatgaaaagggcggccaggcccagtggctcacacctgtaatcccagcactttgggaggccgaggcaggtggatcacgaggtcaggagatcgagaccatcctggctaacacggtgaaaccccgtctctactaaaaatacgaaaaattagccgggtgtggtggcagccgcctgtagtcccagctactcaggaggccaaggcaggagaatggcgtgaaccctgtagacagagcttgcagtgagccgagatcgcgccactgcactccagcctgggcaacagagcgagactccatctcaaaaaaaaaaaaaaagcttgtttgtaaatttaatattttgaactcataaaatattttcctatggagaaaaaaaaaatctgtggtatttaggcaaagtcactgaaaatatttaatacacaaagtgactagagcattaaattg

SEQ ID NO: 361 - DNA, 32744 bp, Homo sapiens
  source 1..32744: mol_type = other DNA
gcatgcgcgccggcgaccacgcctaaatagccgcagcctctgcgcgtcgccctccacggttaccccggctctccgcccctccttctcgcggcgctcgagggaccatggccgatcctcgcgtgagacagatcaagatcaagaccggcgtggtgaagcggtaaggagccgggagcggcgccctgcacctcctcttcgtcacctcatggcggcccgcgaggctgagcggagcgcaggcccgaggaggcccgaggcgggctccgaactccaggccgcacccggggctccgcagttggctgggactggcagggacccagcggggcgcgctgacgcccgagcccgccagcctcgcacgccgcttcccgtccctctccgctcactggccgctctgatttgccggaagagtcggcggtggcccggtttctcggcgcccgcggtgggaaggtggtgggccgcggcctgcgagggcgggccgggccctgatcccgtgcctcctgtgtgcgcgcgccggcctctccttgctgaacttggcccggggaagcgggatcccagctgtgctctcaaatgggcttgaaagcaggctctgaagtttagggggatgcggaggatctgggcctcgtcaaaaaagaccgtagtggagccgtgtgacctaacatggctggcgtgactggcaggctttgagaactgggcctgaacttctagcacactcagcaaacttatgtggcctcactttctccagtcagattccccgaagctcgccccagaggctgtgagatgctgtttaaataacttgtgaaccagaagtatctgagacaggtcttaatttggaatgtttattttgccaaggacgtgcccatgacacagcctcaggaggtcctgatgacatgtgcccaaggcggttggggcacagcttggtgtaatacgttttagggagacctcagatattagtcaatgggtaaggtgtaccttggttccctccagaaaggcaggacaactagaaggttggggggcatccaggtcatagataagagacaaatggttgcattcttttgagtctttgatcagcttttcacttaatacacaatttacatgtgagagagggatagaagaatagtcacttatgccttagtcggctaaatgaatctgcgattttacatacacagtagggcagaggaagcagtcagttacgcatttgtctcaggtgggtagaggggtgactttgagttctgttctttgtcccatacctgtgaagataagctatcaatttacattgccagggtgaaatacaacagaactgttttagagtgaaggtcttgaggcccacaaggaatttccttgggggcaaattgtcagggaggtatgtagcttttttttttttttttttaatctttgtagctatcttattcaggaataaaatgagaggcaggtttgctcgatgcaattcccagcttgacttttctttttggcttagtgattttggggtcctgagatttatttttcctttcacaaactcatgggtagtgcagtcctgtaatttgcttaaattcctgtaaaccaagaaagtacctgagacaggtctcaatcagtttagaagtttattttgccaaggttaaggatatgcctgtgacagcctcaggaagtcctgatgacatgtgcccgaggtggtcaggctacagcttggttttatacattttagggagacagaagacatcaatcaatacatgtacgatgtacattggtttgatctggaaaggcaggacaacccaaagcgggctggggacagttccaagttataggaggttttccaattggcagttcgttgaaagagtttatcttaagacctggaatcaatacaagggagtgtgtctgggttaaaataaaggggttgtggagatcaaggttcttattaggcagatgaagcctccaggtagcaggcttcagagagaatagattgtaaatgtttcttatcagacttaaaaaggtcccagactcctagttaattttctagtggatcaggaaaaagacctggacagggaagagggttctctacagaatatagattttccccttaagagacatctttgcagggccaattcaaaatatgtaaagaaatatattttagagtaaaatgcttttatttctttcagatcccgctatctgtcctgtgatgccatactagagtaaagctggaatttggtgtcttattgttacaaaaagccttaagatctgttttaatgttaatgctgctcaattgttcctgagttccaaagggaggaatgtgtaatgagacatgtctgaccccctcttcccatcatggcctgaattactttagaatgcccttagttgagaggaggggtccattcagacggttttggagcttagaattttgtttttagtttgcattcctgagtgctggtagacccttcagtgttcattagaactttattgttcagacccaagaagagcaaactttttgatgaagtattacaagagaaaagataaacagccttctgaagaagcaagttattttgttgtagcaatgtctactaaagaaaccaactggcttcttcctgttcgcccacctttcctttgtttattgatatttccaccagaggaaggaccaggcaaaagggagaataaattcactttttaagataatgcttctgagttttagcacagcatcccacttcccgggaagctttattgccaaggcaataaggagaccatgtgagtaggagttaaatgcacagccatttgtgaagtgagactgcttgggttcagatcttgattctgccctttattctatgttgtggaatatattacattgtgctgtgcctcttttaccttatttgtaaaatagagcaagcacccaactcaagcagttgttgcaagaactgcctgctatgctgtttaatacagtatgtggcaaatagcaagtgggtagtaaatgttaataatactgtttggattctcattttacatatgagaaactgaggtttaatgaagttaaaaaaagaaaaaaaaaacttgtctaaagtcacactactagttagtggcaatgcaaggaaaaggaccaaggtttcaaatctacaactttctcctttaagctacagtgctcccgtaaagagtatttttaaaattggtaataggaagggaattgagatgtatatttgaaaatataaataatccatcctgtccctcagctcagagttctttttaccagacttttaccagactggttcacttttaccagacttgcttgggttatgtcattttagtcagtatatttggcagaactatcagggtgtgttgcagagtgctgtagaatgaaagtcatgagaaatgacttctaatggtagtttcccattcatttacttatatgaccttgacatttctcattccagtgatctctactagtttataaaattacttagttcaagtagttatatgctgacaatacatattctagagaaaatactcattgagattattataaactaagtttttgacttttcagaagttttcaatgcttatgtaaactgcttagaaataaatttatcattttatgaaacttggtgatagtttactattatctcaaattgcttataaattaatggaagtgtctcccatacattttaaaatgacttttctgttgacattttggggtatagcttcccacttatgtattaaaatgcaattaaagaaaaacccctaaactttctgttttagctgcttgttactcacattttgccttggtatatcaccatctaactccataaatattgtcccctattgtctcttgttatttttcacctgaaaattattttgctatgactctttccatcttctaccttagtatcctatttttattttattattatttatttttattttactttaagttctgggatacatgtgctgaacgtgcagttttgttatataggtacacatgtgccatggtgatatgctgcacctgtcgacccgtcatctaggttttaaaccctgcaacctatttttaaaaatctatattttacctcagcaaagtaaaaaatagatgaggcagcaatggtaacatattactaattgttggggctgaatgatcatggggcttcattatatttttctgtacataagttgaacatttttcatgataaaaagggtctaaaagatatgcttttttcctcctctctccaaatttagtttcaaagataccttaattcatgattcagacatgttcttgcttttgtgaaagggattctattcttttctttttttttttttaatcaatggtttaaaaacctatcctcgacactattttaaatctgttcttgacactctttttctggttagacgttcattttccatagcctcatttatcttcggaagtcacaacctttatttggaagaagaggtttaaagtcattattcatgccccaaatccttcaattttctctctagaaattgagagcaactagaaattatattctaggtatttgtcctagagttcagtttgggtaggctatactagaaagggtggattaatttagtttctgattagacctggtggaacacttcaggtgactcagaagttcctgatagtgggtctgaggaagaaatgtggacaggcaggttgaatgttaggggaatatggaaacaggcaataagtagatgatggtatttggcgtgtaggagatccagccatgcgtgcaagacggccatttcagcatgttggcaaaatggcagagttgacctaatggatagcagcccacattataaagtagaaacaagtttcagggccagtatttttaggccctgggaaaataggccggaggtttacggtgagtgtcttgttcctagagaaactttgttaccttgtacagtaaatggcaaagcatctgatttctgggaagtgagtttcaagagagagaggttagattactaggaataaagaaagagtctagatactaggaatggcttagaaggtgagagttggacagaatgaggctgaattggtgctaagcctctgactctgagggctccttaaatatcttccagcaacaagattttaatagtattgttgttatttttagttgacacatacatatttacagggtaccctgtgatattttgttacatgtatacttttttttttttcctgaggactaattcttgctgtgaaactagagaaatgtatgtaacagaggctagatgggttattatattatttttatttttattttttcagagtcagagtctcgctgtgtcacccaggctggagtggactggtgtgatctcggctcactgcagctgctgcctcctgggttcatccctgcctcagcctcctgagtagctgggattacaggtgtccgccaccatggctggctaatttttgtattttttagtagagacagggttttgcctggctgatcttgaactcctgacctcaggtgatccacctgccgtggcctcccaaagtgctggaattataggcgtgagccactatgcctggccctaggtgggttattatactaagtttctttgagcagcagcctttgttcacatgtgactcactggtagtgggtattagttggcaggtttgggtgtagctggctctttgttttttttcttttttttttaagatttggatctatgtttccagcagattgctagacctattgatatctgtgacagggtcacaactaatctggcagctctagcagagttaccaaataatactcagttttttcccccagcacagaactgttgaacactctgttttttttttggagcgggggaggatatctaggtggcatcaattatcacagtttgcctgagactgaggggtttcccaggatgtggaacacttcactgctaaaactgggaaagtcccaggcaaactggaatgattggtcacctcttctgtaactagctaacatagctctgttttatgtgttctgtgatttatttggaggctatttacagatagtacaactgtgagttgtatgttgtaccttaatttaaaacttaagtgcatggtgtaaatatgaatccttgacagagtagcttttgttctgtatttaaattattaatgatttagaaaataattttcactaaagtaggagaaaatgcagaattgatattttctaaatgtggtatttcagctaagtgacttatctgcaccaaaaaagtttccaagtgggatttgtgttcataaaaaagtttgttttttattagacttgtgataaattcaagaaattcttctgcaagtaaaaaacactcacaatcatttaacataaaaggttatttaactttaaagccagctttcaataaagcctgttaaactagttcactggtgagtgaatgaattgattaaaaatactttcttaaatatatctttttataaccattttggattggtaatggcttaaaatccaatgtgaacaaagaatgttagggcattggaaatagcactgacattggcccatagttttcctctgattaaatgaaagtgacaccagtagattagaatgagactaggacaattcacactgcaattttgttagtttaactttaacagtcttttaacactcttgtttaaatgtagctgacataccataattacaaatctacaagccttgattatagaattttacatcatgagcctgtggggaaattgtattgatttttttttttttaataaagcaagcattgttcccaaactgtggcatcttccgaagtttgtttatatctacatcctatatacaactgtgtatggtgtatatgctatgtatagcaggcatgaagacaacataaaaggtatgtaaaatctccactattagttcaatatatattatactgatataaaaagtgaagaatgcaaatgacacgtatacttaagtagacgtaaagtctccccccattagctttagctgtttatatacttatatttaaagcaatggtgcatagaagtatggtggactgtatctgggataggttaagaacatagtcctgtaaattattcctgtaagatttgctagctttgttttcttttatcctcttttgcactgtaccccattgctaagttcagccagatggctaccttcctactttgaaatttagctagttcctttaggaatttgtgtaatgtattcagttctccaaagtggtggtcagaggccatgtcaaaatggattgcaggtggtcagctcttcaccacattctgttaactacttggcaagtagttactcttaggagcaatatagcaggcaaccagatgtctcttcaagctggagagggagaaggctaaggccactcatcatcacagttttcccaacacaaggtattttattctccaggttgaatgtggagatgaaagatctttggccctgtatgtgtatgggtgttttgttttttcattgcatttttttgtttggttggaaattttgaaaatctgtagtaagcaaggttggaaaattttattaataatggcagtctaaaactcttaagacagtaaatgcttagatgtgtgatgtctattccagtattctacttccagtaatacctttataaaagaatataataatgttctattgtgatgctgttgtgtccaaatagaactgatttttttcttaataacttgtcataggtctaactaaagatcactcatttagcagcctcactcagaacctacatcttactgtctttgaatcatctggtatggtgttggcacattatactcagtaaaagtctttgcaatacacagatgaaggaatgaaatcttcctttataaggattttgaacctgatcggataagcagtagagagccactgaatcaattactatattacagcataatagttactatattcttgcaatatagtaattgcagaatagttatttattcttgcagtgagagttaaatagatgggctcccaggctccacttactacacgttattacatatgtgaccctgggaaagttacttagcctttaaaagccccagttttcttagccggaacatggggttaatgaaagtacctgttttttttgtattgttaggataattaaataaggtaatcatgtaaagcacttagcccaaatgcctgatatgtagtaaatgttcaataaatgctaactgctctcattattatcattaacacctatcttcgttcatttgtgctgctataaaaaaatacctgagactgggcaatttataaataagagaaatttatttcttatagttccagaggctgggaagtccaagatgaagaggccagcaagtatctggtgagggcctggtctcttgcttccaggatggtgcgctgaacactgtgtcttcacatggcagaagagcattaaagggcccaaggctgtgtgaagcctcttttataagggccttaatcccattcacaagggaggagacctcattacctaatcacctaaaggccccatctcttaatactgtagcattggaaataaagtttcagtgtgaattttggagggatacgaacattcaaaccatagcagcagcatctttattacttttctgtagattatcaacagtgtggatgaggacttaaggatgaatggttactgatccccaggagagaccctggaacttggctttgatttaaattgtgataaaagcttgtgttttagttgcttgttctgttcactgattgtctgtggagggagaaaggaagagtatgaaccttgtgttcttgagtaatttctaagactttgtaatgatcatctttttgtgaccattgctgaagcagtgattccctacccccaagccccagcaaaaaatgtggcaaggccagttttgcttttttattggactatcattaagtttattgtggggaagagtagacaagtgagttttggagaaccctaatttcaaaatctataaatgattcacacaatgattacaagacattcttacaattctagtgctagattatagttatatccaaatccttcttactgttttttaactgagttctctgttgttgttgagatcctttcacttccacaagtaagttacggagttctgtgtgtgtgtgtgcttgtgtgtattctaactcggtttgtttgtctatatagtatgttggagcaagtaggcatcagctttttcattaaatgttcctcagcttctgaataatactaatgtcatgattttaataaatcatttgttgcctgaaatacatttgtactctatgaaatttttgaagacctccaagtctactgaagtgtatttgaacttacattactagtatagtattataattttgatttccaaatctagaatgttaagttctgaagacgctgcactatatcaaagtatacaaagattttcttaaggccaaacagttcttcacgtcttttcaggaccaaagggatggtgtctgatatatcattgcttttcacagaattgtttttcaacaaatagacacttaatagatatttgtcaattgagctaaggactggaggaaaccagaaaagggtttatgagggggaacacatcaagagactggaaataaaagtttgctttataaataaaagtgagagccgggcgcggtggctcacgcctgtaatcccagcactttgggaggccgaggcgggcggatcacgaggtcaggagatcgagaccacggtgaaaccccgtctctactaaaaatacaaaaaattagccgggcgcagtggcgggcgcctgtggtcccagctactcgggaggctgaggcaggagaatggcgtgaacccggaaggcggagcttgcagtgagcggagatcgcgccacagcactcccgcctgggcgacagaacgagactccgtctcaaaaaaaaaaaaaaataaataaataaataaataaaagtgagagacttagaaatggagaaaaaagagaaacaaccgctgttaagtaataaccaccctcaaatagacatttttcaggatagtatttttattttattagagatataaaagatatgaaaatatatcaaggatttgtttaaaagcaacaattttacattttttaaactaggaagagactagtctattgtggaaaatttaaaaattattacagttctgtcaaaaagtttttgtagtttacctagaattaactagaatagattcttaaattctagtttaatagaggggtctgtgtttgtgtgtttaactgcctgctaagttacatagactaatccactccaggttattattattattattattttgcaacttaagaaaaatagtagggacataggtatgtcgaaatctcatggggagtaggtggtatttcagggaaacaaaagagcaaaggtttggtcccagtgcttaaggaatttgtacattgttaagttatgcagtatacatgtatatgaggatttattcctagaacttcaagtatgaatgtacgaatgtatgtttttattctcattttaatggatatgtagtttagttttctttttttttttttttttttggccctagtttttcacttgtacaaatggtgccacaatgtacattgttatatatggcccctagaacacatatgtaatggttagcgtaaggcagaacttctcaaagagtagacccagaatggatttcaggtgtgtggaagtatatctcttctcagctataaggatggccaggtgtggccaagagcagccatgagatacatgggggaagagtcattcagacagaagaaacagcaaattcaaagacttgaaaaagggagtaagattggcgtgtttgaggagcagcaaccaagtgaaagagaggaaaagggggtaggagattcagaaaagtaggagggagagggtacagatcttagaaggacttcatgtaaggacttgggcttcaggtgtcaccatctctatgagagtttcctggctatgtccaatgttagtgcccccttttctgtgttcccagagaactttgtagttttcactatgatagtactaaaaatgcattaagctatttgttctgtttactaggctgatagcttccaaagtatggtctaggaaccccttggggtccctaacacccattcaggggttctgcaaagtagaaattagttttatagtaactaagacatttgcctttttcactttcacttgctcacaattgtacagtggagtttttcaggggctatgtgatgtttgatactgcaacagattgaatgtagaagcagatacgagaatccagctgcttctcttccagacataaagatttgcaaaaatgtaaaatagtgccgtttttctattttttgttttgttttggaaagtaagattatttttcgcaaaataggttatttttgctaacattgtacattgattttgttatttttaagtaaattaacaaatatatttaaaatttttctaactaaatatttaaaaaatttattttaatttctaatacagtaaatattaatagagataattcacataaacaaagctccttgggtagagtccagattcagatcacatcaagcaagatgttttcttgtttgggatggagaatttatattgggatggctagcaatgacttttgggttgtgtggaaaaaggagacagttttgagttgtttttggttaattctaacagaagataagaaagcactgtaatactctatattattggtgaataaagtgtttcacatacatattttaccattggttgagatttaatccttcaagtgctaaaagtatttttaaagatacctttaggaaaacatttccccaaatatatacttgcttcatcgaatcacactgaaattttctataaattagttttttttctgaatattgctataaactttttaaagaggtgaacagagttaaaaataaagatgggagacttaagtgtgctgtaaggaatgaatccaaattagttaccccagtagtattttctttctttggttactggttgtgtagaactgaattaatcttaatccttgatttatgccacatactcattattggtccatgcacagccctcatttgtttgctgtatgcctgtatttattactttcaaatagtgtattaataacatgagtccatcacctagcacaagaagtaaaacagtggtaataacatctaattttgtgctattacccccacctgatgtaactactatttttaatcttgtgtttattattaccttttaaaatataattttatttgtgtattgctaaaacgtgtcatttacttttggttattttttactttataagaagggcattttctgggacttaccatttttcacctatgttgataggattcagccctaaatttttactcttaggtgcagtacatttttttgatggttgtgtaatactccattgtttgataataccgcaatttatccattcctcttattgatgagcatttggattgtttcacttattaactgtgtttctatgtacattcttgttcatgtctctgttaattatgtctgagggtttttcttgggtatatacccaggaatgaaatcgtttggtcataagtatgtgagtattcatcttgtaagatgcgtatcttagttcaagctgccctaacaacataccatagactgggtggcttataaatgatagaatttatttctcaaagttctggaggctggaagtctgagatttagggtgctagcatggtcacattctggtgagggctctctttgggttgaggactgctgtcttctcattgtatcctcgagtggtgggaagagatctggagagctctctgaggtctcttttacaagggcactaatctcattcatgagggctccaccctcttgatttcattaccttccaaagaccccatctcctaatagcgttacattgaacgttaagatatatgaattggggcattggggttgggaggaagggatgggcacacaaacatttagtcgcttgcaatgccagacttccaaagggattgtacccttttatgttcccagctgcattatgtgggaattcctttcattgacccacatcctctccaatacttgatagacttcttaattttactccattatactgtctttgtttagttttcattttggaaaaaaattgttttgcttgtctttttatttatttatttattttatttatttattttttttgagacggagtcttgctctgtcgcccaggcaggagtgcagtggcgcaatctcgactcactgcaagctccgcctcccgggttcacgccattctcctgcctcagcctcccgcgtagctgggactacaggcgcccgccatcacgcccggctaatttttttgtatttttagtagagacggggtttcaccatgttatccaggatggtctctatctcctgacctcgtgatccgcctgcctcggcctcccaaagtgctgggattacaggcgtgagccaccgcgcccggccgcttgtctttttaaacaagcgtctccaagataaatagcaaaagaaaaaaagagggtgtgaggctccagacccacactcactcacttaatcatcttcttctgccttgtatagaatgatgtacatatataccttagacaacccagagtttttccctggtggagaggggagactttcagccctacctgtttccaggactgtgcacttagttaagggtgtgtggagagtgaggggaggcctatagatagtggtttgtatactgggtcctgaaaaccctcttggtgctctgtttttcaggagctgaagccaaagaatgccaataataatactttttgagtggttcttttcattattgttaattagacttatggtaccttgaattcttaagtttggcatagcatttctaaagaaagattgaattatttgttgataatgtttttaacccaataccgtgtggtttataattgccaatgccatagatttaaaaacctggcagattatacccctcatcttctctgcttgtcctcagcactactaccacaattaaaaagtactattttcttaaaaaagaaaataaatagaccttaaaattgatattttcattttctacgtattaatctttttaaactatgctagcatttttagtattacattaagtagaattagtcttgggagacaactttgtcttttgtttataaatagaataattctaatacatttcttttaaatgggcaatatggtatatagtatttggtgatgactgtcttcattgcaaacatctagtgaacactctggctacttccacagtaattttgcttttcatgataactacctgtattttcattccagtatctactgtccttccccacatgcacatagcctgtgttctttgaaggagagtgcctcacctacagcagctttggtgggggcctattagacttattaaaggcattccgttttcctggccacagaaactgattctgcatggtcatgtgatttagactaatctaaacagggtaaatttcagaactcttgcttagaattctgagacagaagtattaaactttcccatgtaactctgattgtggctgcagtcttcttttagcactagagcatctggccttgggaggtagcttgtattataaatagcagagtgaagagacaaaaacaaagtccttgatggaaacatctgttggacggctggatcagccagccttcaagcaggtcttccctgcattttagttacactagccaaaaaaaaaaaaaagtgattaaattccctgaattgaaaacgtgttacttgcattagagtatttttttttttaagtatttattgatcattcttgggtgtttctcggagagggggatgtggcagggtcataggataatagtggagagaaggtcagcagataaacacgtgaacaaaggtctctggttttcctaggcagacgtccctgtggccttccacagtgtttgtgtccctgggtacttgagattagggagtggtgatgactcttaaggagcatgctgccttcaagcatctgtttaacaaagcacatcttgcaccgcccttaatccatttaaccctgagttgacaacagcacatgtttcagagagcacggggttgggggtaaggttatagattaacagcatcccaaggcagaagaatttttcttagtacagaacaaaatggagtctcctatgtctacttctttctacacagacacggtaacaatctgatctctctttcttttccccacatttcccccttttcttttcgacaaaaccaccatcatcatcatggcccgttctcgatggtcgctgtctcttcggagctgttgggtacacctgcagaaaggctgtcacttcacacttggaggattgcacagtggccaggcagaggcgctcctcacttcccagacggggcggcagccgggcagaggtgctcctcacttcccagacggggtggcggccgggcagaggcgctcctcacttcccagacgatgggtggccgggcagaggtgctcctcccttcccagacgatgggtggccaggcagaggggctcctcacatcccagacgatgggtggccaggcagagacgctccttacttcctagacggggtggcagccgggcagaggctgtaatcttagcactttgggaggccaaggcaggcggctgggaggtggaggttgtagcgagctgagatcatgccactgcactccagcctgggcaacattgagcactgagtgagcgagactccgtctgcaatcccagcacctcgggagcccgaggcaggcggatcactagaggtcaggagctggagaccagcccggccaacacggcgaaaccccgtttccaccaaaaatacaaaaaccagtcaggcgtggtggcgcgtgcctgtaatcctaggcactcggcaggccgaggcaggagaatcatgggagcccgaggccgggaggttgcagtgagccgagatcacggcagtacagtccagccttggcaacagagggagactgtcgaaagaaagaaaggagaggaaaggagaggaaaggaggaaaggaaaggaaaggaaaaaggaggaaggaagggagggccgtagagtattaattgaaataattactcaaattcctaatttatgtatacctatgtataacataaagagtgatttttttccttacataaactggctagggatttacttccttccctcctatgtcttctaaattctgctgttgctttaggttcagctttagcctttcagtttccctccatttcagtgtcctattgaggactgatcctctgtgttagaagtaggaaagagaatcaaatgctgtcttttcttcaaccctcccctcttctctcaactcttgtccagttcagtgctgttctctgattaaggaggataaaagggagaagaagaaaaagggcagataaacctattttgccttggaatcccagtcatttattctcaaactctgacattgcttctgttctagtttctcatcttagctcttaggaggtagaatagtcaccacttcaatggcaaggactgtaatgaattagcaggccttcttggcatctaagttggaattctgaatttttactaattatgcatacttataagtatattgtataagtatacatacttatacaaagtatacatagtattctgtgaatcatgtttcatgcccattgaaatacattaaataggcttttgtgggatgcttctgaagtttaacaccaagtgtaacatttttcctatggaaaatgcctactgagatgcctaaacacctcacattaataggcatctttgcagcataactgagtctttaattggaaaatgcttggattatattgtgtaataacctggttttatgcttactttaaattttttatctcttgctttgatgcgtaaaccaaaaataaaattcaaaggccccccataaccatctgaatggactccctcctcagccagggcactgtaaaatttaacctgaaacattggttcagaccattatgggaagtaggagtcgcacatacctcattatacccctccagcattaacatcaacagagaccttaaatctgataagaaacaattacaatctattttctctgaagtctgctacctggaggcttcatctgcatgataaaaccttgatctccacaactccttatcttaacccagatgttcctttctacggataataactcaaccaattaccaatcagaatatgtttaaatctacctatgacctggaagcgtccccgctctttgatttgtcctgcccttccagatcaaaccaatgcaaatcttacatgtattgactgatatattattgttacagtaggtagctatagccaggcatgaggtgggcaggaaagggtttcccacctacccccccaccaggagtgtcaggtgaccgtcaggtgatggtttggcagttatcccactgcctctctaaaaatgataatcggcagttggtgccagggagaagcagtttcctgatggtccccggttgtcacactaaagtgataattgatcacagacagcagggagcagcaatttcccaaacagataatacttaaaattggcagtcagtctccaataaaatgttaggaattgagcaagtgaacccgggcatgtgcattaagagaaaatggcagagaatgacctgggggcattccactggaagaaggaagaatgcctcaggcaggcatacatacaacttcctaaacacactgtgcatgctcacctcccaagtgtaaggagagcactacacatgaaggcagcccacactaagtgaagagtcatggggaaagggacacaagaccctggaagtatgcctgtagcaggacgagccgtggacaaaacctctcagacaccgtgttgtagaaggaagggctttattcagctgggagcatcggcaagctactgtcttaaaatccgagctctccgagtgagcaattcctgtcccttttaagggctcacaacactaaagatttcacatgaaagggtcgtgattgattaagcaatctaggggatatgtgacaggggtcagagtgaaacagaacagaacagggagtttcaaaatgttcttctttacaatgcctggaatccatggataacatcaggttctaagtcgtgagttgatttttaactactaggtttaggccaggcaggcccaggcctggttttgggcctggtgccaggccgcctgtctttgatttcactttcttgtttttttcttaaaacaggtactgagtataaaacaatataaaacaatatgagagggtctctctcttccctcatgccaacatataaaaccccaaatcaaaaggtcaaacgccacacttgtactttaggttaccctctcaggtctcttccaagtgtactttcctttcctgttctaaagctttttaataaacttctgctcctgatctgaaacttgcctcattctctttttctaccttatacccctcagtcgaattctttcttctgaggaggcaagaattgagattgctgcagacccgtacagatttgccacccctaacatatttggtgccatgagactcagataccttctacccttgaccttgtatctctctaaaatatataaaagcaaactgtactccagccaccttgggcacatgtcatcaggacctcctgaggctatgtcacgggcacatccttaacctaggcaaaataaactttccaaattgactgagactggtctcagatattttgaattcatgtttggtaaccacgggagggattctgagtggaggtggctctgacctttgacaaatctattggtgcttggtaccagcttgggctatctttatggctcaaaccaacaggacaattggctgaggcctaggaacccctgcctccagagaatccctgatgtcccaaaatttggttgagatctaaagttgttttttgttgttgttgttgctgtacaactccttttctggaattttacttgcttccaacaaggaaggcaagttttcctgcttccatgatggtggaaggcaggtaactaactcctttctgaagtttcagctcacttccaacaggaaaggcgagcttgagtttttttcctgcctctaggatgctagagagcagtctttagctggggtcccgttcctaggcaagtagctgaattggggtttttttctgggctaaagttaagatgaacaaccagctggccttaatttctgcttaccattagagcactctgtaatcatattgttggattttttgttgttgttgttgttctggtctttgtcccatcagatttgaccaactctacctgacgtggtcagatctgaatgagaattccaaattatggggaacaaagcctctgaattggctaaaattccttacacttgcaaaaagaaaaccagaataaaaccaagcacttggtttctgtatttgtttcctgtcttaaaaaaaaattgttctttcattacttttcttacactctattgctccttaccccttttgccatctttggtaccaagaaaaggtctagagaaggcttttaatgactcgaactcttaaagaactcacaacaaaggtgcattcacctgtttttggggtgttctgtttgtggagtttcaagggtcatgggcagattcttcttaggtctaacgctctgctttcccatattgcattacctgatctctttggctttcgggggttccagagactaccctgtacagtgaaaggatttgaccttggtgtgtgtaatggtggatgagaactacaaagttaaaggtggctgaggacaatttataggaagcagtcctagctgtttttttttttttttcctcttaggaagttgttctttaggatgctaattctagcgggcaagattctttagaagattctaaagtcttcattgcctttccttccaaaattaatctccattggcttgtctgcacattcacctgagaaactgaaaagtcattttcatagataaatgagagattgtgtttcctcagctctgaagataaaggtcattgtgctcctcccaaccagaaggtgcctctgagtgaccgggagcccaatgggagtgtctggggggtttaccccttgtgacttgtgcagcagccctacagggaactcccaacacaattagtttaaaaaggcttgtctaggaaatgcatataggagctggtcactctgcactttgagccctctggaaggtgctagacctctggagagaaaaattgagacgtaggagggtggaaatgactccatggtgacacactgttgagtcctccccacaatcagcacacttggacccactacacgaaatcctaggctgcggtctggttcctccttttaaaaaaatgtgacaaacaaatcatctaataatgaggaaaaacaaggagaacgaccccccttgggcaacccatttgtgtttttttttttgttgttgttgttttttgagataaagtttcgctcttgttgacccagctggaatgcaaatggtgccatcactgctcaccgcaacctccgcctcccgggttcgagctatcctcccgcctcagcctcctgagtagctgggattacaggcatgcgccaccactcctagctaattttgtattcttagtagagacagggtttttccatgttggttatgctagtctcaaattccgaacttcaggtgatctgccctccttggcctcccaaagtgctgggattacaggtgtgagcccctgcacccggcccctatttggttttatggtgcctctagttgcaaatggttatataaatggaagagcatgccaggttttctaatactccagctagttacatattaggtctgttcttgtgcacattttatttatttattattttaaatttttatttattttttgagatggagtctcgctctgtgcccaggctggagtgcagtgtcatgatcttggctcactgcaacctccacctcccaggttcaagcaattctgcctcagccctcctgagtagctgggattacaggcgtgcaccaccacacacggctaatttttatatttttattagagacagggtttcaccttgttggtcaggctggtcttgagctcctgacctcatgatctgctcaccttggcctcccaaagtgccgggattacaggtgtgagccaccgtgcctggcctcttgtgcacattttaaactgatgggcaaattacattgaggaagagtcagatcccaaaggttaacctgtaactataaaattcctaagttctctgtctctctgctttcttttctgcctgctttaagtctgctgctacttttctactgagataaaatccactgtatgaatccaaccatttctttttgttattgtttttgcaaaccagtgagtttgtattactatctcatggctagagttctgaagtaaaagctgtagaactttgtttttatgagtatgtgtgtgtttatgtatagctacatgtattttgttgtgtgtttttggccgcaaggtaccaaatttagctaaaagagtactcataaattaaataataatcccaaatacttttcaagttcacatgactgaagtaaaatatttaataatgtaacttttaaattattggtaaaataatattagaaatgtcttaagaattgtcagcatttttgtttgcatttattgatgaaacaatttcatttttatctctgccaaatactctaaggtttaaaaaataaacccagccaaaaccagaatgatctttggttgtgtaatttttaataagacattaatattggtttaatgaaaacagctatatcttgaattactggtaaaataaccctgtatataatcttaaggttcttacttaggtaatcacccaaaattcacaggatataaaaatggttgacagggaaataactttacatgatgactgtcacagttttcataaataatctaggtaaactgttaagtaaatgtagtggaataaatacttgtaaataaacttgtcataaattagaatctaaagttatactgaatatttcattaaatgtctggatatttttcaatttaaaaaacgcattgtaggaaaacattctaaaaaatatattcttattaaaaggtaaataatttgtctaattcaaagcttatttaaaggttatgtataaaacaaggtaaaagggaccaggaagtaagagagatgtaaagaaagttatagaaataaataggtatttttggtaagaaaggttaaagaaaagtaattttatgtgagaaagagtcttgtatggtgaatttttatcctaaaataaaatgactgggttcttcaagaaagagaaatattcaggacaagccatagagtccagacatgctgtgaatggtctaagttttaataaggttaataaaaaaggaatttatacaaatattatgtgactggctgggggcagtggctcacacctgtaatcccagcattttgggaggtcaaggtaggtagatcacttgaagtcaggagttcgagaccagcgtggccaacatggtgaaaccctgtctctactaaaaatgcaattagtcgggtgtggtggtgcatgcctgtaatcccagctactcatgaggctgaagcaggagaatcacttgaacccaggaggcagaggttgcagtaaaccaagatggcaccactgcactccagcctgggcaacagagcgagaatgaaaacaaacaaaaaatattatgtgattaattggctataattaaaggaaactataatagtttttgttaaaattgaactttgatattaaaaataccctaatacagaattaaataattggttaaaacaagatgtcattaaaaatagttactcaaagcaagatgtttttaatttttaaattctgtaatctgtctcattttgaagttattcacgatatctcagaagctataccctgctgccttacctccttctctcttttatgaaggcctgggatggtaactttctgcttcagcttttgttgtaacattttttaaattaatggtttaaagtaagggagggaatgtttttaaaaaagcaggtgaaaaatgttggatctgcttttgtctgcatgtctcttatatctgtatatgtgtcaggagaaagtgatacttcactattaaactgtgtgaaagagctctaatcaattgacttaaagaaaagtaagggcttgccattctgatagaagctagctcacatgccttttaattcacatgactttggtaatctttggtaaggttaatttggtaaatttgatctcaaaattctcttcagtagtttaaaatcttaaggtcatgttttgttaaattaaaacctcatttttttttctcccccactgggaatttgggttcttaggagttaggtagcaggagtgtagaacatgttttcagtgaagtttataaaacacaaggatgtggattttgctaaagaaaatgtaatttttttttaagagttgctttaaaataaagaaaaaattaggccgggtgcggtggctcatacctgtaatccccgcactttgagaggctgaggtggacagattaacttgaagtcagtagtttgagactagcctggccagcatggtgaaactccgtctctattaaaaataagccggaggccgggcgcggtggctcacgcctgtaatcccagcactttgggaggccgaggcgggtggatcatgaggtcaggagatcgagaccatcctggctaacaaggtgaaaccccgtctctactaaaaatacaaaaaattagccgggcgcggtggcgggcgcctgtagtcccagctactcgggaggctgaggcaggagaatggcgtgaacccgggaagcggagcttgcagtgagccgagattgcgccactgcagtccgcagtccggcctgggcgacagagcgagactccgtctcaaaaaaagaaaaacaaaacaaaacaaaacaaaacaaaaataagccggacatggtggcatgtgcctgtaatcccagctactttggaggctgaggcagtaggatcatttgaacctgggaggcggaggttgcagtgagcggagatcagataaaactaaatggataaaaagaaaaaactaagccagaaaggaaaatcggaaggaaggaaggaaaaaattatacagataaacctaaatggataaaaagaaaaaactaaacaaaagttacctctgagacctgtggttacagagaagatagttaatgtgggggaagggtaaaaccaagtaactattaaaccatatggtataatgtaaacaaattgttccatttcgtaggctggtatcatcagcttcctgagaaacctttactataatggattgtaaaaataactactttaaggacaaatttcttaattgtaaatgctgcaaaatgaaggagcttgtttgggttgatgcaggacccacagcaattaaacaattgctgacgagtatatgtgatccagatgcacaggaggttattcttgcaaccagcctattggaccagatgatcttggtaccacccagatcaataaactggctcatctgatcttgtggcaccccctacccaggaactgactgagcgcaagaagacagctttgactccctatgatttaatctctaaccaatcagcactcctggctcactggcttcctcccacccaccaaattattcatagaaactctgatccctgaatgctcagggagactgatttgagtaataataaaactctggtctcccacacagctggctccatgtgaattactctttctcttgcagttcccctgtcttgatgaattggctctgtctaggcagtgggcagggtgaaccccttgggcggttacagtgctatgggacaaaattaagatttggtggccattgatgttgcctctggccacatctcctctggggagaatgtaaatcaaaaataaaattggaaccctcccccacccccaaccatcttaatggactcccttcttggccagggcactaaaatttaacctgaaagactggtcaggctggccggcgcggtggctcatgcgtgtaatcccagcactttaggagcccgaggcaggtggatcgcctgaggtcaggatttcgagaccagcctggccaacatagtgaaactaaaaaatacaaaaaattgtctttactaaaaaatacaaaaaattagctgggcgtggtggtgggcgcctataatcccagctacccaggaagctgaggcaggagaatcacttgaacctgggaggcggaggttgcagtgagctgagattgcgccattgtactccagggcaacaagagcgaaactgtgtctcaaaaaaaaaaaaaaaaaaaaaaagaaagaaagaaagactggtcaggccgtaatgggaactgggagtcagacaggcttcattatacccctccagcattaacatcaacagaccttaagtgtgataacaattacagtctattttctctgaagcttgctacctggaggcttcatctgcatgacaaaaccttggtcttcataacccttatcttaacccagacactcctttctactgataataactctttcaaccaattgctaatcagaatatgtttaaatctaccgatgacctggaagcaccttgcctttgagttgtcccacccttccagatcaaaccaatgtaaattttacatgtgttgactaatgtattatgtctccctaaaacgtacaaaagcaagctgtacccggaccacctggcctcaggacctcctgaagtctgtttcactggtgcgtctttaatcttggcaaaataaaatttctaaattgacagagacttgtctctgatattttgagttcacaaaggtgatattgttggccaaatgtgcctcttactatttttttcttttcaatagcttctgcttatgtctgtcactgcttcttttgctactactaattattttaggtgaactcagactagttttacttctggatagtgatgtgaaaactgagattatcagaagtctgctctctgattcttgctttacttggactagaccttttttagacaccatagtattgtacattaatctccactagtataaacttcgtgagtcaggaacacatccccagagccctggcacaaaaagaaatcttgataaatattgtaaaatgaatgaatttactttgtgacatttcaagtttcttgaggacagaaacagtgtcttactccttatgtccctttaaaatttaatatattttaaaatatttgagtaattttttgaataggatatatatatcatatgtatatcatacatggcacaaatatgtgtgtgtgtatatgtatttgtgctatatatatatatttgtgctctctctctatatatatagagagagagcacaaatttgcaaaggtacaaagaggtatacggtgaaacaggaaacaggaatccctgtccaccagccacccagctgagaaaccctcctggagcgaacatcattattcattttttggtgtctctttccagaaatgttctgtgcatgcacaagtatttacatacatatcttcaaatgcaaatggtagtatactttctagatacttttttacattgcatttaacattagaacatgtagagcagcctcgttccttttaaagactgcaaagtattcggaatggacataccacatttaaaaaaaactagtcttctattgatggacctttatattgtttccaaagttttgctgttttggaaaatgctactgtgaatttccttgtttgttgctttacaaattggcagatttatctgtagaataaattcctacaagtgcaattgccggcttaaagggtactatgtgtgttttacgtattgagagatattggcaaattggccttaaagagttctattgactatttatagttctactaatgatttatacagtattttgttaacacggccttttggtctggaaataattacactgtaagacagtacagttgaaatatcaaagaaattaaaacaaagttaggtatgtcataaatatatgaaatatgtgtagacactagtccattttatcatttgctaccataaaatatgcacacatctgttatacaaagttaaaatttatcaaaacatataaacacagaacatgcatagcataatttgtggttgagaaatgtaaacaagtgtaaagatgcagtattattacgcatataataactgtagtccatgctgtactactgtaataattttgtagccacctcttgttgctgttgtgactcactcagtgttgacactcatcaccttcttgtgaacagttcatctcttcagtaaattgtgttttaacattaaaaagtgatctctcgcggttctcatgtattttttgtgtttagtgcaataatgtaaaccttgaatgtaaatcttgaataacaccatgggacccactagtggtgctgaaagtgccccaaagaagcagagaaaagtcatgacattacaagaaaaagttgaattgcttgatacgtacctgtagattgaggtctgtggctgcatttgccaccatttcaggcagatggttcctcttgtaaacaggcaacataaacttaaggtgttggtaaacacagtacaatactgtaaatgtattttctcttccttatgattgtcttaatattttttctccagattattttattgtaagaatacagcatgtaatacatataacgtacaaaatatgtgttaattgactttatgttattggtaaggcttctggtccacagtaggttatcagtaaagtttttggggagtcaaaaattttatgcagattttcaaacattaggagggtcagcacttctattctgtctccattgtttaagggtcaactgtacaagaagtggcaatgcccaagtatgtttagcttttttaggaaagtactttctacatcattgtaaattttaagataagaacaaattaggccggcagagatgctaacccatttaaattaatttcactttgaatatagttctaaaaggagaaaatcttaaaaaaaaaaagcaaaactaaatcgtagagctgatgaagtatcccttagagattcttagatattctcattttctgtctctgagtctctccctcccccatattcctctctccccctccatatctctctctccacacacacgcagaaatagacaagagaagtaggtggtaattagtttgctcaggattacccagctaattactggtagagccagaactgtgggaaacattccatattactacattacagttatttcacagatgtggattcctcagaatggcttttttgttgaaatttttttaagtcttagattttatttaacatttagtccttgaaactaggttcagtgaacttcaaccatttttttcagttttatcatttgaatttcagtttttaaataattttgtgatagctgaagaataaccattgcttatgctagaaactaagttagcttggtaaacagttctgtattagtgatctcaagaggctttgcatatgaattgctttagtttctgagaagatcatcttgatttctcccctttggagaaattttggagactatgttgaatatttttgaaaattataagataaaaacaaattaaccatacagatatgctgaacaagtttccttctgaatgtagtcttaaaaggagaaaacatttttcaatacaaatctaaaattcaaaaatctaaaatctaaacaaaaacacgaatctgtacttcatgtttcaaacactattgccaaagtatctatctagccaaatagaataagaagaagcagaaaaaactttaaaagaccaatagcaccttgctagctcattgctaataagaactaataggtacttaaactgatgaaagtgattcggacaacaacatattaaccccctactgtgccctgttttaagctgttaatagacattagtcttttaaagaaagactaacacttctatatttgttttctaagcttttgatacattagtgagcagttatagacgcttgccatatctgattcttatagcacagtgcattttccagaatactttttaggaacgctaactgctctaaaagtttagattctatgtagtctttaagagttcttaatgtagtaaatattttatattacgttttgattattgtaattaaatttttttgtagaagttatttgaaatgaataaatgctagtatttttcactgacaatgttatatgtagtgaaagtagtagttcttcgatttgatttttttcaatcacatagtaagaccagaattttcccagattttttagtactgtcatctatgaaattttaagtatttgttattttcctgaaataaatttaatttttagagatttggctggtaagtgtatgtatgtatgaggaaggaggatttttaaagtgtaattttcttaaaaatgtaagtaaacttttaatgctgactccctccacattagagtataatagcttaaatttttgtttaggtgcattacttttatagcactttagagaagtgctgtagaagactttggtcctttagtttttgctgttttatgtttttatagtaatttcaaatataaagctattagaaatttggcttgatttttaaaacaattttatttcgaagaaactgcatgatataagtaaatgttgaagaaaatgttggttggattgattaatgttatgatgtatacgatttggataaatttagactttaccagaaatttggggctttggtatttctttaaaaataagcatagtacttaatctgtggtccagatggtacatttgtaatgctacaagaaatgaatgatacgtgcacaaagtggttttctattgtttctcatccctattcaaaaattaaggaaaaaaagaaacaaaatattcatgagactgttttgtacagtttgtgttattaagtctaccaagttaatatcgaaaaaggaggtttagacataggaattgagtttattgctaaaagttagtgattcaaggtagtattggggcattgcagttttgctaggattagtcttttgattaagatcaagtgcatagtatgacaatcttcccttatcccagaatactttctatatagttaaaataaaccctttttatgttattttagtatcaaaatttacaatttaatgtcccacttgtctagggtcttataaatcagaaataattgaaaaagtaaaacaagtcttcattattaaaaaaattatttatttttatttatttttttcatagagacggggcctcaatatgttgcccagtctagtctggaactcctgagcgtaagtgatgcttcttccttggcctccctaagtgctgggattacaggtctgagctaccacggccgggcctgaaacagtgcaacaggttttgaatggcaactttcagatatctctaaaggccgaaatgccccgttgggaaccaaagggatgaaaaactgtttactcttcttatgcaagttttactactattgaaacagaaatgaccagtaaacttgaagatatcaacaactaatcctttacccaacagcaagcatacagaagctcatctttcttacacttttaattggttaccatagtaattaaaagtccctgactttcttcacaagggataaatcttttccaataaacagagttcaacaattttggtgagtgaacatgtgaaatgatagctagtacctcccttgtcagctgctaatgttactgccaatctagactatgataaattttcctaagcctgagaatttcttcactggatttatttcaacaggtatttatagaatatctactacgtataaggcactatattaaatattgaccactgttcaccagaactttgttattcagtttttgccaaaattggccccctataccatcaccagttcttagctgaaagagtgtaagtgctgtttaacacgtaattcatgatacaccctagcttaacattccttaatatcagatattcaggtttaaactcattgtgaaaattcagactagtgtcttcctcatattatgataaagttgtgaaatttgtgatacttgtaattgttactaagaaaaactaaagttgtgactaattttagtggcaaagacagtactttgaattacaaataaatattacagcatttctttgaattgcaaataatacatttacaaagtactgctttgaaaccaatgagtgatgagaaaaatactgaaataggaaaggcagttcttttataattataaaagtaaggtaatatcacttttatacttgttttattgaatactaatgttttctgcttctaaaatctcccttctctgccttgtgcccccagctttttctttctttttcttgttttggcaacataaaaaggcatgggaacaacaccattagttgatatttattgaacattcactgtgtgccgttatctacattagctaagcgcttcatgtgtatgtcatttaactttcacaatatgtaatgtgaagtagttgcaatgacccacattttacagatgaagaaatttagtttaagtaatgtacccaaagatacacagctgggaagtggtagagccaggatgagaacacctgttgagtaacaccagtgtactggctatacctttttatactttgacaaatttatatgagaggaaactgtggatgaagaaaggtgaataagaggctgggtgcagtggctcacgcctgtaatctcagcacttttggaggccgaagcgggtggatcacttgaggtcaggagttcgagaccagcctggccaacatggtgaaaccccgtctctactaaaaatacaaaaattagccgtgcatagtggtggatgcctgtaatcccagctgcttggggggctgaggcaggagaatcacttgaacctgggaggcggaggttgcagtgagccgagatcgcgccactgtcctccagtgtggtgacagagcaagactctgtctcaaaaaaaaaaaaaaaaaaaaaaaggtgaataagacattctgttttctggaagctcagagaagtcctgtagttaaggacagaatgcttcatgaggtcagaggaggttatgacaaacttcctctatggcagtttttcagacttggcactttcgatattttgggctaatactttgctgggggcagggagggctgtcctttacattggggtatttagcagcatccctgacgtctacccactagatggtagtagaaccctcactacacacagttgtgacaagcaagattgtctccagaaattgtcacaattgcccatgttgagaactactattctaggattagggaaggcttatcacaggtgacatttgagtgggatcttgagattgaatagaggtcatgttttagatagaaccataggtatgagggcatggaggtgtgaatcagtatgttacatttgggaggcaataaaatgtatgtgatggctggagcatttagggtccgtggagttgggaagttagtaagacataaagctgataaattgggactcagttgtatatgtcatactattaataagtttgcaagtgagtaacaatctggatggtccacacagtatttaattgcctctttggatcttccactagagtgtaagttctttgagggcagagaccacatctgtcttatttaccattatatgcctagtgcctacgatggtacctggcacaactttgtgaaatgggaaggacaaaaatagggtatttatagatgtgaaaactcccagaagaggttgtggtggtcatgagaatgaaatttgaagacctccgtataaagggaacataattaactaagggccccagctactagattgtgaaacccattgctacatttgtcccaaggtcttgcaccccatgagctgctgccagccagagactgggtgcggcagg

SEQ ID NO: 362 - DNA, 32744 bp, Homo sapiens
  source 1..32744: mol_type = other DNA
gagtcctgggaaaggcgcatgcgctctcattgcagcctcggcgtttgtagaagaggagcatctgctccaggtgggtttggatttctgtcggttttgcacaagggatcctaaaggcgattgaaatggtacttagagaaagaaaggatcggggccggggctgttcattttgggccgcgcaagcgtggctgagtgttcggcgagagcgtgaactgggcggcgatgaggtggcggcgcggctgtcacttaagttgaatagggcggtgccttgtggggcctctgggtggaccgcctcaggtgcgccgtgaatgccttagacccccccgaataccttcccagggaaatctctagcctgtctcatcttattgcttctcttaccccgtgcagtcaggatttactgtgctcccatggggcgaggagcggggcctagtaagaagtttcaggctgtaggcaggggaaagcatagctgttccttgccttcagagagcaaaggagataagcgaaactggagggggaaatgggctgtgtgacatgttcagttagttgacgtaggttcagaatatcattgttttgctgcagaataaaaaccggtctcttttgactgttgaattcctttggagagttctggaagaagcagatttctgtcccaaagccaaattccaatttctgtatctagtttcgggtatataatttgcacatcacactagtagttttaatattctgacagttaaaagaggagttatactacttacttaagtcaactgaatactaatatctggcaggtttttttttgcctaagataattgtagtaaggaacagatttgtttatttaatactcacatggcacttaggtgctgagcgttatactaagcatttactgagcatctgctgcgtgccacgtacttttatatggaatattttctataatcctcactttcaccatattgcagataggaaaacaggcttagagaggttaaatgactggcctgagtttacacagggagccagtcagagcacgactgaaaattgaagagtctgtgccgtaactcactaaatgctctgtctgcagttagtttatctgttagtgtagcagaattgttactcaagcagcatgataaagatctgcgggagcatgcaaaaacgtaaacagtgttgggcgcggtggctcacgcctgtaatcccagcactttgggaagccgagacgggcggatcaccgaaggttaggggttcgagaccagcctggccagcatggtgaaaccccgtctctacgaaaaatacgcaaaatactgggcgtggtggcgggcgcctgtaatcccagctactagggaggctgaggcaggagaatcacttgaacccaggaggtggaggttgcagtgagctgagatcgcacctttgcactccgcctgggcaacaagagcaaaactccatctcaaaaaaaaaacaaaaacaaaaaaacccctaaacaatagtctcagtttacatgagtttagatttcagggaagcaaaaccaagcatacatgaaataataatacagcacggaaggtaatacaagtgggctctctcataaaaacaaatttgttttgagttaatttggaatgtagaacgtattttctaccatagtgacaatattgactgacatttaaattcataaaagttatatttaattttgtgtctgattccataaactgtgcttactctctacagccttgtttccacaggacatgtactctgatgacaggcttacaagaatacatctttttcttctttctccccttggcagtgtcaataggagcaggtgctgcagtgatttggagcaagacagatattttagagccttagagacgttgtgctggaagaatctaagaggcttctagtcctacttcccatctgacattcagtttatcctaaaacattcctgctgagtggattgtccagcctgtgctttttcatctccagtgatgggaaacacttccattgagtacctcattccacatttatataggtctcattaaaagttcctattttaagttgaagttaatcttcctctatttttaaccattcattagtgcatttttcttcacttttacatggataatctctccctttcaacagtccttcccccaactccctcgccaccatttatttatttttcctagtccccagtttcttcagctagttctcataatttcaggtttcctcattgttttgattactcttttgtgaacgtacaacatttttgctaatcagtaattctatgctatcagaaaaggtactcaagagaatgtaaccatttgcctcactgcctacttccctcccgccatttttcactcctgcatgctctcctctagaatactgagttccgaaagccctctttggaaagtgtgggtcacagatgcttctgtggcttgtttttccccaggcgtgtgctcaaagtgtggctcaataaacatctactgattgagacacttccctcagtcactcatttttttgttaacactggtaagccttggaagctggaagatcattagctatttattgaatatgtattatccagtaagtgttgggtatataagaagctctgaaaatataagacttacgtctaagaatttattgaattgggagacataattgaattatgtctatataggataataaaaataatatttgttaagttgcagttgagtagctcagtttggaggtttggaggagggagtgatccctgttgtaggctgtactctagtattcatgtagtgtagtaactaatatgaagagggtactcatgtttgatgatagctgtcttgaggaatacagatgcttcttatggtgggttacaccatgataaacccattttaacttgaaaatattgtacgtcaaaatgcatttaatatgctgataagcccatcgtaaagtcaaaaaattgtaagttcaaccatttgtaagtcaggggccgtttgtataggtaagaagtttacttcttgagagagcaaggaagaaggaggttgcaggacggttggggatttgaatgtgtagggaaaatttttaacactgagttatcacactagttgttttaggaatggcaagtagcaaagttgattgagagaataatagtagataggacattattagtatagattatgtccaagtactccatctatgtgtgtatcaggtaagtgatgtaattcttactttaccagtgaggaaatgggctttgagtaatgaagtcatgtacccaaggcctaatggctttgatcctagatccatttgatttcctaagctcactctcaactagggtaagccttggtgggtggatatgacagagtaaaggggctgacaggatctagggtactttgtaagaacagagttgaagtgactgagtgataaaactagattgggtgaggagggcagccaagtgttagcagggctaaagaagccagtgaaatagtcaagtttgtacttttttttcttttttaactattatcttactttcctaaacattgtttggattaccatactttcttttcttaccagtaagactttctactgttggagtgacacttctatttcggtagatcactaatgagtgttttggttagggaaacttttcattccttgttcatccctacctgcctcacctaaacattgtttacttcctagttctgaagtagcatgttttttttcactttattcagtttttcaaaaccacttccattctctgcagggaccattctagattgttttttgtttgacagaagccacttcagggatgctatcaaaatatccttagaatttgtagatgtgtagttgtgttactatttttaatgactatttaaatgcattgttaacattaaaaaaatttctctgttttcattagattacaaactaatataattgtattatattatactccttatgttccttagagaaaagttctattctaatataattaggctgcaaattgggtgtaaataagtacccttagttgtctgtagatgtccttgattcaaagcaaaaatggcacagaaatagtagatattcttctttggctctatttttttatattgacatcagtgtattttgggtttctgaaatggtttctcaaaatccttctgatctcttgtagaagtttccttttatcatctgaggcccaggaatatagtttagaccaattcagaagtttggagattaagaatagtgtctctctgggaaagaataaaaatactaaaaattatacataattatttctcatgttttaaattatgaattatgaaaattgatgcgttaaaaagtttagaaggttttgggttgtgggtgtcatcctttttatatgattgtctcatacttgtttttgtttaatttagatggaaaatgggtaaggaacaatcaaattcaattcgggaagaatatagaggtggtaataattggtaaaaggtaagtgtctacaatgctaaataataaattggaatctatttttacttaatgattgtttttactcattcctttcagaagaaagatttaatggcatagttttttttttttttttaatgtcagactatgggtcattacaaaataccttttgttattagatttaaagatatcgttttttttcctttctgtaattagcttccgttgtcattatcattactatttattattattgttgttttagctttgtggaatctttgtatgagcatattggaatattatttaaggtttcatagcctcaactggggacatatatatcatacctatatatgttgtccttgaggaatatcattgcctttatggcatgactgtcactttctaactctttttaagtgcagttgttgccactttttattcttgatttatgttggataaaaatattttgggttggtagtagaaaaacttgagtgaaaacgtacaaaatgaatactcttatttaaaaaaagacagttgagattgaggagaatagtgggaggagaggtataaggcggaaagaattaatagggagttatattgtggaagaatattaaagacatctccctctcttgcaagagagctagatgtttctttgacgtgttagaaatccttacaatgaagggaaatatccaaaatagaggagtatggggttacgtggaatcattttgggtagtaggtttttaccctcggaaggaaaatgggtttaagtggtacctagtagatggttggatctcaataagggtttgtttagaaaattggtgaatggacgtttccctttcccctcaaaaataaaaataaaaattaaaaaaaaaggaagtagtagtttttagggttgaaaaggggcagattattttgtctttttacaaattaaacttctgaaacttacgtacatatatgtgtgtatgcatgagtgagagaggacctcagtgctagcgtattgtgttaaatgttgcatcaaatgaagaaggaattggaagagaatagagggttccattgtagcatgaagaattgtaattacatatggagacatacagatactgaaggacatttaatattagaattgattaccaagagaaaaatggtgtttgtttctatatagtggtctttaaaaacaacctacttaaaaattactaatggcttcctatttgctgctgtatttaacttcacacttgtctgtttgactttcaggatctgtaatctgaggctctatttacctacccaacctaattttcttctgtttaataagtcccttctgatccattcagcctggctttctcactgtttcctatacttgccacaactcattcccacttctgtcactttgctaatgcatttgcctctgagtagagcaattttccttcttcactccatttttaagtcttgtcatcttctattaatagaagccattaataacatcacaccacacacctttccttctctaaattcctattgcacttccactcattacccttagtttagcatttgattattgaatgacttatatgtcttaagtctttctcttgatttagattatattctttatatattttttatatcgtgcacagcaaatagcttgggggctgcatgtagtttagtagtggttggtcctgccttgtttgtatacataccctcatgaatgttgggtgatagaagagatggtgaacttcctccttatgtaatggttgtggtcttttgtttgtttttaatttgagactgtttttgttccttttcaatttggacatcttttgatttttttacttgagtgtctctttttgtctctttttattgatctagatcagttgtcatcatccttgatgttattttcttctttttagtctgcagggttttttttaaccaaaggaaactggtttgagaaaattgtgaaatcagcattgaaatttgttacctactccaatcaagatttgcaaactacaaaaaaatcattctgaagctttcacctataaatatataccaagataatttcagataaggtagtagtttctaaagcaagaacatatgaaatatggtgctttaaattatataattattgtaactaggcaaaaaagttacttatctgcctatttagggaatctggttctagctgtagataaattgattttatggtatcttaatttttctattattttgaatcctaacattttttaagtcaaaaagattaaaaaatatgtatctaacttctcaaacttctttggtctcatacttctgtgttagcttcttctttggatataaaggactgtcagtgtaccatgtcagtgattcatctttttggtacattttactcccttgagcatctgaagcctataaatacttaatatttaccccagctttgttttacctttctatgagattagaggagctgacagaaaatacaaatatttctttttttcaacattgaattatgattgaattagacttgtttataggtaagccagaataagttgtgtaatcttaaaatatgctaatttatttaaaattaatatatcttaagactaaatgaagaaatactttctctactaattaaaatatctttttatggctgaaattagtatacaacccttttgcattatccattgcttccattcaagtttaaacattgtttttctttagaaaaagtacaggtaataaacctacagtaatccttattgtgaagaaagttaatatcttgatttatgtttcacagaaactagcattaaaacaatgctttcttaaactttcatatcacagtcactgaaattatttgtgttagtgttttatctgtgacttgggcttattctactggatctagctttgtatagagtgggagagttggattgagattggtatgtgttttgagtcctgatcaacaagatcatttgtattttagccaaaatatatagagaatgaatgtaaataaaatataactcaatttcaacacttattaattgatcatctataatttaagatactaggtcctggggatgcggcagtgaaaaaaaaaattcttgcctgcatggaacttagcttcttgtggggttgggacccagaaaataaacaggataaataagtagaatatatagtatattaaatgtgacaaatgctttcaagaaaaataaagcaatggaaggggttccggaaataatgggttgttgagagtagggggatggcaagattaaaatgttaaatagcatgtcaaaggaaggtttcattgaggaagtgacatttgagtacagatctgaagaggttaaggaataaactgtgtatattctagagggaagactgttccagagagaaggagtcttttccttttccagggtcccttttcagatggctaagtttgttggaacatttacgattgggtaggtattactgtagatttactcaggctttctgccttgacagaatgtccagcaaggaagtgaagactgctctaaaaagtgctagagatgcaatcagaaacaaagaatacaaagaagctttgaaacactgtaaggtaaccagtatttttttcttccacaatgaaagtatgttacccatttataaacattgttgatttgtaatatgtgaattatttcctgtccaaacagcaaaagtggtaaggccatttagtagaaccattagaatggttggacttttaacctctagttagcaggataaactacctctgccaaacttaactttctctgtattggtaacttaacaaaaccaagttcttaaaacctgaatatcccataaatatcttttgatggttgtatcgtggaatgctactgtatcttaaagttttcattgtttaatggcatgttagtgttctatttctatttggtttgtggatgagaggaccaagattataaagcttatttttatgctgatgggtatgattccattcagagggagaaattggactcgggggagagacagagggtagtggtaggagtgaagtcatcagtaggtgagagacacactgggatccagagcttgagggagccctttaatccttcttccatcttagcaggagagaagataggtgcccatccatacagtgttgggcttatagatttggtgttgggaaaagctttcttctctaatggcttctattttcttggcaaagtataagatgagactgggagaagacttggttattggttaggaggtttgagatagcagaaggtatgaaatagtttctttctttgtttttttttttgttttttttttttctcatggtgggaaaagaaacttgctagtaaggattggaaagattagcaggccctagtgattgcccatttgaagtttcaagctattaaagtgaaattagtgaactccgctgtagtttttctctttgtattcagtttctcaggtttggagatgggcatgatggggttcaagtatggatggagagaaagaagaaaggaaagacatgcaaaggaaagacatgacaagggagtgatgacagtggtgagccctggagtctaagctgggtaaagaggaatgagaaatgagaggtgggctgataggcaatggaaaaagcgtttaggatagaaaaaattagagaaaccaaaggttaaagatttgttaccatgggaccactacagtaattgaactgggacggttagagaggagcagaatagtactgtgctggaaattcagattttggatgggtgagtagtgtggtggtcacataactgagaggccagagtgttcaacgggatatcaacatgaatacaggcactgaggtggaaaagaaggatacagaattttcactgaaggaaaggggaattaggaaggtggtagactgtagcaacaagaaggctatttttagtagtatagttggatggcctgagcttcaaaggtagtggggttgctgaaggaggaaggagcagtagaggactgtaggtgacagacagtgtgagcaagaagcagtttctcaccttctaggcctgtggcatgtgagctgtaaaagaagtcatctgcaatctgtaggatgtataggggaattagccatgttttcattgaggcagaacttggtgtggttaaaagaaaggttaaaaatatggaaggaacttggctgacccagattgggagttccagagggcacaatgaagaatttaggagagtggtagggagggaattgggcaagactgggcagtatacatggcaatatgaggatgagtctaaggagtaaacaggtaaaggatacccttgtgaggtttaggtttctggtggtgactgatggagcccagcagggatgcaaggacgtgatagtattaatcttgatatagaagaaggtgggcagtgtgttccaagtggggacaggttgtggatggaatacaagaagggaagaaggactgtttccttcagcactaggtttatctaattgatgcacgtttcagttatatacagcaccaccatagctgtcttcttcctgtagactttctgcaaaattcagatattaattccaccaaatagttaataatttatactagagagacccaattagaaaatgcaaatggatagctaatcagttataaatgcctgattactaatgtgtagtaacccagaatattggttgagactaaatgaatttttgagtaaaggaatgttgcatttgctgtggttttgtctgatcatcaccttgtctgcctgtggcgctttatcacatggtatgagtatcccttcagggaagccttctccagtttatgcagagttcggtacttttttctctatgttctttcagaatctcatacctgccttcaccacattgttgataatcattttcttaaacatccattttggattctgaaaacctggtcatcaggcagatagtcagtacttaactaattgctggttgagtatggcattttgttcagctgttaagtgccagccattgtacctggtgttgggaacataagcattaataaggccccagtgtttagagcttaactttggtagttacatcattgttgtggtttgttaggaggcagcattattatgttgaagtcaaaataaataattttattttgggaaacaagaattgcaatttggggcatacacacacaggctaagtggtcttttgtatgtctgaagaacaaagagaagattggccattttattggaaagaaaaatgttatgtattattttgaaagaaagctcactggtactagagaagcttttgggagctggcaggctctgattggtgagtgacgatggtaggtaaaactagacttagagtcatggcagctactggggaaaactggtcttagggttacagcaggccctctcagcagccgggcttttggaaaatttaaatcttggagcaggtgctatgaggcctgagtgccttttccccctggtgctccctttactctgacttaggtgacaagaatgacccaatttgtgtaatcagtgtgttcacagatagaatggagcttgtactgcatattagggacagattattaggagtgttgtgtggaaacactcaagtctaataatatgactcgcttaactcatggaaatgttcttattttctctggaataatgtaaaaccttaagaggctaatttcattttggctactggttttgtttttctttccctagaacatacttgctaactgcttcaagctgttttattttacctttagcaagtagctgttatttctgaaagcaattatctctacatataatttttattccagttggcaggtgttgtttaaacatcattgccactatttattttgaacatatttggtataatcgcactggggtgaatctactttcctagtcttaatcttgagaaaaatccatgtgtctaatatggggaaactatcatggtgaaggaaaatatgagagttggattaagtgaaatgagatggagaacagctttgtgaatttgaccagtagcagtatggagacaggcaggatgattgagtagttattgttctttttatacccagtattctcaaagagcatggggaggcatttggtggaggtgtcagtatccctcgggcagctttaaaagaaaccacctgttatttcaaagccattatggtcactcctacagtccaactccttcccctgaggaaactgaaaccagataggttaaatggcattctgaagtttgccctgttaagtggtagatatagatttcctgactcatgctagactttctgttattgttagttcatttgcttcgaaaatttactaacctactcttttaattttttttaaatcagacagtgttaaagcaagagaaaaataactataatgcctgggtttttattggcgttgctgcagctgaactagaacaacctgatcaggcccagagtgcctataaaaaagctgctgaattagagccagaccaattactagcttggcaggtatgtagaaattttttttttctgtattatggaaatggatttttttttgcatttttcaaaatacaggtttcaacattaaactaagcatttaaacctacatttgccccatgtaagaaaaaatttaaatttattggttttctaaacctaaaagttagtttagaaaaaaagtggtgcaaaggatgttgtttaacactatttaatatcctacctaatggattatttctaatgtgagcactcaaatataaatctctaccttagttatatgtgcatataaaagacttctccacaatattattctttatgcttacctgaggaaaaagaaatgttttttaatgtttcctaaaaataaaataatataaaaatgttaatgtttctatctttgagtgcaagttaaattcttttttcttacttagtggccttaatgtttttacttagattctccaactttttcacatttaataactttgtttggtatctcagtcacacctttgaaactgattaatacgatgtagtaggccctggagggtgtgaacctgtttgtctcaggttcatgtgaataagaacttgaggatatctggtaacacagttagagaaattgctgcttttataatggactgagtggtttaggatatctgatcgttctttaatgcaaaaatgacaattttcacagactacttgatttttttttgtttgatcatatcataaaggtagtgtcacatagatcttaaaattaaatcttctcacctctcccctgcctcccccgccaccagtggtaactacgtagcatggttatgttagttagcttgattatggtggtcatttcacagtgaatacatatatcaaaacatcaagttgtacaccttaaaaacatacaatttttatatgtcaatgatatcacaataaaatactttagatcacatgctgaaattgaaaaaaataatgtcatatagtaatcttagatggtaagattgtagaatagccattaaaagtgtttattattgtgaagcacttctaatgaattttcgaaagaaaagggaatgatatacctctttattcctgtcacccatactcaacaatatccactttacctgtgccctccgacccccagctattatatttagaggcaaatctcagacagatcatttcatttgtaaattataataatcctttttcagaaataatctttatagattatcatattatttagcaaaataaatgaatgtgagaacagcaaatgttttaggaaaaagaataatcatgagtacttcttcttttaggggttagcaaacttgtatgagaaatataatcacataaatgctaaggatgacttgcctggtgtttaccaaaagctcctggatctttatgagaggtaagaaatgtatgaggaaagtccagtttctttcaaagcttgaattttaataaactgattaaaaatcatgtagaagtattccagcatttactgggaattgcgaagctttttttttttttcaaacatttgtcgtagaatcttttgtgattaaaatagaatcaaaacactactagtaagaggattgactaattttggaactttgacattattttcagtcaatataatagaagataatatttcttaaaccttttcttttttatgaggagctcattttagaaaattttactgtagtatgaaagaagatatgttctaatttaaaatagtacctgaaattattattggaatacttaaattttagtgttttaagtccttggttatttttattaatcagattcaaaatccttttgtgtgtgtgtgttttgttttgttctaagtgttgacaagcagaagtggtgtgatgtctgcaagaaacttgtggatctatattaccaagaaaagaaacacctagaggttggtgaatgattttctgacttcttttaataatagatgggctgggcgcggtgactcacacctgtaatcccagcactttgggaggctgaggcaggcagatcacctgaggtcgggagttcgagaccagccagaccaacatggagaaaccctgtctctactaaaaatacaaaattagctgggcatggtggcgcatgcctgtaataccagctactcaggaggctgaggcaggagaattgcttcaacccaggaggcagatgttgtggtaagccgagattgtgccattgcattccagcctgggaaacaagagcaaaactccgtctcaaaaaaataaaataaaataaaatagatggggttctatgcttttgctatttttatatattaacaaattaaaaatgtttttatttgcagattttacatttttattggcatttttacattttggacaaaataatttaaaatctccttctttaataggtggctcgaacatggcacaagttgataaaaacacggcaggaacaaggtgcagaaaatgaagagcttcatcaactatggagaaaattgactcagttcctggctgaaagtacagaggaccagaataatgaaactcagcaattggtattgactcatttattcctcaagtttgttcatgaaaattgatcatttaattgaatttagaaaatggaaacataattgatcattgtcattttaatttccatttccatagtaatgttgaacatcttttcatgtgttcatttgcacctgtatattttctttggtgaagtgtgtgttcagatctttgctcattttttattgggtttgtttctttttatggagttttttttttaatttttaattttcataagtttttgaggaacaggtggtatttggtcacgagtaagttctttagtagtgatttgtgagattttggtgcacccatcacccgagtagtgtacactgaacccaatttatagtcttttgtccctcaccttcccccaagtccccgaagtccattgtattattcttatgcctttgtgtcctcatagcttagagtgagaacatacaatgttcttatcatatgttcacgtatgagtgagaacatacgatgtttggtttatcattcctgagttacttcacttagaataatagtctccagttccatccaggttgctgcgaatgctattaattcattcctttttatagctgagtagtattccattgtgtgtgtatgtgtgtgtctgtgtctatctatatgtatatatatcacaatttctttatccactcattgattgatgggcatttgggctagttctgtatttttgcagttgtgacttgtgccgctataaacatgcatgtgcaagtatcttttttgtataatgacttcttttcctctgggtagatacctagtagagggattactggatcaaatcgtagttctacttttagttctttttttttttttttgaggcagagtgtcactctgttgcccaggctggagtgcagtggtgcaatctcggctcactgcaacctctgcctcctaggttcaagcaattctcctgcctcagcctcacaagtagctgggattacaggcatgtgccacgatgcctggctaatttttgtattttcagtatagatggggtttcaccatgttggccaggctgatctcaaactcctgacctcaagtgacccgcccacttcagccccccaaagtgttgggattacaggcgtgagccactgagcccagcctacttttagttctttaaggagtctccgcactgttttccataatggttgtactagtttacactcccaccagcagtgtagaagtgtttcctttttaccacatccacaccaacatctattttttttattttttgattatggtcattcttgcaggagtaaggtggtattgcattgtggttttgatttgcatttccctgatcattagtgatgttgagcattttttcatgtttgtcagccatttgtatatcttcttttgagaattttctgttcatgtccttagccaactttttgatgggattgttgtttttttttcttgctaatttgtttaagctccttattgattctggatattagtccatgaattacattggaaataggacattcaatgataattcaatggatgctcaaaaaaaaaggattgtatgttagactaggtgttttgtaaatgtacaattttaaattcacagaggctcttctagataaagtcagaattattggcctgtagtctcatacggagtctggatggagtggaattggtactcatggtatcagaatttcattctcttgtgttcataagaatctgcaatacatcagtaacttaatcactgtaaaaaagaaactgaattggctttcacaaaactgcttatggtgtctaagaagttatacttttaaaggtgtgtttctttacacttctgaactaagagtactgaattactttgaggtttaacaattccactgtttagagtatttatatttagtatttagagtaaatttagtatttagtatatttatatttagtatttttcacctagaaaaaaagtctttatggtgcagattttaaagtaattgaagagaatttttgtaagactaaaaaataattggttttgaaccacatttggaaaatatgtctatcattctcctttttttatttgtaactttaaaagtcaacttaatgtcttattatagtaaatagctacttaatgtacacttgttaaattgagtggaatttttaaataaacaaatatagactctatataggataggaagttcatttctttgtgttcatttgttcatttgttcatgtgttcatttgttcactcattaatttgtttattcagaaaatatttattgactacctattatgtgtcaggcagggtcctaagagctggggataaaaatgtgagaataagatttcttttttgtgtgtgataacatgatttatctgtgcatagattcaattgtggaaaaaattgagcagtgacaaaattaggtagcttagcagtttctcttaaattgtataatatcataatataactttattattttccttaaaataatgtaggttaccagaatatcaaacacatttcaaaataagtaaaataactttttggatggtctatcccaccctcctccatgacagagaattaattgtacttaagattttaagaatcgatttctaactgttagtaatagataaaaggatgaggggatttattgttacctaccttgaatactgagtatttagaaaaaaatgtattacagatttttcatttggaataattttattactgtttttaaaaatcttttatgctagactgttttgaggtatgttccttctttgtaagattgttaactttatcagggcagcaaaattttacttatttacatagactttataccatactttccaaagaaaatttgagatattgaattacattatggctttttggtattaagtcatgagtattcattttaaaatgcagaacgtgtagccagctgagtggtatgaagtgctttataccacttgccttggattctagtattgctgttcttattccagacatatttagaaggcctgttggccttcaaagccagttaatactgcataagagaagtgatggaatgttcttcagagtcagctaatactgcataagagaagtgatttcataacagttcagtcatatctctgcttttcttttaccaaaagtatcacccaactttataactgctttttaaaggttgaagatttgctatcattgaagatacttcaaagaacgtgctagtgatttcagaattgttttaaaaatgatatgtgagcagtagcagctatactagcatataagactatactctggttgactactttgtaggagacagcaggcacttggaagtgcgttttgttaaattaatgttgttaatgtatagttgttacttaccagttgagtgcagtttgctggccagttggagttagaatgcattccaaaacttacatgtacatttttttcctcgttgaagttgtcagggttagactgtagaatacatttgcagttaattgaacgtgtagtttgtgtaagagagtcttatacatttaatcatttgtcatttaagtatgatacagatgatagcttttttatttgtttcagctttttactgcttttgagaatgcactgggattatcagataagattcctagtgaagatcaccaagtactttataggcatttcattcagagtttatccaaagtaagttgattttttaaatctctaatgtgacttgtatgtatttctaattaggaaagtgttcataaatacattttactactactagaatgtagtgtattttgcttttatattttcaagtttcctcatgagtctgctagattgaagaaggcctgtgaaggaatgataaacatctatcctactgtacagtatccattagaagtgctttgtttgcatttaattgaatcaggtaatttcttccttattatagtgtgtgtcctagaggtgtgtgattatgtgagtgatgttattaatcaaaaaatgttttagtgtctaccatgtttaaggtgttgtttctgtgtttctggacataaaaagaagtataatgtgtagtctttgtgtatatgaaaagactaataaatataggaaagtacagtaatacagaagaattatgagttgccagatttattgttagtcagtgaaatctttttaatggtggaaattggagggggtcttgaattttttatagaaactaggtaaacaggagtaggtgaaatatattccagctggcatgagcagagatgtggagctaggtgcattttttaggaatggtaaaataggtttgcttgttatagtggaagaaataactaagatatattttggctaaataggtcaggctatattacacagagctatgaatatcacagaaaggatttttggaaagtttagctgcctcagtgttgatgttatgtcacagtgtcataagaacactgttatgaatactgtaatattataaagtaattaaattcctgaatctccttttttaatgaaatagagcatattcaaatgggagaatttgtctctgtgtatgcttcatgctcttgtatcttcatgtactttgtttgggaggaagagagaactgatgacaactagcttgctgggagttgggtaacctgtagctgtggaagtcttgtgtccagggctggtattccaccagttaacaagaggttggctgtattggtttttccaccagcctctttccttttggtcagtatctgtgctgaatagatttttttttttaataacctgaatttcatgccctactctcttgaggtgaacaaattcacagaagtcagtcactgaaatagaaatattagtacgtacaccagtgtggtagtgattgtcaattattgtggagctttactaatccatttaatttttttcactttgttgctaaatgagtatatacatgagaatgctttgtatgtgaatgaccctcacatgtgtcatagtgaaaaaagggttgaaaactactgctaaagataactgtgaaggaaaattccttggtagaaaatgaccattgcacctatctcagttctcctcattttaactctcctttaaagtcctcttttacttttttttttttcctggtgtctgaattaaaaaatgctgttactggccgggcgcggtggctcacacctgtaatcccagcactttgggaggccgaggcaggcggatcacgaggtcaggagatcgagaccatcctggctaacacggtgaaaccgcgtctctactaaaaatacaaaaaattagccgggcgcggtggcgggcgcctgtaatcccagctactcaggaggctgaggcaggagaatcgcgtgaacccgggaggcggaggttgcagtgagccgagatagcgccactgcactccggcctgggcgaaagagcgagactcctcaaaaaaaaaaaaaaaaaaaaaaaattgctgttaccttcagctctggttttggtagaagcagatgccctttgccttactttaactgagtcaaagatagacttaggagagtactttttactaccataagaagaaagagaacataaaaagtatagtgagtggagtataaagtcttaaactaacatggtgtgcaggacagattgtatagaaggtggactagctccagtacactaggtgacagtaggtttgaatgaacgaggagtatgatagtgaagatagaaaggaacagatgaatgaaaaaatgaaagtgatttcttagacggagagacaaaaatcaattttaactttcacctctcctgaaaagttggcccaatatggcatgatgatttgtatgaaatgtaggttattgagaggagatgttaatggggcagttaatgagaaatgcccatcagtggtttgcagatgagagatcaatactaagcgtagacatatggtttggaagtcatttgcatgtaggtgaaaatgacgtggaatggttaccatcagaggaggactaaagggaaaaatactgagaactgtactttgggcagtgctggctggcttggagggaaagagatgaaaaagagaaagggagtaagtgaaggaagagaagggatgaggtcagagaagaaggtggactctgacgagaagcaacacaagacgacagggaaagagcatttcagaagtgagattattatggtctgtcttgacagattgagccaactgagtttatgattgtgaggctttttattaaggctatctttttaaatgaaagtgattgaattagagcttagattacagtgatggggaaagaataggaaaaagcaggtatacaaaggaaagtggactaagtgcattagggagtagtaggatgagaaagtgaagcccgcagaggggatagtaagcttttagaggggtgggagaagaactgcaatagctgcctggcaggagtggtgtaagaagaaatagttagtaggtgagatagttaacattatgagagtgttgcactgaggctgaggaggatgaggtacatcaagcacaaggagcatacttaggaagtcttgtgatttttttttttttttcctgataggaagctgagttctaaaatcacccagatccttccaattttaatataagactcagtgtgttccaaagataagtaggctgattttctttattgtatggcccctggtaccaattctttttccctattctgctgttactgttgttattgaaaaattaatggctggtgttcactcttttctctttatttcctattcagctatttatggttttcaccattacctcagccttggccttgctcacatgccaaatgacacagtgaatactttgaaaattctttttgaggactgacagaatgctttctcaataagcataaatgtacctataatgtagacttgtccttatattctaaaaagcctacaaaataatagaaaaaaataggatcaacaatagtctacagagttttgcacataaattcagtggttgacaaagtgctctgataaagacatagtgaagggattatactgattgattagaaagtgtcttggtttaaatgaaaaaaatcatttttgagtaaggttctggatttgtattatgtagaatggaaagaaaagaaggtctatatcacagcaaaaagagtgtatatgtggatatttacagatatggtaaaatcagggaagagttctttcccttctgaattgttggttgcaggaatttgtggaactgagaaattcaggtttgggtacatttcaagttaaagtagtattcttgaggtggaagttcaatagttaatgtaggacaataggaatctgtgcttttttctttttactgctcctctaaacccgactttcagtgtattgagaacttctgagaatctgtaaggtctctgaagtctgagccgccctcccacaaagtacttcagtatgtacagaatttgctacttcacagcagttaatcactgggttctcctccactgagaacaaatgtatttcattctcctttgtcctgctttgcctgttgagaattgaaaattcattttcaaaatgactcagtttataaagcttcatgtaacaagtagtgaatggctttcacagttgtcatctgttgaaattttttttcatgctaaatgacttttttatttatcttattttgctttgttactgaaatgggggaggataaaaaagcttggttcttcaaattcaagcagaaaagagctggattaagattttctgctttaaaactattagaaaatccaggtgaagataaatatgaatgccaccaaattgtacatggtttttttcccccctcaagctaagtttatttaaaagaaaaattagatagtattgatcagctttttttgggatgtcagaaattaattttttaaaaaccgactttttgtagtaaactttaagaaacagaatttcatagttattactcagcatccaacacggacctcttcagaataccctctacccttggaatttgagcattcatcagccccaaatctggcttgcgtttttgagaaataaaaataatattgtctaactgttttaaagttgttaaatgtggaaccttagaatcctttaaatgttaaaaagagcagttaagtaaatgattttctattcatttgcaatgaataagattcaaaagcaatgaattctatttcctctgtttttgtcctccaccaaggtatttatttagctagtattctcaacaagaataagtatgaataagagaaggattgatagttgaagctgaaatattccttgtctctttatacaaggatcattagtgttgttattactgttgctagttttgggaacactatagaaaattcctctcagtgccgcttggtcatatgcagagaattgttacccagggccgaacatgaacatagtctccccagatcttattttgtttttattgttatgctcccaggctttagcaaaggaaatatgttaggaaggtttaccttgttttaaaagtcgtttatgttcatctcagccttttggaaactattttcgtgtaccaacccacactttgattacctgtgtgttgtttaagctaccctaaatatggatgttcactggagagatgcatgatttttcttaactattttcatcccaggtatatttcctgtaatacaggcagtttatgtagtcaaggtagtctgtcataaattatgtttctatggaggcagggtgtttagactgagatgggtagagataaaagataagagtttggtagctatttttttttaggatggtgaagatttttaattttttgtagtaattttcagctgttacctattaacagactaagcctttttgaatatcagttcataatggtatttttaaaggatcgtcacaagatttaatgaacacctaccacatatcagatgccatgctggtctgtactctccagaggttaccatttagccacagaggcaataagggcagaatatacatgttataagactaatagtaaaggtcatatatggtattagcaaatattgtagacctgtggtctttaagtatgatatctggaccagtagcatcagcatcacctggtaacttcttagaaatgcaaattcttaggtcttaaacagacctactgaaccataaacttcagggatagggctcagcagactgtgttttaacaagtcttccaagtgattctgatagtgcagacaatgtctagtttagacaataccactggatcaaaagggaaaaagctgctagttttcttgggagggtatagggtgtatggaactagacatatctatttttggaattcatatttatggaagctatggtgagaaaatattgacaaggaagttcatgcctggaagcataatagtagcaggcttgtgtctttttcactggcttactaatcaaagtagtatttcttccaatttgttttcatattttgccaaatatactgaagttttaactctttagccattattaattcttttcatttttggtgccaacttggatttctaaatcagtatataacatattactacatattactaatggattatacattggtttgcaaatggtttttaaaatttgaaatatatgagctacatggtattatgcaaataatttacctttgacatctgtaactgaaacagtggttctacatgtggtttgggcttctatgttttatatagttattaaagcatcgggtctttttttttcaggaattttttttgtttcccatatttattgcttcaagttgtagtttgtctttttaagaattctcctatgtgattaaatgatttattaaacttgtgaatgctattcacaatttattctaaaacagaaattacaattttttgtttgttttgatgcttttgtgggattgagattggggaaaatggaaatattacaaaatatataatgttttctaaactattttaccaaaataaatttgaaaataaaataaatgtaggcattggatgactatctcataagtgtcacaattcacttatatagaaaaagatagttttagaaaaatgtggaaatgtactggtaaatttgtagacttaagaggaatgtgactaagtctttgtgcagtgtcctgatgagtaacccgcctatcttgtgatccttggatgctggaagagtctgctggatctgactaacatgtctctagcagcgcatggttgcccaggaagagaacttgaggaagacactctgctttgacaagggctccttcatttgacaaccaaattgttacagctggcaagcagtaggctatgtggcttagtctactggcaagtagcaggtttcttgtctgaaatcctaaagtggtttctacttccagtatttaagaagatgaaaaatcataattatttaaattaaatgttaatattttctgcatttgctggtctatttaaattttgaatttctggagtcagcatgtggtgaagaatgcataagaatataaaggcagattttgagatttaagaatatgggtttgggcatttagaaactcgatatatgtatactaataacctttccttttaattccaggaaatcttactgatgaggggcagcagtattgttgtagattagtggaaatggattcaaaaagtggtccaggcctcattggcttaggcattaaagcattacaagacaaaaagtatgaagatgctgttaggaacctaacagaaggtaaatgtacagtgtatggcatgtaacgtgaagtataattattattcagtcagtaggcatttatctttgagcctttctttaaggaatgtctatctaaggtggaagggaaaaaatgtacctgcataccttggactctgcttaggtttgaactctgactctgcttatcactaatttcaagacctcagaagagttaaacttactgtgtgtcagtgttttcatttgtaaaataggtatatctatatagaaagagagaaaaaagaaaagaaagaaagcaaagcaaaaagtaaattgggagggagagggagggagggagggagggaggaaggcagacatgtagatatatatgcattaggaacttaggctttaacttagtcttactaggtatgatgtttctggaagaacctacattcaaattatagatctgaatggtaaatacaagccaggtaggtggttgaagggaatgggaagaacattttaggcagagatgaatctgtgaaatagcctgagctaagaggaaaactgttgttcagagaactgcaggtagttcaccagggtttgagaatgaagtgtatgtacaggaggggacaagaagtgagattgtagaagggcctagcaagacttggtaaggagtttgcacagtatcctgacaacagtggggaatcagtaaaagatttttagcaggggaattttataatctgatttgtctttttagagatattctagctacagtgtaaagaatgcattggggtggatggcaagcacttgtagtgatttgggataaagatggtggaggtctgaactgacgtggagatggagaaaaatgtatggtggggaatgaattgaggcagagaatcagtgtgactttgtgactgatgagatatgagagatgaagaggggaggagtctgatttggagagtaggcattggtgctgttcatctatgtagtcacagaaaccttgttttttgtgattgtttttatccttttagggttaaaggaaagccctgtctgcacaagtggatggtatcatctggcagaagcccaagtcaaaatgcatagacctaaagaagctgttctttcatgcagtcaaggtatttttgatactttttgggttgacatataagggtgaccaaccctatttgtttttatcttaaaggacaaagatagtgatttttaaaaaccaaaatgctatattttgtattttaaattgctaattttaatttcaataagtttaaataaaagtctgcatgcatgtgtactagtgtgtttatttttaaactgacaatgaatgtttagcaaaattttcctgcatttggaatattgacatagtcagtttaggcttgggtgtggaggtcctctgtctttgtaacaaggaagtttctggtgtgtccaagacacatgagttcttaatttctctcatatagagaggggaaaccttaggcatcttggagcctatttgaatgtgacagggtgaggggtggggataggaaatcatgaaagtggttcactgtttctgacccacctggtagcttgctccctgtaactaagaaacagttcaccttggtccattctaattcagctgctttccccttccagtatccttaatttcttatatttgttacaggtgctttggttgtgggctaacctttattgtttagcaaatatagatagccattgtcgttttttaggatattcagttttattatatgttgtgtgaagatagaggttttaaattcagatatgttctgttttaaattcaggtctttccataaggaagtcagggaagaatttatatttagctttgagttattcttcatgtatattgttttggaaatttatgcttattgtatctgcaatttattatatgtcatccttaaaaaagaaaaaataaacagaagtgatatggctgtcttcatttggatacccttaattttgtcagctctgaagatcgtagataatcttggtgcgtctggtaacagtctttatcagaggaatctttgtcttcatttgaaagcagaggctttgattaaactctcagattatgactcttcagaggaagcaattcgtacgcttgatcaggtagacttgtcaagtttttttcttcaactctagttagtttccaatcaaccaggcaacaaccattctctgcctaccacaaaatttacttatatggattttgtgttagaggtatgaattcaccacatctgcacttttataagtcattcatacatttgggaacttctaaagttatttgtttgctttttgattaaggacttatagtactcatcatataagactatttcgttagttctagacttcattctcgtttcttccttttgccctcttaggttattactacttgattattattaatttgagattccaaattttttccttcaggaagtgttctgcagatttgacaagaataattaaggacactgttagcttcatggtagagaatgtttatttgtttcattcaaagaaagattcatatttcataatgaaaccgatttcttagtgttttgagttaaagcaatttgaaagtccatagtgaaaaaaactataactggtaaattatgaattatagcattatgccctaaagatttttgtcaggtaaagactattactggtctaaattaaaattgagtttttaaatcagttttatgtatttcaaagggctttgtatttcataatatttctttaaaatcagaaccgttgtcagcatctttcaacaattaatattttcttgttttctttttgccatcccaccaataatgtgttttgtgtgaatgctttataaaggtttttcaaataatgttttcacaaaaaaacaaatgactgctattttggagaactagcagagtccaggtctgagatagaaaatgtacaagatgaaccaagaacaccttgtcatgctagaaagcaagaaactataaaagggctcagactacaaaagggctcaagagctagcataaagagattcttactggctaaaaagggcgttactaatgtggtatgttgaaacagatcaaatattttaaatccatgtgttcatgatgattcagaaaactcagcaaatgtcctcaagaaaacaaatgtttggggggatgctaagaacccaactatgaagaataaaggcatttatcctgcctttatctgaatcattcctcaggataatgaaataacgaaggtaggagaaatttgcctttgttgaagtattctgtctaataagagaaaatgacagaaaatcaccattttgcaatccccagtgaattaatagatctaggcatcaagggttaatggctactaacatcacacaaaggcaatcaggctgggcacagtggctcatgcctctaacactttgggaggccgaggcaggtggatcacttgaggtcaggagtttgagaccagccaatatggtgaaactctgtctctactaaaaatagaaaaattagtctggcttggtggtatgcacctgtaatcccagctacttgggaggctgaggcaggagaatcgcttgaagccagaaagcagaggttgcagtgagtcaagatcagaccattgcactctagcctgggcatcgaagcgagactcttgtctctccaaaaaacaaaaaaaaaaagacagtcagacacaaccaagtgcaaatacacctgaagacctgaagtatccttgggaatcttcaaacctctgaacccaactactaatatacagaaaatacagggaaccaaggaacatgttaaacaccttgagaatacgtttagcaaaatccagactctgagaaactgtgacaaataggccatatttttcaacagttaaattgtaaggaagaaaaaaaaaagagaaggagggggaccttattgattaaaagagacaaggcattatcattaagttcaaatgtatgtgtcttatttagattttgatttttaaaattgttaaaatatgagacaactgagaaatttgatagtgttaaggatgttgtttttgtttaggtatgataatggtaatgtggttatgcaacttagaaatgaacttttagatatagatactgaagtattacaggtaaaaagttacaatatctgggatttgtgtcaaaatcatctgagcagaagtgtggtaaaattagtggaggtatagatgaaaaaaatgattgcttgtgagtttgtggttttgtagctggatgatgggtacatgtgggtttattatactagtttctgtaatttttttatgtatatgagattttccttaataaaaaggttatgaagagtgaagatgtgttattagtgatagaaatcaggacctctatttctttattctattaggaccatgcttttctgtgttcgttcgttaattaaagcaaacattgctgtggttgtgttgaaggagatttatagcagttctttacaattattttctagatttctgatgcagataatatcccaggacttttggttctcaaaagcttggcctatcggaacaaaggttcatttgatgaagctgcaaaggttggcttttttattcaaactgagcattttttgagttaaaagcatttttatttggctatagaattgacaggtgtctactttatagattatggaagaccttctctcttcttaccctgacctagctgaagttcatgcccttgaggctttgattcatttcaccaaaaaggactatctacaagcagaaaaatggtaaggatatataaattgctcatagaaccatttacatcttagttctttatatttctgaaaaattcaaaatgagtaggcttgatgaagatttgatttttcatgaatttgatctttgtaggctttaagttttagtattttaaagaaatgtatttagcatgtagtacagtagctataaaaaattatatgatgggtttcaaatctaattagctgatcttggccgggcgtggtggctcacacctgtaatctcagtactttgggaggccaaggcaggtgatctcttgagcgcaggaattcaagaccagcctgggcaacacgatgaaaccccatctctactaaaaatacaaaaagtagctgggcgtggtggcacatgcctgtagtccctgcttctcaggaggctgaggcacgagaattgcttgaacctggggggtggaggttgcagtgagccaggaccattccactgtactccagcctggatgacagagcaagactcggactcaaaaaataaaaaaaaaaatctaatcagctgatcataatgttcactaagcagatgtaatgttcagtatagtctgaacacttagcacatggtagtgctaaaaggccactgtgcttttttaagatcctcttcttcaaaaacaaatcacttttttccttatgataatataaatcctaaagtgatgattggtttctaatttggcacctctgaatcactcaaactttgattgttccaactaggagtctcctatattgcgtgtgggtgtgtgtgtatttgttttactatttctttttattaccctttggtggcttagttttcagagagctcttgagaaagataccgaagttgcagaatatcattaccaacttggattaacatactggttcatgggtgaagagacaagaaaagataaaacaaaggctcttacccactttctgaaggtaaagcaagtgctacaattcaattcctagttgaaatggcattataaaatcataaataataatcatatacattagttacaattactctttactgaactgttttttgtgctttatctttcatatgtcaggttttgtgatggtgttatatgggttttcaaggaaaaaattaaaacataaaatgtgaaagttactttttgaaaagcatgtgttgtagaaaacgagacataattatctcttgtaaacaatacttttaaggtaattttcactgtagttttatgagcatacaagttagatgtttaaattcctgtttttttagatgtttaacatctataagtcctacattcttatcttgacttgtaagagcagattaattcagtagcagctctaatttcacatttcctttaccaaaaaacaaaatatttttatatttccttttactttctataagcagtgagggacagctttcctgtctgttttaaatcttacatcaaaggattttttggcatatttttgtatgtttaatgaaattatttcttttttctttaatctgtgtatttatcttctgtatttgtaaagatactcattaaatgaacttttaatgttctgttattatcaatatttatttcaaaggctgcaagactggatacatatatgggcaaagttttctgctatttaggtcattattatagagacgtagtgggagataaaaacagagctcgtggatgttataggaaagcctttgaattagatgacactgatgctgaatctggagctgcagcagttgacctaagtgtggagcttgaagatatggtatgtctaataatcacttttgctttttgttttttttatcctgagtatataaatgaaaatatttttatatatgtatacttgaaagttatcattagttttttttctataggtgcaatataaatatttttgcctctgtaagtgaagtttttttccattggcagatattaaattactaaccacttattgttgaaactgtaatttgatgtataccagtgtaagtttaaaaaatcagaagtgagaaatgaaaatatgtttgtgtactttacatgagcgttctgtctttttataatgttcaatatatctaatattagtattttcttattattaggaaatggctttagctatcctaacaacagtaactcaaaaggcaagtgctggaacggcaaaatgggcctggcttaggcgaggactatactatttgaaagctggtcagcattctcaagcagtggctgagtaaggcaccttattgtatttaaactatgttagacaagcataacggttccttaaattaagcattttaattgtctcttaccaggttgtattttgagagaagaaataacaaaattactttatgattgattggtgtttattgtttgcagggcagtggaattgcagagatggattaaatggtgtcctgttgttgaggagatagccagattagtgaattgaagtcttaatacatatgtatagtagttctcaatagaaattttagtgatgagaagctgaggtacatatctttgttgttctgctgacacacattgtttttggcaagggagacatttggcagcttaaagggcattgggagcagctcatatatgatcaatttgagtcatttgatttgaacagtacttaaatgtaaataaatgtatttgaatcaaaataaaattgtttctggtttatgttagtatctagagtacaggcattttcacggaaatggaatttgatcagatatttaaagcatgcctattgtttccatattttaactgtggtatttctgtttggtaaaaggattgctggtgggggattatgggctgatgtgacaaactgagatggacacctgtcctggtaggatagaaaactcgagttcttcaagataatcaaggaaaagaaattttgttcagcactttttcaaaaaaagcattttattcttattctgaaattaaaataacatttcttagcattaaaaaaatcataaaaggaacaaatttatctgctttaaatagcacttttataagtagaaggagccacagatatatatgtttacttgaattatttattttatattttcctttcagatttggagatagttccatacttttagttctcttacggttttttaaattttagtttacaggcagcattaagagcagacccaaaggacttcaattgttgg

SEQ ID NO: 363 - DNA, 32744 bp, Homo sapiens
  source 1..32744: mol_type = other DNA
caactcaaacaggcagataaagagagatcaaagagatgagcatgagatacagtcccctcgtgcccaaggagacagggtggttacagacatggaaaatctgagaataatcacctctgataaagatcacagaagctgcccgggaggtgtttggtaagcttggagttacgtttgtggggtggatgggcagaagtcagatttcatagcactgaggatgcagcacaaggagaagttcaagatcaattcctaagacaacaacttggcactaaaaaacataaactatgttctgaaggctttaccctggggacaagggaagggaggtgataacagcagaagtggcagccactggcgatcctttctttccatggtttggcttctactccaaagccacttatttgtgcattctacaaaaagtttcttgtcctttttgaaataaagctcttatcctaagctccattcacacctgcgtgataatgaaccagctagtacttactgtactcaggaagcatgcaaagttctgaatcttagaacagaaagtgaaagcaaaagtaaattccccttcagtcaaatctgcagcagcatgatttaaggtaacgtatcaacatttctcttgggtttgtcttaaaattagattttttcaataagaataatgaactgaaggtatagaactgctgtgttgagaaggttttgtaatctaaggcaaggttctgggggactggggtgaattgggcgcggctgtattagaaagtgtatgcagttgaggctgggacttgatctaagacgctgctgcactgactctctttcagagatctttttgtcttttctaagcgtttgtgacaattcttgcctcttcaatcccaggatgttttgttcactgcattgctatttaaggtacagtgcagtataatagaaagcccaccagaccaaagggcaaagagctatgttttagtcctgattctgtttcagacttcctgtgtggattttgagaagtcaccatcctgttccttcatctgtttatttaatttaatttatgtatttatttatttatttattttgagagagagcctcgctctgtcgcccaggctggagtgcagcagcacgatctcggctcactgcaacttccacctccctggttcaagcgattctcgtgcctcagcctcccgagtagctaggactacgggcatgtgccaccatgcccggctaatttttgtatttttagtagaggtagggtttcaccatgttggtgaggctggtctcgaattcctgacctcaggtgatctgcccaccttggcctcccaaaatgctggcattacagacctgagtcactgtgcccggtcctgtttctttatctgaacactaaggacttgtactagctggcctttacaacccttactagttctaaagttaaagactgtgtgagtaaagcttttctctctactcttatcaatcaagtacatctctaggagtgtctgctacaagtgggggcgagctactccttcattttggccattgaatgcaagttataacctcaataataatttcatatccaacactaattacttacttcctatatgctccatgctgtgctgtgccaacttcttcacatgaattatttcatttaatcatcccagcatgaggaaggtataattattacactgttttatggttgagataaatgaagctcaaaaagtaaaaaactttgcccatgatcacgtaggtgaggttggtggaattagcgttggaatctgggcactctgattccaaagcctcagacccacataataagccactccattttttttaaaccctccaaaattcaagctaatagaccaattatgagtgtacttatcagacgttcttggaacactgagatttgtagcagtaatttaatgcttgtttttaaaaagagggagaagtatctttaatattattttatttttgttcctttaacaatacctgtcacctgcattaatattgcaaattgaaaaattgaagtaattgtttggataattaatgctgcagaacttgttaaggattataaaaagaagaagtagcagagaaaaccttcatggtttgagttggagcagtaaggaagtaagtagaggcaggtggtagggtggcagtaagaattgattcccccaaattaactatgctgtttgtcctaattttatatgtgttgtagctttacccttcaaaaagaaagaaacttagttctatttacaaaggtagtaaattcagtttgatttaattgtgctttcaaaagtagtgtaaagggaaaagaaccgaaccttaaaaaaattctgtaagaatattataaactcaaaatttatttccatggcttttgacatattgaaaataaactggggataaatacctaccttgaccagcaacctttacaccagtagccataaaatgaggccattcagataatgttattgaaagaggtgaagttcaatgccattcgtagtaataataatatctggtatccaaagaatatagaatatatatatagaatattctttgtgacttatgaagacaaaatagagacatcttgcacagtttactttcaggcatacacttaaaattacatgtgtgcctgtggttccagctaattgggaggctgagacatcaggattgcttgaccccaggaatttgaggccagcctgggcaacatggtgacacattgtctttcaaaaaaaataaaatatggccaggcgcagtgacccacgcctgtgatctcagcactttgggaggctgaggcaagtggatcacctgaggtcaggagttcgagactagccaggccaacatggtgaaaccccgtctctactaaaaatacaaaaattagctgggtgtggtggcacatacctgtaatcccagctactcgggaggctgagggagaagaatcacttgaaccccagaggcagaggttgcagtgagccaagatagtgccactgcattccaacctggacaacagcgagattccgtctcaaaaacataaataaatgaataaaaataaagtaggctggtcacagtggctcacgcttgtaatcccaacagtttgggaggattgcttgagtttaggagtttgagaccagcctgggtaacagggagacccccatctctacaaaaaaggtagccgagtgtggcggtgtgtgtctgtagtcccagctactctggaggctgaggtgggaggatcacttgagcccaggaagttgaggctgcagtgagctgtgatcatgattgcacactctactcctgcctgggcaacagagcaagaccctgtctaaaacataaataaataaacaaaaatttaaaatataaccaaatgttaaaaacattcaacatgcaatgaatttacacacctgccttctgctcgctgcacaagaattcagaagaaattcattacattcaattttaaggtagggttttttgggggagtcctaaagggtttttatttgtaataaccagataacagcttaatttctgctctattttgtggatacttggcctaattctgacagagagcagattttcccttactcacacatacctttttacatgtttaagattttatttgtaaattgaaatcttttttgtcatgctataagtgtgtttttttcttctagattaaattcatgtattgaaaatattgttcagaccccatgtgacataactggagccagtgcagtgccatgaagaactacgagattagcctggatattaacttgtcttctagagaatagatttcatgttccattcttctgcaatggttaattcacacagaaaaccaatgtttaacattcacagaggattttactgcttaacagccatcttgccccaaatatgcatttgttctcagttctcagtgccatctagttatcacttcactgaggatcctggggctttcccagtagccactaatggggaacgatttccttggcaggagctaaggctccccagtgtggtcattcctctccattatgacctctttgtccaccccaatctcacctctctggactttgttgcatctgagaagatcgaagtcttggtcagcaatgctacccagtttatcatcttgcacagcaaagatcttgaaatcacgaatgccacccttcagtcagaggaagattcaagatacatgaaaccaggaaaagaactgaaagttttgagttaccctgctcatgaacaaattgcactgctggttccagagaaacttacgcctcacctgaaatactatgtggctatggacttccaagccaagttaggtgatggctttgaagggttttataaaagcacatacagaactcttggtggtgaaacaaggtaagaacttgctcaggtaatttacattcttttgtgataatttccttacgagttacatctctttgccaggagcagacttcagcagccatttatgagaaatccagtgaactatggggaacccagaagaaggaaaagatctaccattccttaaggaaaccacagtagagatgtaaagacaggactcagaggcataaacagctagagggtgaataactaggaggagaggccagtatatgactgatatgatagatatgcttatgtgctagggaaagagatggtcagtgcagagagggctgaaatagggaatgcttctcaaaggaagtgagtcttcatctgggaccagaaggaaatgtaagtgagactgggattgggagagaggaagtgacaaagtatacattgcctaggtaacagccatgactcatatcgaatagtcagaaacaaggaactagtttggaaaattgagaaatatagtcaatttgatcaagtcacattcattgagcacatactatgtgccaggcactgcactaggcactgaatgtataatggtgggatctgatggaagagacaaccaggacaagaaaatcaataaaattggcaaggtaattggccagtgttatgaatgaaataaaacaaggtgcaagaaaggtagaaaatgaggctggagattgaaactaattcagttgactgggcagggaagtgtttgttgaggaagtgaatttaaattgagagctgagtttttttttaaagagacagttatgagaacatctcggggcaagtgctctaaagtgggattggttgaggaaggccagtgtaagctgaggagagcgaacaagagggagaaagggatcagatcatgtggagccttggggcgtcttgtaaggagttttgactttaactcagatgaaatgggaaatcactggaggattctgctctgatttatgctttataaagatcaagtctatgttgagggtatgttatagagaagcagagtaatcaattgggaggtcattgcagtagttcaggtaagaagtgatgctaatttgggccaggctagtggcagtgcttatggagtgaaacaattgaacttggcagttattttggagggcaaaacaacagagattgctgacatattggtcatgtgaggtgagggaaatagaagaatcaaggatgcttcatagagtggacggcttggtttcccagggccaggatccatctgggaggtaagaggagtctggctcagtgcactctcacgttatgtgaattgtgttcaattgccagttggagaaatctaaattccatggcttaaccacacaggggcatatttttctcatgcaacaagaagtccagaagtagggcagctcagattgctatagtgctgttcagagtcatccaggacccaggctccttctgtctttctgctcagccatcctatggctttcttcctaatacttgcaagatgattgctgcacctctaggcatcaagtccacattctaggcaggaagaagggggacacgggggagagataagggcaaaaagaaacattccacttgaatctaacactctttacaaagatttcccacccaatgacttcagctagaccagaatgagtcatagcctcaccaagtcacaaggtagcctgtaagaagtaactctcttatctggacttgttgccttcctgaataaaatcaggattccactggaaccaaggaagggaaatgggtatcaggaagtgactagctgtgtctactacatcctgctcttcccttccccacttgggtgctcactgcacagcctgcagccatccacctaggacaactcttccccaggctcctctctttccacattcccttggtgacacttcccctcattgcagccacaatcctcaggggcttgttttcaggctcagcacagtattggataggaaaagtgtcaacttcttctcactaaggcaccacataaacaatgatggcttttttcatttttttcaaatgccgaaggccccatccaaaggacatatatcttagggatactattctgggagctgtgggagatgagagggggagatatttggagtaaagctgtaggactttccagcatgcctcccgtgattaattgcaggctattcctgatgctccttatggttaattagtcagttcccttcatactcagtcacctagtaggtctgacatgtatgataatgtactgcacaatgtcaattgaatcttatgaatctctctctctttcttcctcacttcttcatctaaactacacaaataattcagttgaaagtggttcttttgagatgcagaaggtcacactttgcatgtagagttccaatgaatcgtgtaagcaacaaagattcaggtttttttgttttttcaatgtagacttgttacaaccaaaatttcatgtgagtgaaaattattccagccagttagaattcctttacatttgcagaaactgctaccaaatacaaataaaaccttgaggccacaagtgaatcatttacatccctagcctcagtttcccagcctgtgtcatagaaataaagcaagctgaagtaaaatatcctgacagcttctcttttttccctcctgacctctctctccctcttatttgagctattctattcccccctccttttccagtcaaaatctgctctccaaattcacttcttaattgaagcttaaagtccaaagagtaaatctgtaactgtacagtttcaggcatatcctggtgttggggtagagaagtttatcagagtatatatctattatacctgtcatcatctgaagagtggcaagcagagagaactagaagtacctgggggcacaggtgccacagacagaccattagccaacaatggtacaagaatatgaaagtccagctccttgcctccagtgggggacacgtgaaggcgtagtttgcatcccagagctccctgggaatcaggctgatgctgggactttgcctgtcctgcacccttgactggcttctcccttttccctgtcctgcttccctcactcccttacctgtttctcctggcaggatgttctcaataagtcaggatctgcttcctggaaatacaacttaggacatcactcatgtacacaattactcaaatgtctatctgaggccctttcaggtttagagacaatactgaacatttaatttcctagtgaattttgaagacatgtagacaacatgtgtactatttcagtcatttactggctgcggatcctgctaaggtcattcaagttgtctgagcctcaatatccttgtttgacctgagtatgaatgaaataatgtaattagcattcccaaaacagggcattgcttatgattgatggctgctaaataagattttaccttcattttcctcaaagagacagttgagattcacaaagattgcagtttgagaaatcaagtctattacccccaggtttgataagctgtttgctgaatgtacagattcatttctcttcttgatttcacttgtgcattttggctgggggtgggtcttttcacagaattcttgcagtaacagattttgagccaacccaggcacgcatggctttcccttgctttgatgaaccgttgttcaaagccaacttttcaatcaagatacgaagagagagcaggcatattgcactatccaacatgccaaaggtatgtccacttccagaaacttttagaaattgttctcaagttgagactcagtcttcgtttgttttttaaaattgctttcaggatttcagccattaatttgtttttatctatctatctatctatctatctatctatctatctatctatctatcatcataatttcaatcattctagacgttaacatcattctgtttggggcattgttacacaggaagctttttttttcccaagcaaagtgatttatattttgtgttcatatggaaacagtatcttaaatctgtgtttcttggccagggatgaaattcagaatttcctagagcagtacttctcaaactttagggtccagattaatggtctgagaatcttgctaaaactcagattctgattcaagaagaggtcttgggttgaagcttgaagttctacctttccaacaagcctccagccactgctgacggtccagagaccccttttgcagtggcaaggacctcagggaccctgcagggccccaacccaagaaattctgatctagaagtctatgatggaacttagaaatcccctcttttaagtttcacaagtaattcttaaatttatttatgaaaattattaattgtggttatacaagttttttgtttgtttgtttgttttgagacagagtctctctctgttgcccaggttggagtgcaatggcgtgatctcggttcactacaacctcagcctcctgggttcaagcaattctcctccctcagcctcccaagtagctgggattacaggctcccaccactacacctgactaactttttttgtattttcagtagagacggggtttcaccacgttagtcagcctggtctcaaactcagggaccctgcagggtccaagtgctagtagaggcagcatatcttttggacacttatttgtctctttcatcctgtaaggaaacacacactcactggtgacaattgccatgcaagtaaacttctgctggtattgagaaaacagctaaatccttgtctagcagtcagtgttttgtacttgagattacatcaccatcctggaagaacttacactaataccccatacacgtctatttaaggcaatgttaatctacatgggtcactccaggtttctgaacaaaactcagcctccatggactgtatcgtcttcatctggtggggataaaccatagcaaacgcccatttgcctccgaaccatctctgccaccagccttctagtagcccagacgtatttccccatagtctcacagcctcacgcctctgccagtaacccctccacacacttgactaaatggttttgctgctgagtttggtcagaagaccacaataataccccagctctcagcccctaccataagacagcacctcctctgctgggagtggatatccagagaacactggttgaatcagcttcctaaaaatggagacggttgttggggaaaattaatttgctggatagagttcttaaaaattacagccctgtatatactttgacttttcttacagtattttatcagtaccttcctctttattggagcttagaaatagatttcaaatagaattcagcaaaattaaattctgtagaatttagtagcaaaaacatttgccatcaaagtagactagataatttatggtaatgcttcaagctattttctcttgccaaagcaaatcgtaatcttatccaacatgtcaaacatgcttaataagctgcagtcagcatcatcacaagcctgactcccagaaagggctcagggatagaggtggggaagagcctgtctaggagttgtgactagcttgaagaaaatgttttcagattattggatctgtatccattcagtatttgggggcattgtaccatggtgaagaccatctctgagacaagctgcccagaccaaatgaagatagaattcagtcattacccagtgatcttgatagatgcagctgacgagactgcaggctgaaaagtttctgcttcctcaggagatggacagaagcttaaattactaatgacctccttggcctgactgctttcattgctgaatcaatgaagcaaagataaaataagaccatgactcaagctgtcacgcagcaagtgagagaatgagcatcatctttggagtcacacggtcacatccacatcttggtcctaccgtggaactagccatgtgatctccaacaattctgtgaacatttcagagtctctgtttcctcacctgagaaacaacaccaacctcacacccacataacaggattaaaagataatgtgcagcctctagttcagtttcacttcctgttttctttttccacaggggtgtacttcttgtacaacaaataaagggaaaggggccattatctggtattttacttaaaagcacagaagttgaattgatgccagtgttggaaattattgcattttaagaaaatagaaatatgtaatatttttatgctttcaatcaacaaaatgagatttggcatttttgtgctttggggatctcaaaagcagggctttttgttttcaacagagtgttggggtaaaagcaatggaggtaagagaggctacagaatactaggagaggccattgcccccctaggaggtcatcgattgtccttcagagtatgaggcttgcctctaactcacctgccataagtcataggcatggttatgaaatactccagttttcaagtactgattattccttttcctttctgtaggttaagacaattgaacttgaaggaggtcttttggaagatcactttgaaactactgtaaaaatgagtacataccttgtagcctacatagtttgtgatttccactctctgagtggcttcacttcatcaggggtcaaggtgagactgagttctaacgttctacgcagtgcagaaaagtgtcctgagagcaatgaacttttgttttctcatgtttttcattgttatcaaagtattatgtttatattacaagaagagatagataaaaaactaagttaaaaattatccatagtcctgtcaccaagatacaactactgataatattaatgtaagccttccaaatattttctatatgtatgtcagcatatatgggtgtacatagtaacagtatttacttactatatatgtaaaggtaattttcaaagtatatatatatatatatatatatatatacacacacacacacacacacacacacatacatatataccctttgcaaaataatatattgactatttttaacccatttttatcaaaatatgccataaaagttgaatgtcatttaaaattttaaataatattaataattgcatggaggtttaataaggattttaaaatcagtatcttatttttgggcatgtatgttgtttccgactttttttttttttttgagacagagtctcactctgttggccaggctggagtgcaatgatgctatctcggctcactgcaatctccgcctcctggattcaagcaattctcctgcctcagcctcccaagtagctgggactacaaacacaggccatcatgcctggctaatttttgtatatttgtagagatggggtttcaccatgttgaccaggctggttttgaactcctgacctcaggtgatcctcctgccttggcctcccaaagtgttgggattacaggcgtgagccaccgtgcccgacagtttccaactgttttttataacttttttccctcaatgaaagaagatctttataatttttagagtcttcgttgtttgcaaaaacttacaacaatacctaatgattatctttgtagttaaatatttgcaaacatcagtgaacacattaaataaataaaaaagaacttcttatcccaagagaccaaattatagacttaaaaacatttttaaagagttataaaataatgcttttgaaaaatgggcataggccgggcacagtggctgatgcctgtaatcccagcactttgggaggcggaggctggcagatcgcctgaggtcaggagtttgagaccagcctggccaacatggtgaaacccctctctactaaaaatacaaaaattagccaggcatggtgtcaggcacctgtaatcccagctactcgggaggctgaggcaggagaatcgcttgaacccgggaggcggatgttgcagtgaactgacattgcaccaggcactccagcctgggtgacaagagtgagacttcatctcaaaagaaaaaaaaaaagaaagaaaagaataaaagaaaaaaaaagaaaaatctgtataaagtatctattacaatttacatatgtattatgttcatgaatatgtagatatatgagttgtgtagcacacatacacatcatggcacctctgcacttagacatggatgtctatgcatagacatggatgtgcaggaggtgaatggcacttcagaggacaggttcctgtcagcctctttggattcacgtcccagctctacaactttcagcctgggtgatctggagcaagttactaaatcattatgtgtttttattgcttcacctataaaatggcacctgcttcatagagtgggcacaagtattaaattagattttatacgtaagcattcagcacagtgcctggtaaactgtcaaaaaatggtggccgtttacattttttctgcataaaagttttgaaggacttcagttaattcagaacataaaagtgggtcatgaaataaaagtagctctatacttggaaggcaagaaaatttgaatctaattctattttttctacttgatagctaatttctttgggggagccattgaacatatttgagcatttcttagtttaaagcaagcttgacagagggcggatccaataagttcttcatggcttcccacataggtctagaagaaacctatgttttatttgaattgtgtttgtggtcatcattttggaaagctagttgacaagtgttaaagtatatcatagagacgaactcaagtgggttcctctctatgatatacttggattatgatacaatgggttaacatgatttgaaagttacagatgagcactgaggaaatggattgtaacagaagattcagggtgtttgtaattttcaagactgacttttgctttaatacttcacagaacctcttatccttattgacaacatgcttaatggtatcttaatactttcttgaaaagatacagtctgcctttctgtgtgagagggttatcaggaatggaattatgccagggagctgtcattcaaaaacctcttctgatccacatttcccaggtgtccatctatgcatccccagacaaacggaatcaaacacattatgctttgcaggcatcactgaagctacttgatttttatgaaaagtactttgatatctactatccactctccaaactgggtatgttcaaattccacattattgtcttcatttttgctcataaaacttgctttgatctcttccctctttctctttctatgtgatttaaatgagcactgaggaattcagttagctcaggaaaaaataatttgttcctcagagatgattcttgagtgtagaaaataaaatatttatgacatgccccaacagtgtggatcatttctctattcttttatcaggtttaacgttaacatatctgcatcgaactctttcccaggctgatcagaaagggcacacactggaggctgggacggaagccaggtagagggtccaggaaagagatggggagaaaaagaaggaacacagtgactgctctgttcaaaataggggtccacatgtccaagatgctgtggctccctgtggcggacatcaacgctctcatccattatgctcctcttctgtgggagggaaacacacctcccatcgtgctgctcttctatgcccagcagcattgattagagaatggattttccattaaaaaatacatacacacacacacacacacacacacacacacacgcattgcatattagaattagagggatttctggaggaatcaccataccttatttgtacaaggtcagcaatcttttataaaagttgtcaaaagtttatgtagagagagaactgaaaactatgcttccatccgttatctgtgttgggcactgaggttggatggtaagactgtggaacagatttttaaaaaattgcaggaaacagatcatttggttgtggtagtaggtctttacatgagatgatactcatagtctatcttgcttttaattttctatcttaaaaaataaaaaacgttatttttagaaggttgtagagaagcgatccccaacctttttgacactagggaccagatttgtggaaacaatttttccacgaagattgggtggatggtttttggatgaaactgttccacctcagagcattgggcattagattctcataaggaacacgcaacttagatccctcacatgcgcagttcacaataggattcatgctcctatgagaatctaatgacacctctgatctggcaggaggcggagctcaggcagtcatgctctctcgcccaccgctcacctcctgccatgcagcccagtttctaataggccattgacaggtactggtccgcagccctagggttagggacccctgttgtagagcatataaaaactgaagaaagtttcatagcatataaagattagtgcttggggtttctgacagtgacaaaacaatttttttcctttggaatttaggatatacttcttatcctgtcctttttcgcctcttgccctcaactccaatgcattttccttacataaattaaaagggaccatcaattggcatacagttccaggcttaaaaaaattaaaagctatatccagggacttatttcgatagttcctgagtcttactctgctattattgtgcaggttctatatactctttagtacagatatactaaatcccatttatatgtaattcactgctgtactttagatcaaaagtcaaggaaagattaataacagccatcaacaatattaatgttgttcttgaaaaatgcagtcttaaagagcatatgaaatatctttaagactaacggaaaagaagcatgcagcttaggaaaaaatagagcagatataagtcccactactataaaatcatcaatgcgatttagaagaaaagtcattcccacatttgaagtgctaacgaatactaatctttattagcgctaatttagtttttgattgtgttatgtatacttgtttttaatgtactagaattaaccagtattaactccagacaatgtaattataagccaagtgacttggttcatttcaaacttttaaaaaattatctttttttccagctaaacagaacattttagctagcagaactcaaagactaaatattagccagaaattttttagcctacgtgaaatcattagcaaaggatagtaaaccatgcgcatacatttatacctgtatatgtatatgtgtgtgtatatatatatgtgtatatatatatatatgtgtatacatacacacacacatatacatatacacacacatatacaggtacatatatatgtatatacacacacacacatatacaggtatatatatatatgtgtgtgtgtgtgtgtatatatatatatatatgcccatatacggtatatatacacacacacacacacacacacacacacatatatggtacacacacacacacacacacacgtaatgcaaattagtgcattatacctgagttgtttaaatcattagattgcactttttccccccacaacactttcttaagaagtagaggaaatatcagtgttgaaaaggaaattgaagtcagaatcaattcccagagcttttttcctctgctgtcttagaagaacatgtgctcataatagaggctatatttgctagaaatatcaatcgaaatattgactatagagatggctcctaagaggtgttctcctgaaattaaaatcatgcatctttttgttttttctaaaaataagttcattatacgttttgatgaatctcaaacatattagaaattatttgataccctttttaaagttttcagcagtactaacataaaacacaatatgattgttttaaataaattattttcttggcagtaaggcacccaaaatattttcagagttcagcactttcaggaagaaaatggttaaatgtccatatgttacttcatctacaaaactctttgtacaacttattccacttgataatgggcactgattattttcagcgcaactataagacaccctgtcaatgttaagatattcttgatgttttcaaaaagtctgcttaaatatgcttaaaggatcatagtgtatttgagcagagagcaaattctatttctggtgtgggagccataaaactcaagtatggttgttcttatttcttagatttaattgctattcctgactttgcacctggagccatggaaaattggggcctcattacatatagggagacgtcactgctttttgaccccaagacctcttctgcttccgataaactgtgggtcaccagagtcatagcccatgaactggcgcaccaggtacttggcactcatgacattatctcgatatcagttcaaaataacattatatagaacacgaccaatcttcctgaaacaaaataaatcatctcatttacctctagaggggaacttagagactactaaacctaacacaacgtcaagtagcacagtactcagtctctgaactgtggtgtgcatactggaattttattacgagaagtagccattaaatttatcctctaaaacctttcaaagcaaagccttcaaatgtcatttgggaaaagaagggaagtgactatacagacacatgaagcacagaattggaaaccttacaaataaagatttctactaaaaatatttctccttatatcccctggtactctggcattccaatctagggcaaaatcactcttccttcagttggaacctgtgcttacatggccataatgaaatacttcaagtgaaatttgatgggttgatgatcctgggcacatacctaactctctgaagttcagtgtccccatctataaaattaagttaataatagttctgtttcataaagctgttctgaggattatggatagggaaagtgtgcggatcacatagtaagcactcaataagtattagttattaatgatgatgacaacggccactacaactacaagaaatactactatttcttgcaaaataacttatctaagggccatctatcaacactgtattacatacaaatgtggaattgtaaaactaggtctatagatattggagactattccctctatttcatttctgaaaactctcagtaatgcagtaaattattaaagtcaccaaaattgtctttcaccaagtgggcaaatatcattctgttgtagaatctggtaaaatctcttatttaaaacattttaactttatcctttatcgtcaccacaataatgagctgttgttctttaaagcagtgaactaaatactctgttacacagagagccatgctcaacactgtgcttcgagaacacatgggctgcttcctttggttcaaaatctccccactggcgcattttaggtgttttgatcatgagtcaccaggagctctaaagcacttaactgagtctggggatttctaatctttctgccagttgtttgtagggaagtgctctgtgagctctacctctgaggctccatgctccctctggccctccctttaatagcttctcttccacggagatgcagtcaagtgctgaagcagcaaacagcactggaatttttgcccccacttttttgtcttcccattgattaccatgttaacatgtcactctgtgcataaccctggcaaagatttcctcatgccaactgtcttagcttggcatacaaggttcccatgacccagctcctttttacctctccatcctcatctcttgcctacacctaagctttagccatccaagattacctgccattttctgaacatgccaggttgtatcactctgcctttgctcctactacctgatattcagcatacctgagtactatttacaaggctcaggaaatgaacactgtcctggcaaaactgattatttcctcctggaatcccctctgtccctggcaaagacattgatcttagcacctgctttactgtatttatttgtctactggttgacctccatcatttgtattgaggcagtggctatattatatacatctttgtatttctaacatatggcatggtgccaggaacgcagtaggttctccgtaggtatttactgaatgaatgaataaactagtcttgctaactggtaaagtggctagaatcagtttatcctgtacttcttatattcaccggttttcaaattgaggaaacacctctccctttccatgaatgcccttcagaagattgctgcccacttgtaaagtaatctgaagactgtcagaaaaggaatagtgcttaaactgtttctagaagctacagacttataattttctgttctgtaactataaccaggctcttctgaatcttagaatcttattgttgaagctttggtccgtctagagattttaatcttagagacatacactagatgtgcagtattaggcatatagactaaataaataaaacataaaagcacataaaagaatagtaatatttaaaatgcataatacagatcaaatataggtaaagggtaaatatgtcaattatatttatgcatcctttttatttgatttatatattttttaaatcttagacctttattgtttctagtggcccactgaagtaagtcaggggcagaggttaacaactgaatttgctcttcagtaatattatataacaacctgagagccctaaatgaattcttatgattctcctaagtacctgctacttaatataaaaagataacttcacccaggacacttggatttatatttctcccttgaacatcatcatatatcaaggacaaggtgagattgttcttattgggcaggaaagaaaaaaactacctccataaagtgttccattttctttcttaatattaaatctaataactaggaaatgttgggcagatagaatgaaagtcgaagagttaagggcattgagaacacacaaaaaaaagaaaaaagaaaaccaagcaaaaatgtggtggtgagaataagaaggcaaggaaatcagtagaagaaaattgtacagagagaaaagggtagcaaagagagaagagagatcctaactaataaaaaaaaagttagtaactattgtattttttgctaaagttaataatttttatttgtttaacttctaataatattgagtttttacctcctagtggtttggcaacctggtcacaatggaatggtggaatgatatttggcttaaggagggttttgcaaaatacatggaacttatcgctgttaatgctacatatccagagctgcaatttgtaagttcacaattctgtgtatcatactatatggtgtaaagaatcatcaattcactattaaaatttcaagtgaatgttaaacagaaaaactacataatgttgtggtttttgaacatatggcattttgtttgatacacgaaacagatcacagaactggatgaaacattgaaggttttagaaaacaatcaacataaatctgtcaccccaaagtctgtaaagagagaaggcaaactaatacaaatgtagaactgtgtatgtgggttgagaggaaagaacatcactgtttgtatacatctgcacaggaatgctcatggctactaggtactatagagagttctcggcatgtaacctgaaatcaacatcattgggggtgtacttttctagaatttccaaagggtctgctggcttccccaaaatgtgtgaagggatttcttcaggtacgtcttttttaaaaacgaatatagtggtctgaacactacacaaatttgcatatcaaggtggttagtaatggttaattaggtctttgggatatatatttagtccagtacactatagacagacatggattcaaagttaggctcttcttgttactgtgtatgtactgaatttgtggcttaatgccaaagctttatatattcttatttgtaaaatgcatataccatatctcccttgcagaggtgttgacaggattgcagatgataggtctaggcacgtaacaagtattcactaaatggaaaccattattttatttctgtattcaagggctggtacatgataaacattcaggcaatgtctgaaggaatattggatttgtatctttttaaagtagagaaactttaaaaagatgtattcccctttggccaaaggggaatacatacaagaaaagaaacatctcccaagaaatatcgattgaaatcttacctctaagaacatcttactaaacctactatgttttctattgcttttacagtgtcaaatagaaactaaaactaaacatttttctccctgtttaggatgactattttttgaatgtgtgttttgaagtaattacaaaagattcattgaattcatcccgccctatctccaaaccagcggaaaccccgactcaaatacaggaaatgtttgatgaagtttcctataacaaggtagtaaatatcaggtgcaggtggaagctctgctttcagaagtgtaataatgactatagaatcagcagtttaagtcactggtgccagttcctgctacttgtttcactttttatttgttcacttttcagacatcacacatgttccgtaaaatttaagcttcctttaaaaacataccatactaccattttctttatctcttttttcaactcttttgtttttttttaaagggagcttgtattttgaatatgctcaaggattttctgggtgaggagaaattccagaaaggaataattcagtacttaaagaagttcagctatagaaatgctaagaatgatgacttgtggagcagtctgtcaaatgtaagtcatatgttgggtaacgatagactgttatttaatctagaaagtaacagaataattgtgaatgtttataaatagctatatattgtcagtcaaccatatttattctgcttgctatgttgtcatggtctatagaaggcagcacttccctttttcctctaacaccacactaggatgtcacgctggggtggccccaggggctcactatttgacctgactttctttggtttctcttctacgactaatcctacacttttatgttcccttgatctaaaatctttaaaatgttgtaatttctaccatataacacctaatctctggcaaattttaaggttgtcaactgtattccccaatgtgtatatatttgttgagcaaaactaatcttctctcttataagaagaaatcttgctcaatctctagatcattgtgcctatatttctagtgcctttactagctgaaatgccctttcttctttccaacaattcaaatgccacccaacttttaagatccagctgagatttcacctcctccttacagactgttccagccctcattcgtttgcctgtctgctaaattcttagcagtgcacttataatctgttccacataatagtaccctcttttattgtttttattagttcaataatgataatgtgcttaagaacaaaaattgtgtctattctttttttaatgtgatagcacctagcatatgttgatcttataatagtgattaataagcagttaatgattgattaaagaacttatggtctgtctttgggattcatgtagataataggaaaggcaaagcagaaaaattcagttaattcagatgattctaataattattaaaatattttaaaatttccaactgcaaagaaaataattttttatagaaccattagacccagagaactcatacctgtaattagaagaaccctaagtcattgtagacagaagagatcctttcttttttacaagcacttgtgtcccagggacagtaataatattgtttaatatttctgcagcagtttacagtttaaagacactttcatggccgggtacaatggctcacgcctgtaatcccaagactttgggacaccaaggtgggtagatcacttcaggtcaggagtttgagaccagcctggccaattcgtggaaccccgtctgtactagaaatacaaacattagcttggcatggtggtgcttgcctgtaatcccagctattcgtgaggctaaggcaggagaatcacttgaacccaggagctggaggttgcagtgagccgagattgcaccactgcactccagcctgggtgacagagtgagactctgtctcaataataataataataacaataattaataataaataaaaaatcaaagttaaagaataaaaagcactttcatgttgattatctcatttgatatttttgtgcccttataaagcacacttatggtccaactgatgtgtgattttgtggttaaagaaacaaaatccaacaatcaaaaattatttcacagctcctattttttacttgcatttcttgaaaatcctgagacatattcaaatacatagtttttacttacaaaaatacttataggcctggtgcggtggctcatgcttgtaatcccatcactttgggagaccgaggtgggcaaattgcctgaggtcagtctggccaacatggtgaaaacccatctctactaaaatacaaaaaaaaaaaaaaaaaaaattagccaggtctggtggatcacctgtaatcccagctactcgggaggttgaggcaggagaatcacttgaatccaggaggcggagttgcaatgagctgagatcacaccactggactccagcctggtgacagagtgagactctgtcttaaaacaaaacaaaacaaacaaacaaacaaaaaacatataaagatgctctttactatccatttccatcacccaccgtcagtggtccagacacactttctccatgcttccgcttaagcttctcagcaccaagtattgtgttgcttctgtctctcatccctctccatttccctctcccttgccatgtgtgtgtgcatgtatgtatatttgtagacatcagtttagctcccctccaacacggaagaatctatcatttggtgtgcatactggcagtagagggtgggagttaaaaagaaaatttggccagcaattaccagatcattttaggccagcagtgtaaattcctgtgttattttttgtcacatcatgcttataatcatctcaaaagataaagtaatcatcattactctgtgtttataagtgagaaaactgatactaagggacagatttgcccaaagtcaccaagtcagtgagaaaatcagtacttaaaatttgtcttctaagtccaatagttattcaattatatcacagctagttcctagttttaagaaaagtcccccatcaatcttcccctaaaggtcctagattttgaccaactctcttctgacaccaaagggccctgtagtattaaaataataaattactgaaaatatcttgcccaccattgtgtcacataaagtcaattctaatacatgtcaatagcaacttgagaatgagaagaattagttgctgttatttttcataagatcatttaaaggcatttgagagccttagcacattcttcattttttctcatttgcagttgcccttaagtactggttattcaagggtcaattgccaagttggtacttttcttaattcttattttattcccagttagttcgaaatattgtacactcatcacatgctgttgtgatagccactgtaggaataccttggtaaacaaaggtgtttcccctactgtcaaagaacttgtaatatgtcaggggagagttaacagtactagacagagttgcctacatgctaaataggggcatacataacatgcagcatgaaataataaaataggacctttcttaagggaaagagaagaattggatagaaaattcaacaaattgattcttccttagaacggttaatgactttattgaactttttaaggaaactttacacatgcgtatatataacacaaagaaataacttttgtggacttctatcccaggtcactgcaaacatgcctttttttccatttttatgttcattatcatgtctggatgaattatttcatatagctcttttaataaatgcctgcatccatggctaatgtgcacgttcagccaactaatgatgcctacattgcagtgctcttttgttcttgttttgtagagttgtttagaaagtgattttacatctggtggagtttgtcattcggatcccaagatgacaagtaacatggtaaggataaagagagtcacagagtagaagagatctgtggaatagcctgacctagagtgagtatgacatacagagtagcccacctgtcccttttaaaagctggagagaaagagagcccccacgattttctctaaaacaaaactgaaggggaaatgcttggggtatttagggggacaatgctgttgctactatatttttgttgttatagttcggctttcccacaaccccactgctagctaaaaatatctcagcgcaaaatgtttttgagtggttactactgcattggcatcccttaagctctgaaaaatgccaaaataagtatgctgttaggtttggaaatacagtatatgtttttctttttccttacctctgggaagttatagaatcactacaggaaagagaaaagaaagtcatcacaggggaagaaaggaaaactttttatttaaacaaagagtcatgctaatcccctgaatatatatatacataaatttatatttatttattttagacaaagtctcactctgttgcccaggctggagtatagtggcacaatctcagctcactgcaacctccacctctctggttcaaccaattcctctgcctcagcctcccaagtagctgggattacaggcacacaccaccatgcccggctaatttttttgtattttcagtagagatggggtttcaccatgtaggccagactgacctcaggcaattcgcccaccttggcctcccaaaatgctgggattacaggcatgatccacggcgcctggccctaaattgtgttttctaaaggaaggttcagcatcatccagtgatcagaaacccatactagcagtgcagcagccagaggttttgttctccattcactacacctctattgatattaaattgttctgttgaaatatttaaagcttccctaaagacagatatttccctcgtaaaccacccctcctggattctactgttatttgagggttttgtttgtttgtttgtttgattttgtttgtttgcttgtttttgaaaggggtcaggaaagagactccagtctcaacctccttttcactggcttttcctgccatgtattcaccctactatatcctgtatatatccctcaattcaagtaatttgcagagagcagccctgggatagccatccctaatccagttgcctggattacccttccctgagataccagtccgagtcttctgttccccaagccttgtttctggcatccaaggagatggaagtttctgtccctctgtctttggattgtctcctctctcttgagttatcatagtcacctgtcatttcagctcgcctttctgggggaaaatgcagaggtcaaagagatgatgactacatggactctccagaaaggaatccccctgctggtggttaaacaagacgggtgttcactccgactgcaacaggagcgcttcctccagggggttttccaggaagaccctgaatggagggccctgcaggagaggtggctgcttttcttctttaggtctagcttacctcatctcagtttcctcgttatttccttagctttctctcagctcatctggcaactttgtaggatgctagttccatataagaatcaaaggcctaaagtagacttgataagatttaaagagcttcatataacccggacttctttgttcaggagcaccattcttagtgattccatcagccttgagaacttcagttcttggtttagttatttgaatcagcatcaggctggcagtttttgaaaatgtgaaaggaatattggattttctttcccatacaaacagcagaaattgttatggtatgagattaggacagcaaatgacacaagtatttgtggcagagttcaactaggtagatatggctgctcctttataattatcatggaataattttttgcatacttaaggatatgctagtcttagcctataaaatttataagaccacttgtgggtagtatgaaggatgatgggtacttaggtgccttttacagtctgtctgagtctgacaatgtgaaaaatcacagcagcattcttttggtctgtaactatctttactctctgtcataggtacctgtggcatatcccattgacctactccacgagttcttctaatgtgatccacagacacattctaaaatcaaagacaggtaatgaactaattagccaaacaggtatttcaatgtggaaattaaacatgtgttgagctatttgaaggaacgatacaataagtaaatctaacaataaaagatttatatttgagggaagttgtcatttatccatatgttactaaaataactcttttagtaagaaaatctggatttttcattcagtgggaagttctcttgcgcttttatcatttagagacagattatttacatcaagaaataacagaaatctatcttatgtcttataatacccactaatctatttttacaggttatggataaggcaaaaaatgttcagtggaaaaaagcacatactttaaaattgattgcttctggattcaagtcctcactctctcacttattagatgtgtgaccttaagaaaatgtacacactcatcctgagcttcaattttttcatcttatgttgaataaagactaaacctcacagagttgttgagagaatattataatgtaattttaccctctagtataatatatgccacattaaaaatacatagtataattttaattttcttctaaacactttaataaaatttgagaggttttccgtcacaaagtcatgcttaacctggagtccttctttactaaaatgaacaaatggatcacctatttacacatacatatttcaatgactagtgactaaaccttgagacaaggacatcatcaaattaagccaaattcccgtcatgctagtcatctggctcactgggcccttccttgcatgtctcttagacctgcatagacaattttttagaacaaattcagcagtcttattcctatgaattaacttatttattaatttaataagaccatctttccaaaagaaatcatccagtgaactacgaaaatgaatatcattatgactctccccaaacttcatcttcccattgatttataagtaatttgattaaaaataacagttctggagatgttctgaataagtttgttgataataaaatgcctatgccaatcttatcctcttagatactctggatctacctgaaaagaccagttgggtgaaatttaatgtggactcaaatggttactacatcgttcactatgagggtcatggatgggaccaactcattacacagctgaatcagaaccacacacttctcagacctaaggacagagtaggtctgattcatgatgtgtttcagctagttgggtaaggcaacatttcctctgacttcatgcaaaataactgattcgtaaccagatatgctagacttcaatattgaatgttcaacattggtcattgatttaatatggatttgaatggaattcaaacagtgatcactaggccaaagactacccactaataacgtattttgacccacacagtgtttataattgtaatccaatattttaaaatgtggagaactttacctaaaaatcctgacctctggaatctcttaaaaatgatatttggcaactgtgggtctttatcctgtgggccacaggatagctataaaggagagtgcagtgggccaaactctctttaggccaggcctactttctcccaagcaccaaagtcccaaatggcctgtttcattcacttagtgtggactctctaagtatttgagctttcgaccccacatttaaaatgtatttatgttattagctgctacaccaaataccggtgtaatctcttaaggaaaagtacaaatatagtcttaacttttataattttaaatgggttgttatgaaatctattcattacttacactggagaaattagtatgacgtttgtagggaaatgaagtaataaatggctgtttgcattcattcctctctagactttcctggaaggacaaagtgttttctttctttttctatgtatcatgaacagaataatgtgtggaatgaatcaggtcacaagatcaccaatggctggagggaattgaggaccaggaagtatattgtgcattgcaagctttccctattctgagaattactgtgatgcactcactttactcaatgtgacatataattttctttcaggagcttatttaggtcaaattgagtgaaagtgaccagcaggacatctctgagacaaagtttctcggtacactaaaatcctctagttagaaagaaaagaggaagtgaggcttaatcctcagtcccgtgggtctcaggaacatcttggaggcatagctcattggaggccaaaattaggaaaaacaccatcctacatatgagtgaatgcatgaaaggtgagctaagaagcaagctattgctagttgaaggaggtttgcctgctcaaaggagaagctctgagtagattgaagagaagatagattaacaatgcaagacttggaaaaaatggagaatattgacaattcagcaaattaatcttttaggtagttgtgaaatcttttttgctgtttctagcctatccacttagattgtctaaatttagtaggaggaaatttgcagttattgatgcattggtggaaaactaatcatcttttcttcactaagtagacagattaatgaagttaagaatacaaattttatatgaaaatttcaagaagatttcaggtattacctcttcacttactaattttttgagcttggacaagttttgtttttttaacctttttaagcctaaattttccagtctttaaaactttattactaataatatccgatatacaaggtttggaggattgcataggtaatgaagataaagcagtaagtgcagtacttactcaataaatgtcagctgttaacattattagtattatctaatacaaattatttgaaatgtcatgacatgaataggaggaggagatgacaacatagaaaagtacacttcaaataatgtgaagttgagaaaaaggcagaatgtaagtctgtgtattattatgtttgtttgcaactacaaatgaaaaaaataagtgcgaaggggaaacaaaaacctgaaggaattatttcaaaatgctattgttgagtgtgtagggtattgaaattatgagccttctctaatttctggttgttttgtaattatgagtctaatttctagttgttctgaaatttgtttatatttacttatattacatttataacaaaagtaattgtataagaaaacaatttaaagctctcataatagataaaaataaataatttttacttgctgttctttctcaatactataaaccactttcctccctgctttatgaaacttcaatttaagaattaaaggaggcccggcacagtggctcatgcctgtaaccctaccattttgggaggctgaagcaggcagatcacttgaagccaggagtttgagatcagcctgggcaacatagtgaaaccccatctctactaaaaataaaaaaattagcccagtgtggtggtgtacgcctgtaatcccagctacttgggtggctgaggcacatgaatcgcttgaacccagaagatcacgccactgaactccagcctgggtgaccgaataatactctgtctcaaaaaacaaacaaacaaaaaagaatcaaaggaaccaatagtgatcacatttagtttggagagataatttttttttctttttaatttttttttttttttgtagagacagggtctccctatattgtacaggctgatattgaattcctggcctcaagcacttctgctcagcctcgcaaattgctcagtttacaggcatgagccaccacacccagtgtaaatcaatctttacaagaggtgatactatttagttctttagtggacaagacattgtcatccaagggctgtctccagagccattctcttaaccacgacacgacactgtctcttttttttttcttcctccccctcctcctcctcttccttctcctcctcctcttcctcttcctcttctacttcttcctcttcttcttcttcaagggctttgctcttcttcttcaagggctttactcaggctgcagtgcagtggtgcgatcatggctcactgcagcctcaacctcctgggctcaagcgatcctcccacctcagcctcctgagtagctgggactacaggcacacaccaccatgcccaaccaatttttaaattttttggcagagatggcgtctgcctatgttgtccaggctggtctcaaacttctgggctcaagcaatcctcctgcctcggcttccccaattgctgggattacaggtgtgagccactgcacccagaatggagagagaatttgatgcaagaattgatatttattttagttcggttttcatacattttaaatgtaatttaaagacaggggtcttggataagttgagtggaattgaaatgacaacttcaatttgcctatagaaaaagctatatttgtttcttttagtcccacaccttaaagagaaaaccccacattgggcgcagtggctcacgcctgtaatcccagtacttcgtgaggccaaggcgggtggatcacctgaggtcaggagttcaagaccagcctggccaacatgttgaaaccccgtctctactaaaattataaaaattagctgggcatggtggtgtgtgccttcccagctacttgggaggctgaggcaggagaatcgcttgaacccgggaggcagaggttgcagtgagccaagattgtgccattgcactccagcctgggcaacaggagtgaaactccatctcaaaaacaaaacaaaacaaaacaaaacagaaaacccaaattggtgcttcaagaatatgatgttatttctcaaaggtacaatctagctgaaatcatatacaagtaagtaggtgtggacttttactgttgagctaaggtttatgtttatatatgttttattctttaagctaaacaaacattcagataacattctatgcattttttgaagcatagggttagtaatgaggacttagattttttaattaaacaactcagtaactatataaaaagaaaaggagtcccttatgaataaatattaaaattaaaagaaataggcaactataaaagtaagtatttttaataatggcattgattttagtaagaaatcaattaggctgggctggaaagaaaaactggcttaatataaagtagttttaatatgtcaaatattcttcttaaaattgtggccctggaatatcatttctgcctattgctgatgctaaggtatcaactgtgccaggtattgtgctgctcacacaggtgggaaggagtagcaacattttgtggatttttttttttttaatacggcagactagccgggccaggtggctcatgcctgtaatcccagcattttgggaggccgaggcgggtggatcacctgaggtcaggagttcaagaccagcctggccaacatggtgaaatcccgtctctactaatactacaaaaaattagctgggcatggtggcacatggctataatcccagctactcaggaggctgaggcaggagaattgcttgaacccaggaggcagaggttgcagtgagctgagattatgccattgtactccagcctgggtgacaagagcaaaactctgtctcaaaaaaaaaaaatatatatatatggcagaccacagaatcatggagtatatggtccagccttccgtcttcaggtgaaatttttgaaaaaaatttccataagtctgttttaaagcagcaagtcatcgtgattgagaagattaaagggacaacaaaagttggttctttttcatttccttctggtctctgttccctctttttagacaggaatttaaaacatgtataagcccagaagaggtagagcactatgttaatgataagcccagaggagacaccctttgttctggaatcagtttccacatcacacgattgtgttattctgggagttgggtgttcacaagaatggcttatagactctgtgtgcaacatagcctcccagaaacacacctgaggagcactttccaatagtgaggttataatcgttcgtttcctctacagaagatgccccagcattttgtacttagaataataaacctgttatttattcttctcactagaagaaaacgtagagaaggcatgtaactttagaatctaaaagatgaaaatacttgttttgtcctattcacaatgattaccgcttctctgataggattaaggacaaacatcaaagaaaaacaagacatggcacctgtcctcaaagttcccaatgtacttggagaaacaagtcaaacccacacatgaagcaattagagaatgaaatcatgtgtaaaaagtttgatattatttggtactaaatgttaatattggctaatatttatttcatttattaaccttttgctatgtggtagacattattctaaatgc

SEQ ID NO: 364 - DNA, 12971 bp, Homo sapiens
  source 1..12971: mol_type = other DNA
cctcgtcccaggctgcaacggaggcagagccaacgcctcgcgggcttccacgtacgcactccaacgcgtgttcccggagaagaacgcatccgggtcacgggagccggtgtctcaggctccgccccttcaccccccgaaaggctaatccccacttccgaccctctcaggccttttccgcttctcttttacctccccaggtccgcccgtctgcgcccctcacaggaagccggagggtcgctctgatcccgaatctcccacaggcgtgaacctgctctgctgtgtatctttgcggggtggcctgcgctgaggcctgccgcgcgcggtgagtccgcgcagacctgaccctgcgtctcgcagctcggttgaggccgccgccgccttctcgggatgccgcggccggggtccgcgcagcgctgggcggccgtcgcgggccgttgggggtgcaggctgctcgcactgctgctactggtgcctggacccggcggcgcctctgagatcaccttcgagcttcctgacaacgccaagcagtgcttctacgaggacatcgctcagggcaccaagtgcaccctggagttccaggtatcaggggcctagcagtccctgggccccaactcgcggctccaggattgggggtgtaacttgagggatggcactttcctgtccgtgtttccccgttcttaggctaattcaaaaatcgcttctaggtagctgatgcccagcatttgactttcctctaataaaccttgggtgagagatgttaagaccgggtgttaaaatatatgaattccagaaatgctccctttagcatttctttccatctcatttttaaggcctattgaactttcttccttaaaagattcccttaaagaaaatcatttatactctgtagtacccagtgtcaaccctctactctctaatccacacctccaatttaattggatttggagtgctgccaatgtctaacttcattgcttttcagttttaccaatattaggactgttggttaatacggtccttgtcattggaagagctccattacaggttgaacggccatttgccaagggagttgtagaaagaattgctgtgataaatgagaggccccttctgatatttgggattatataaaaaagaaactttaacagaatgtggtttattcggttggttagaacagtctttactgagcttcaattttggttggtaggcgcatttaacatttgagtagctattgaatactaggtgccagtggtacagaagtggtcgaaacagatagggtcactgccatcattcatgattcccctctcaccctgcttttcttaactggtatctgctcattcatcagaactgtgccttaagagcagtaagtaggatccatgaaggaagacttcctttggaaaattattttaagctgaactttaaaggatgagctataaacaccttggtaagggaggagggggaatagcctgtggtagtagtgaacactgagaatttcagggccatagagagaggtccaatatggttgggaataaggagccagagcaagggggtcagcaggggcaggccagatagtgtcttgctgaccatgttaaggatttgtttttcctgaaagtgtaggaagccatcagagggttataagcagttcagtgatatgacgagaatattcttggtagctgcattaataataacttgtgcaggtagagaagtgatggtaagatgttgcagagcggatgtggaaggctgattaggaggttattatggtggtctagacaagaaatgatagtggcttagagtagagtgatagcagtggggtaaatgaaaagtgaaaggattggagagaaggtagtaggtagaatcaacaggacttggtaatgatttggctatagtgggtcagggaggggaggccaaggatgacccttaggcttacttaccttcatggattagcaccaggggacagaaaagaagatagcaggaattgtgataaaaagtataagccgacattttctttgtttgaatttaataaacatttcctggatttttgtgtatgcagactcagtgattagtgctaaggatactactacaatggctaacaaattagcatctgttatgtgtagacagtatgttaagcatttcaggtatgttctcaggaaagcccgatatgaaattgttatagctcttactccttttttactgatgaaactgaggtttagataggctaagaaccaagggcataaaacgtagaagtagctaaatcagtaacgcagtcccaagttaaattcttaaccactttattatactacctcccagagactgactttgatctcagagagcttacacagacatatatagtcataaaatgttaaatgtgacaataaaggtacacactaggtatagtgctggcaggagacagaaggatcatcaggggacatttagctgaggagctgatgttagaggtgagtctgcaagataagtagccgttgctctacaaggcggcagaggagagaagaaggggccccaggcagatatgttcatgacagttccagcaggcctgaaattagcctgagctatattgctaacatttgtgcatggcattgaaaatacactgaataataatagttttgtgactatagttatatttattaatagtcacaaaactattattattagctttaatatgaagctattataatagctttgtgactgtgagtccaagggctttgggggcagtttgtaccagtttgtcaacattatttattggtaacaatgagattgatgatttgctcctggtcttcatgagaccacacccccaacccagagctctgttgttgagactagctgcgtagcaggaatatgcctatgtgaccagcaaaatatttaaaaatgcaatcaggactctattttgggttgcttggttccagggtgttttctttgcacacttgggtggttccagatctgagagagtatatgtctggccacacacctaacaaagggaagccgaaggagcccacacctgaccttttcagatctcttgctgtgaggcagcctttggctgtaatgttttatattcttttccttttggggctcttttcagtcccaagttaaattcttagccactttattatactacctcccagagactgactctgacctcagagagcttacatagacatatatagtcgtataatgttataaactgtagatttataacataacctacagtaataaactgtagatttgcaaacactgtcattttgatccgtgtgattctttagcaaaccctgttgaactgcactgtcagtgcagatgtaaagcaaagacttgttcagagaatttctggtagtctggtattttaggaacatagaacgagtaagggtgtgaataaaagaggttctgaagctacctgggaggaagaacatgtgaatagtataccattgttaagaggtttagatttgtctgcaggccacaggtaattatcaaaaagtttttaagtgattgctcaatggggaatgaggaaagatggggagatgggcaccccttcttcccaggagacattcggcatcattttaggagaagggcagctacctgcatctagtagttagagaccaggtatgctgtttaacgtgtcacagtgcacaggaccatacagcctcctacaacacagaattattcagttcaaaatgggaataatgcgaggttgagaaaccctgagttcgagggagaagatattgggtagtgggaagaccttttaggaagttgtggcaatagtcctgtctggattgtggtttcggaatgcgatgaatttgagaggggcaaaaagattgagagatttgtgtgatcatatggatagatagggacagttagtttgggatgatcctcagtttcaatagtaggtgattggacaggtttaaagggatactgttaagtgagattacttgttttaagtttgatggaagagaagtggggtgatgataagttctggtgctattcggtttgtatgtatgtgtttgattattcagaatacaatggtcaaatacgtataattcagtatagcaaaatgaagttattttcacctggagaaaaagttactgactttttggtgaggatggggattggtaaatccccaattgataagacacttttatatcaaaacattttatctgtatattaacatttacatatttttacagtttcataagtgcataattattttcattagattatcaaaatgatatgtaacatagttcattagtcatcttctctcaagtgagaaaaggtcacacagatccttcttttaaatccaaagtttgacctagaatgtcaggatgctaaccaagagagttcaaggttgaaaataacaatcttgtgctccccaatcacatggtggtttgggaacccttcattcaacccaatgtgtatacgttcactctgttcacctctctgcactccctctttcttcctactcagttctttctcatgtaaggaagcctttctctttaatcctttcccccttttgtctcttacaatacttatccagttaccgcaggaaaaatctctccctcctctgtacaacccaaatggctggaattgtaactgattaagcataagccgtggaaagtagttccacagttctgttcagactcatatcacctacctccaggcttccattcagtatgtttgccattaagtactggctttctagataaacagacttgttgtccttcatgttattttgtttttgctttaatcacaagagtttcaacaatattttatttaatcagttacgtgtctctcctcaaaacaaggttgtaaatgattatatacttttagaatagcccactccgttactcaacttatagtgtagttcaaaacaaaatgtatatcaaattccatataactgactataaaagaacttaataaatgtaatctatttgtaatttggcagtaaaatgagcttaagttctatgatagaagtatgaatggggtgtaatcctaaggattggcctaccttgttacttcactgtgtgtgtgcttggatgatgctaataggaaagtgggttagaaaattttcagaaggaaaatattgcaggcagtaagcttagaggttaagaatatgactttggagttcaagttctgcctttcccacttaatttagatgaacagtcttgaatagttcgcttatttaacatcagtttttcagtctgtcaaatggaaggaaaaaagtatattgtagggttgctgggagaattaagtgatctaatagatctccattaattagcacagttgtctggctagttcaaagtgaataaaagttggagaatacttgttcagtttctgtaaagtttagttgaagtaaaatctcccaagttccatccactggtgaaaatttaaaaagatagtaaaagtcctttgcccatcaccttattgccattttaataggaaatctgattaaatctgattaatttttcacacttttcacagtgatttttcttttttaatctcttacaggtgattactggtggtcactatgatgtagattgtcgattagaagatcctgatggtaaagtgttatacaaagagatgaagaaacagtatgatagttttaccttcacagcctccaaaaatgggacatacaaattttgcttcagcaatgaattttctactttcacacataaaactgtatattttgattttcaagttggagaagacccacctttgtttcctagtgagaaccgagtcagtgctcttacccaggtaaataaaaaaatcagcaatataatgttggtatatttaaaaggaggaaaaaagcataatttaatatcatgcactaactgatgagcatggaattttgagactgacagtctttaaaatctatcttaattcttacatgtaggcatttcacagagaacttcagacttttgtagtgaaaaataatgttgaaagattttatgaacttttaattgtaaagagaaagaagcattaaaataaggaggaagatcactaaggtagaaacatcagtggtaaaagaaggttgggaaggctgagcagtgttccaatcttctgaagcattttctttaatccctgaaggaatgttgctgtcatactcaggaggctggtgtaactggaagcaaaatgatgcctaaattagtagataaataataccatatcatagcctttataccattacttagtgttactcaagctgctgtaacagtaacttgtgctgtaactttaggtgaaatattgaagattaatggtaagtcatctcacaaaaatagttacaaaagctaaattcagatttattttggagacatagagaaagcgtaaaaaatttaaacccagtgaacaactattgcttaggtgatgaggactgttttatttctagttcaaatacagcaaaatccaaaatgcttcaaaatccaaaacttttttttagctccaacctgatgacacaagtggaagattgttacatctgatctcatgacacatcattgaaaatatcatatacagttgccttaaggctgcatgtataaggcatatatgaaacataaatgaatttcatgtctagacctgggttccatcacaaagatatctcattatgtatatgtagacattccaaaatcagaaaaaatctgaaattcaaagcacttctggtcccaaacattttggataagggatactcaacctgtatgggcttagatcgtatctaaaagttactcaattaggcatgaaaaagaattatttaccacttattcgttaacatcttaaactggtattttagtgttcccaggttctatttagtctcttggccaaagtcatggtgaaagaaacagctttaagaatgtgtaaaagccttaattcataaacctgttgttagaattagcaagatatattcaaatactcttaattttagaaatgttctctttattttaaggtcttgtgtgaaggacaccttgctttgtaaaatgatatttctttggggccattaccttaacctgtatccattccttcatgaattttaacttgtataaggtggcttgttctaaaaacctaagtgggtaaatataagaaatgaatggtaataaagcagttagtatcatacccgtctttatccatgctacattttttatttttctcagtcttatttttctactttcaaaaagataatgtatcatataatagggatcattataaagcaacttttcatactttaaaattgaaaattaccagctagtaagttcagaacaaaattaccagctagtaagttcagaacaaaattaccagctagtaatgcagaataaatgataaaagttttactctcaccattttttacctgttgataaaatgatggatttagagtaggcaatgatcagcagtcactactaaaaccattaagtaaaaggctgatggggaactttatactgagtggatcagactgaatgatcattcacaaatggagagataactagacattatgtgccttatcataatatgcagtaagaagtacacaacattgactactagacgttcccacccagaacattgcacctgaattccatcaagtctctagctccaaatgccagtttacaagaaatacagaggataaaggaataacatgggaatgcaatcaacaaaatccaggacgtgggaaatgccacaggataggggttgatggcaaggaaaaaaggaaaaacaaggaagaaagcctaaagattaatgaacacttacatcagccaaatgattgtgttaaccttacttggattcttacttgaaaaccaactttgaaacaataggggaaatttgaacactatttcctgactttaaggaactgttttagattatttcatgtgttataatactattggggttatgtttttaaaaagtgttatcttttagaaataaagtataaaagtatttgtagctgaagtgataaaatatctgagatttgctttaaaaataatcggggaatgtagatgaagcaagattagccatgtgttaatctttgttgacatggtgggggttcattgtacttttctcaatacttttgaatatatatggaagttttcactgtaaaagttttttaaaaatcacatctcaggccaggcgtggtggcttacgcctgtaatcccagcactttgggaggccgaggcgggcggatcatgaggtcagtagttagagaccagcctgaccaacatggtaaaaccctgtttctactaaaaatacaaaaattagctggatgtggtggagtgcacctgtaatcccagctactcaggaggctgaggcaggagaatcacttgaacctaggaggtggaagttgcagtgagccaagattgcgccattgcactccagcctgggtgacagagcgagactccatctcaaaaaaagtcacatctcaaaagttgtagaatgcatgtaatttaatttctgtgattttctctaatccagtagttcttaacccataccccatggacaggcttgaaggagttcctaaatattctgcatttgggtcaactccttgcctttatgtgtactttccaggtgaagaatccttgggcaatatgccattttgagaatatagagaaagcaaatcctagaagcacatctctctctagctcctcatcacaaattaggaatcattttagcacagttttgcaaatttttcattcctaggggcctgaacaaagcaaggacaacaaaaatatttgactcttctaataggttaatgcagtttgttggcctcataatttcttacattttttaaaagcacttttaatagaatattttaataattattcctttcatacttactttggcagaacttcattaaacattattttctaatttctatattccttaactaaaattaaaacaaacttagatttgtttttaaaactcttaatacaggcttgttgcataaaataataataaaacatatattttaccactaggattaagtttgcagcagtagaaaaatattaaaccatggtatacaaaaaaactagtcatttaacctttctcaaaacagatggtataataaatgtataaaaaggcaagctgttatcagctaaaggctcacaaattgattacacagtgaaactgaaacttgcatcctgttgggaacatacatattggtttagttgactggcatgagggaaaaggctgatttaacaaatagataaatgtaaaaaaacaaagtcattcctattctgatagatccctttcagatttaaaagttactaacgattttgatgttgtggctgttttaaacatagttcaaagaactttgactaattcagcttttttttgtactgtgctttgtttatttttatagatatttgggctttgacttatattctcattggtgagctcactgccattttcttcctaattcttctttaaagaacttgggctggaaattctgtagtcaccaaccttagctgataagtatttctgctattgttagcttagtgttccatctgcccccttactgatgccatggctgtgacatctcagttggggaaaacagctgcttcatgagatctctagccttaacagttgtcccagtgaaaatgagcaggggggtttcattgcaaagacaactggcataaatgtatgaatgaatgccagattagtagcatgttagtcaaaagaggaattgagatcaaattgaaagaaaagctgaatatgatagatgaagtctacagaaagtatcacacatactgactgaaaatatttctctgcagatggaatctgcctgtgtttcaattcacgaagctctgaagtctgtcatcgattatcagactcatttccgtttaagagaagctcaaggccgaagccgagcagaggatctaaatacaagagtggcctattggtcagtaggagaagccctcattcttctggtggttagcatagggcaggtatttcttttgaaaagctttttctcagataaaagaaccaccacaactcgtgttggatcataactacgttttgagaattgatgcaccattgccactgtaatattgctgtcctctaattaattttaggtactgaagaacttaatattggcaacatttttaaatccttactcatacacttgttgggagggatgtacaatgcatattcccaaactgtggaaaggacacctttttttatttgtaaaggtggaaaaactttggaactcattttgggctattcatgttaaatattcaacaccaatgatctactctgttcgcagttgtttatatctactcttcgcacactaaactttggtattttgattccttttaaccatttaagactacttttcttataggtagttgatattttaaaaactttagatttaatgtctacatgtgttagggaggaagaaaattgccttttaattgttaataagaaaaccaaatgtgatgaactgtagcccaagccctattctgcactgttcagttttatggaggaaaaataaatctaccataggaatgttagttaatattgatatatcatggtaaaattgatttctcactagcttagaaaatgtcagacttttgtttttggggtttataatttaaaccagctatgctattttttcataaaggcatttgtagtacacagaaaacagtagtttcagtagtgtaaaagagtttatacaggccttaaatatcagactttgtaacaggtagaaatattacagaataatttaagacactacaatgggggcaaatgaaataggaaaatttttagtgagttacacgtactcattacattttcagtgcttttacaaggaaaaaaggtgatatgtttaattttaaaattttaattggctagctcttgcccttatatgactttaatgtctgtgagtcattcccagcttaaattaacaattgttagtattagtctcacacataagtgccatacattttatcctcatggatgtgatgcactgaaaagttagttgctctccttttttcttttttttgtcgtgcatattttatttctgtagtttctggttagctaccctaaagtgatttaaaaatttagaatgctttgtgtttcctatttggtaatcttcattgacttttctttagttaatgagtattaaatagtgcatattctgtagactatagggtttacattgtgttgcatcttataacttgtatagattgagctgattgaaataagattttgttccaagtattatctgatagaatacaagatgattcaaaattatatagatatttaaagcttttctgctgttttttttttttttaattgcaactgcttttctgccgtgcctctcttccctacccaaaagtgatgagttctgaacaagacaagactgtcatattgtagagactttggtatgtgataccatagaatactgattggatagccatcctagtcacttaccaatactgactagaagttaactcttaattctaagctatcttaaaatgcatatatatacttcttgcatggaagagcaaaacaaattcaagttgtcatgcctgataatttcagatgccaccgtatagcaaagggtgaacatgttttcaaccctttaactttttacggtgtttgaagaccagctactccttaatatttatcaatggattaagaagtttaagattttgcagatttatcaatttgggtttttgtactgaagttgtcttgcggctttgcaagtgtccctttatatttaaatttgaaagttgtaagcactgatgttaatgtgattgatcagcatgggcatatgtaaaatgtccttttctggttgcctctctatgctattgtgttcagatacttacaccataattaaacagtaagttatagacttgctgagtttggcatagatagtgcactcatttaatctgtgcctctcaaaacttcagaatattagcatattaccacaaataatttttggtgaaactattgagatattaaaatttttgaaatcactactgttacctgttatagaaaatagtgttggcttagtctagtctctgtgtaactggttacattttgatggttgtctatactcaactggatatgtgtatgtaaattagaaaatacatacctatccagacataaatgctaagtaacatttttttcttcctccaactacataatttgtagctcatcatttttccttaatcctttcctaacttgttgcagcagtttgaatttcccagatatttatgtttgaacataatggctcagaatacatatttgaacatcatagttgtatatatttttaaagtagaataaataatggaaagcaacttgatatacaagtttatactaaaatttcaactgtgtgaagatacattttaaggcattactttgctaataatctacacattcttttttctattaaataaacaaatggtttgtggttcacagctttcatccaagcttggtgataatcaattttgaaaatacagtggactgaaaagcaaatttattctttcgaagatttcatttaaatctctgtactatgcatttttgtttcagtttgtaaatgtgtaacatttatagttaaataggacaaagcaggccctatgactattgttttcaaaaaattaatatataaataattcagaggggtttttcatttacttttgaaaagaaatttctttaacaggattgcacctatcaatttcttgtagaataaaaaaaaatctttcaacaaactgactttacttgtttctgtcaggatttaaatctttctaaagctccttataaacttaaagcctagagtacagttctgtaatgagagtgattatttatttggtattttattaaaatatctgagggactgtccaagaaagaaggtgaaagagaaataccacgtctgtactgcctaatttgtaaccttctctttgcattccttactgaaagtttgtgtaggtgaaaagcagttaaatcatcagttgctctaaagaggtcttaatttttaagtaaattacctttagtttgtatattac

SEQ ID NO: 365 - DNA, 8987 bp, Homo sapiens
  source 1..8987: mol_type = other DNA
ttttccccttaagacaaagcaagcaccctaaaccagttaccctgtgcactcctgttaagattgttgctaaggaaggacaggagttggctgctgaagcctcaagatttcctttaggctcttaggtaagaaatgtctaaggttcaaggaaaaaggttaagttggaagaatcccaggcaaaataagtgcgaatccacgacagttggtaacccggacccacattagaactcagaggtcaagcagaagcgaacgactggaattccagtcaggcccgccccctttccttacgcggattggtagctgcaggcttccctatctgattggccgaacgaacgcagcgcgtaatttaaaatattgtatctgtaacaaagctgcacctcgtgggcggagttgtgctctgcggctgcgaaagtccagcttcggcgactaggtgtgagtaagccagtatcccaggaggagcaagtggcacgtcttcgggtgagtgtgcggctgtgctggagcccgggttaccagctcttgcccgcgcggaataggctttaagaaatcggagctgcagccatctgtttttctcttaatgctgcatctctgttctcacggtggtccttggggtgaggttagagaaggagccgagggatcctgacaccacctccacagcaccggcgggcgaggtgccctactttaggcgtagccttctgcttttggagccagatgtctgtggacttctgttcgcgttcagaaatgccgcctcaaacttctctcaattgttcattaagtgaacttctctcattcccttcccctttgccgataattggaggggaaaagaagtaggaagcgggacacggtgtcctggggcaagggacttattacctaaaattcgcggccccttctgtccctaaaggttcttctccctgcccactttttggtctctttttagacctaggctgcccctgccgtcatgtcgcaagggatcctttctccgccagcgggcttgctgtccgatgacgatgtcgtagtttctcccatgtttgagtccacagctgcagatttggggtctgtggtacgcaagaacctgctatcagactgctctgtcgtctctacctccctagaggacaagcagcaggtaaaggaactggggagtggctggggcggaaagtgatatcctcaggccaataattgtccatacagggtagtatgaggtcaaagactagcaatcctaaaggtctgagatcaattcaaaattaagggcatttaggacaaaatggctatgaaaagaaaaaaagaaaaaaaaattaagggcatgacaagtaaaaaaaaaattgagttgtgtgtccagaagaactataatttgcattgcattaatgaaatagcctcaaatgcatgctcttagttaatctttcagggaataatagttatctctctttgccttgaggcccagttgtgctaaataatttgcacaaggtcatataggcattatgtaagtggaatgtatgttcaggttttaatagtatcaccatagcttcaatttgttgtaggtttcctgctaggccagggtttctcagttacagcattattgacatttggggctagacagttcttgtagggatctgtcctgtacatttcaagatgtttaatagcattcttggcatttacccactagatgtcagtagtgccttcccatttgtgacaatcaaaaaatgtcttcaggcacttcaggcattgctaaatggcccttggagtggaaatgaccctggttgagaaacactgtactaggtcctatgctaaacattaacatacattgtcagattttgtgctcttatagagtttctcttagagacttataaagttccatgagagcatggtccttgatgatgtctctcactatggactatcagagcttctcggttcctaggccatagtagacactctaaatatctgggttttttttgttttttgggtttttttgttttcgagatggagtctcgctctgtcccccaggctggtgtgcagtggcacaatctctgctcactgcaacctccgcctcccgggttcaagcagttctccctgcctcagcctcctgagtagctggaattacaggcacctaccaccaagcccagctaatttttgtatttttagtagagatggggttttgctgtgttggccagactggtctggaactcctgacctcaggtgatccaccctctttggcctcccaaagtgccgggattataggcgtgagcccctgcacccagcctctaagtatctgttgaatgaatgacataggtgctattattaaccccattctgcagatgaggaaactgaggccaagaatttcaagaactcataattcaaggtctcatagttactaagtcatggaattgggactcaaattcaagtgtttgcctctgctttgctttaatatcacatactaattttcataccagtcaataaattcgaactcagatcatcggtgtggcaagccacatttgcaggataatgacgagacagggaagggtgacaaagtagtaaaaatgtccatgtgggttggaatgattgtggaaccaaagagtagctgcacagagacatttgaggtgaaatggggtagtgttatcatagttcctagaaactactgtttgcccatttgctcagaggtaactgctgaaattaatctgtggttctgggctgggattctgccacaggttccatctgaggacagtatggagaaggtgaaagtatacttgagggttaggcccttgttaccttcagagttggaacgacaggaagatcaggtaagtgtctgagaagggaggattcaaggtgaaatgatgcagtacaaaagattcccaggaatgccttctgtgacaactgtattttctcccttctcagggttgtgtccgtattgagaatgtggagacccttgttctacaagcacccaaggactcttttgccctgaagagcaatgaacggggaattggccaagccacacacaggttcaccttttcccaggtatggagggtactggtttgtgaacaaaagaccaacatgtaagggcaactttattccctctttagagggaaagcttctcttcctgactgtgagttccttgtatatgcacacctacaattttgagggccctagttatgtgttagtcaatgtgtcaagtaacatatgtatatcagttctgaaaaattctattgttattatcattatttccttattttcctcacaaggatagtgtggctcaatgaatgtaatattgctgaagccatgtagctagtcactagtagagttaggacctgagtctagatccatgtatctccaaagcccatacttgtgggccattatattgccccattgtgtgtgcagcatcaggcctagggcatagcattccttaagtgtttgttgatttggtggaaagatggactagcagagagtgcttgagtcctcagtgtttagggaacagccagcagcattgcaggaagaagctgcttgagtggtctccagagccaaccactcaggaaggaatatatctgctggctctgcacaggaggcaagtgggagatgaaggagaggcctctaaaaaactgggtctctctctagatctttgggccagaagtgggacaggcatccttcttcaacctaactgtgaaggagatggtaaaggatgtactcaaagggcagaactggctcatctatacatatggagtcactaactcagggaaaacccacacgattcaaggtgagtagtaagccttcacgggattcctgattggctggtaatggtgttgtttttaccttttgagactctgagttagggggagaagggcacttgcctcagctgtccatctttcatatgcctccaggtaccatcaaggatggagggattctcccccggtccctggcgctgatcttcaatagcctccaaggccaacttcatccaacacctgatctgaagcccttgctctccaatgaggtaatctggctagacagcaagcagatccgacaggaggaaatgaagaagctgtccctgctaaatggaggcctccaagaggtaaagcattggtatccatggcagtgggggtagggggtacaaatctcggggaagttttgtgcttaccttctccctgtgcccctccaggaggagctgtccacttccttgaagaggagtgtctacatcgaaagtcggataggtaccagcaccagcttcgacagtggcattgctgggctctcttctatcagtcagtgtaccagcagtagccagctggatggtatgtaccgtgactgggctctgccaaaaaatagtaggaactcactccctgttcctaatagctgccaggagtacagaccagaggttgcaatctaaggtctgccttccaaggcccctgcaggccaaaagagaggtgaactgctctaggttgatgccctatacattggcttcttctccagaaacaagtcatcgatgggcacagccagacactgccccactacctgtcccggcaaacattcgcttctccatctggatctcattctttgagatctacaacgaactgctttatgacctattagaaccgcctagccaacagcgcaagaggcagactttgcggctatgcgaggatcaaaatggcaatccctatgtgaaaggtaaaggaacatggggaaagctggcatgaaccctggagggcaactggggagagactggcaaaagagttggatgttcccatcttacacccctctcctttggccccagatctcaactggattcatgtgcaagatgctgaggaggcctggaagctcctaaaagtgggtcgtaagaaccagagctttgccagcacccacctcaaccagaactccagccgcaggtgagtagattgtaagaataaactcttcactgtgttccaggaaacattagtcctctgcctggtcatggaaaatgtgcaatgactttttgtttttcttaacttccagtcacagcatcttctcaatcaggatcctacaccttcagggggaaggagatatagtccccaagatcagcgagtaagtttatccatttagaaatttgggcttcttggccataaatgatagttgggaaagcatggaggaggtcctcaggggaactatgtgttctccttctttgggtacagagattcttagtgggccgtcccctctccagaattatacaaagggccagaaggctcataacatgtgaggcccttatgtcagatcctgtgcatcattctaggctgtcactctgtgatctggctggctcagagcgctgcaaagatcagaagagtggtgaacggttgaaggaagcaggaaacattaacacctctctacacaccctgggccgctgtattgctgcccttcgtcaaaaccagcagaaccggtgagcttttgactataattcctgggctctgcaatttgctaagagacttcctggacaccactggggatggtgctaggatacccaaagggctggtgttctgctcacagctctattatctctgattctctgccaggtcaaagcagaacctggttcccttccgtgacagcaagttgactcgagtgttccaaggtttcttcacaggccgaggccgttcctgcatgattgtcaatgtgaatccctgtgcatctacctatgatgaaactcttcatgtggccaagttctcagccattgctagccaggtgagaagctagaggtgtgatgggtgtgcgcacttggaactggtaactctaagaaagctcctagggactacttatggagtcaagtaagatattttttttccctctagcttgtgcatgccccacctatgcaactgggattcccatccctgcactcgttcatcaaggaacatagtcttcaggtatcccccagcttagagaaaggggctaaggcagacacaggccttgatgatgatattgaaaatgaagctgacatctccatgtatggcaaagaggtgagaatacaagaaagctttagtgtagcagcttagtagctacacatttttccatggtgccttccaggtgggcttgtgccttctgagggcatgagcatctgatgacctctgacatgtgtgtctctcctaggagctcctacaagttgtggaagccatgaagacactgcttttgaaggaacgacaggaaaagctacagctggagatgcatctccgagatgaaatttgcaatgagatggtagaacagatgcaacagcgggaacagtggtgcaggtactagctgagtgacccctcttgctctgtcacctgagacagagggtgggaagtaaggagttaggtggagttgtgcctcaagatctgttccccaagttcactcctcagaaccttcacttacctctcttttctcctctgtttctgacagtgaacatttggacacccaaaaggaactattggaggaaatgtatgaagaaaaactaaatatcctcaaggagtcactgacaagtttttaccaagaagagattcaggtgagttgccctgagccagctccaattagctgctcagatttccatcactagcttgcctgaagtaaagagattttataaactactccagtaagggcaggaatatataactcccttttctctattccccatagtgctttgggttcaatctatgtttggtgaattgattaagggtttagttggccaggaaatcgtattaagtgctaacaacaggttttcaagggatcagtgtcacaagtgctttgtttgttcagtcatctgtcttagcaatatttttctggctctgcaaagaattgtgctctctgcttccctcttaggagcgggatgaaaagattgaagagctagaagctctcttgcaggaagccagacaacagtcagtggcccatcagcaatcagggtctgaattggccctacggcggtcacaaaggttggcagcttctgcctccacccagcagcttcaggaggttaaagctaaattacagcagtgcaaagcagagctaaactctaccactgaaggtgaggaaagagacaggcaggaaacataacagtggttcagggaagagctgttacttaaacccaggccttctaactcctgctctaacataatttcctaaactgcaagctacatccccctgacatttcaatctaggatacacatagcctcactttttatatttgctgcaagctactgttacctcagttaaagaggttagtccaaggctaaaaaaaccccacatattttaagtttcctgtttccttccctcagagttgcataagtatcagaaaatgttagaaccaccaccctcagccaagcccttcaccattgatgtggacaagaagttagaagagggccagaaggtaattaccaccattctctgtttaccaaactcttacctaaggcaatttcccacatccaacactctatcactggttcatgtgaagacaagatgttttttgtgcacagttctggagagtggctatttcactcagctgactagcctttctaattttacttctcttcaaatggctacctgacccctccagatcattatcctggttgctcttggccacaatatgattcctacttcccctttttcagaatataaggctgttgcggacagagcttcagaaacttggtgagtctctccaatcagcagagagagcttgttgccacagcactggggcaggaaaacttcgtcaagccttgaccacttgtgatgacatcttaatcaaacaggttagggcaaactatatacccacttctgtcctaccagcccactccagtgtatatgtgagaaaggaaagaggaccagaagaaaaaggtaaagatttttaggctgaatttatagtgagagcagtatatttgcaaaataaaaataactattctttgttaagcatttactaagtaccaggcactgtgctaagtaatttataggcattttctgtcacaaccaccttagggaggtagttactgtcatatttcatctaagatgctactgattataagaaaccattattttatgtactactaagaaaaaagtaacaatttctcatcagtaagatgcatcctgattccaaagagattaaaatgttaaaattgtgtatcttaaactaaactcaacatttaatttgacatttagagactgaggcacttagaaattaaatttactcaagctcatactaccttatgtgttagaagatgtcctattcagcactgcttatgttttgttctcagaaaatgtccccttattcagttataagctccgaccttaaagagttttaatctttgaagaaacagttgttagtaactagtaatggatggtatgtattacccttagccctctcgtttctctaatataccagacaaaagtgttttctataactttattgatcttccttaggaccagactctggctgaactgcagaacaacatggtgctagtgaaactggaccttcggaagaaggcagcatgtattgctgagcagtatcatactgtgttgaaactccaaggccaggtttctgccaaaaagcgccttggtaccaaccaggaaaatcagcaaccaaaccaacaaccaccagggaagaaaccattccttcgaaatttacttccccgaacaccaacctgccaaagctcaacagactgcagcccttatgcccggatcctacgctcacggcgttcccctttactcaaatctgggccttttggcaaaaagtactaaggctgtggggaaagagaagagcagtcatggccctgaggtgggtcagctactctcctgaagaaataggtctcttttatgctttaccatatatcaggaattatatccaggatgcaatactcagacactagcttttttctcacttttgtattataaccacctatgtaatctcatgttgttgtttttttttatttacttatatgatttctatgcacacaaaaacagttatattaaagatattattgttcacattttttattgaattccaaatgtagcaaaatcattaaaacaaattataaaaggga

SEQ ID NO: 366 - DNA, 3823 bp, Homo sapiens
  source 1..3823: mol_type = other DNA
cgcagaacttggggagccgccgccgccatccgccgccgcagccagcttccgccgccgcaggaccggcccctgccccagcctccgcagccgcggcgcgtccacgcccgcccgcgcccagggcgagtcggggtcgccgcctgcacgcttctcagtgttccccgcgccccgcatgtaacccggccaggcccccgcaactgtgtcccctgcagctccagccccgggctgcacccccccgccccgacaccagctctccagcctgctcgtccaggatggccgcggccaaggccgagatgcagctgatgtccccgctgcagatctctgacccgttcggatcctttcctcactcgcccaccatggacaactaccctaagctggaggagatgatgctgctgagcaacggggctccccagttcctcggcgccgccggggccccagagggcagcggcagcaacagcagcagcagcagcagcgggggcggtggaggcggcgggggcggcagcaacagcagcagcagcagcagcaccttcaaccctcaggcggacacgggcgagcagccctacgagcacctgaccgcaggtaagcagtggcctacgccgagggggaaccctttcgccaccatcctggcgtcctgtccttcaccgcaggagtgctcctggatcttagaatgagagccgggtttccctttcattcctcgcatccccagagtcatgtgttagagggatgccaaggaaccccacacagcccaccccctgccctcatccctagcggagcgcagaggaccgagcttttgttttggatggagagctctggagctgcgtgggtgggtggagggggagggcttgttttgatgagcggggctgcgccccccacctccagtaagacttgccttgccttgcttgccgcctgtccccaaggaaggaccgtgatccttggccgtggatgtcccggcagcccgggtttgggggcgcgcactagccgcggccatgggggtgctggcgggaatccctcgcccgcacagccgccgctgcggagcgctgcgagctgcagtggagggggattctccgtatttgcgtcagctgttgttgaaatgggctctgccactggtgcgggtccaggaacattgcaatgtgctgctatcaattattaactacctcgggagtcaatggtagccggcccggtctcttgcctggcagctcgggtcgtcctcgtcctccagtgattgctttccagtaaccaggcctcccgcttctctctctcctgccagagtcttttcctgacatctctctgaacaacgagaaggtgctggtggagaccagttaccccagccaaaccactcgactgccccccatcacctatactggccgcttttccctggagcctgcacccaacagtggcaacaccttgtggcccgagcccctcttcagcttggtcagtggcctagtgagcatgaccaacccaccggcctcctcgtcctcagcaccatctccagcggcctcctccgcctccgcctcccagagcccacccctgagctgcgcagtgccatccaacgacagcagtcccatttactcagcggcacccaccttccccacgccgaacactgacattttccctgagccacaaagccaggccttcccgggctcggcagggacagcgctccagtacccgcctcctgcctaccctgccgccaagggtggcttccaggttcccatgatccccgactacctgtttccacagcagcagggggatctgggcctgggcaccccagaccagaagcccttccagggcctggagagccgcacccagcagccttcgctaacccctctgtctactattaaggcctttgccactcagtcgggctcccaggacctgaaggccctcaataccagctaccagtcccagctcatcaaacccagccgcatgcgcaagtaccccaaccggcccagcaagacgcccccccacgaacgcccttacgcttgcccagtggagtcctgtgatcgccgcttctcccgctccgacgagctcacccgccacatccgcatccacacaggccagaagcccttccagtgccgcatctgcatgcgcaacttcagccgcagcgaccacctcaccacccacatccgcacccacacaggcgaaaagcccttcgcctgcgacatctgtggaagaaagtttgccaggagcgatgaacgcaagaggcataccaagatccacttgcggcagaaggacaagaaagcagacaaaagtgttgtggcctcttcggccacctcctctctctcttcctacccgtccccggttgctacctcttacccgtccccggttactacctcttatccatccccggccaccacctcatacccatcccctgtgcccacctccttctcctctcccggctcctcgacctacccatcccctgtgcacagtggcttcccctccccgtcggtggccaccacgtactcctctgttccccctgctttcccggcccaggtcagcagcttcccttcctcagctgtcaccaactccttcagcgcctccacagggctttcggacatgacagcaaccttttctcccaggacaattgaaatttgctaaagggaaaggggaaagaaagggaaaagggagaaaaagaaacacaagagacttaaaggacaggaggaggagatggccataggagaggagggttcctcttaggtcagatggaggttctcagagccaagtcctccctctctactggagtggaaggtctattggccaacaatcctttctgcccacttccccttccccaattactattccctttgacttcagctgcctgaaacagccatgtccaagttcttcacctctatccaaagaacttgatttgcatggattttggataaatcatttcagtatcatctccatcatatgcctgaccccttgctcccttcaatgctagaaaatcgagttggcaaaatggggtttgggcccctcagagccctgccctgcacccttgtacagtgtctgtgccatggatttcgtttttcttggggtactcttgatgtgaagataatttgcatattctattgtattatttggagttaggtcctcacttgggggaaaaaaaaaaaagaaaagccaagcaaaccaatggtgatcctctattttgtgatgatgctgtgacaataagtttgaacctttttttttgaaacagcagtcccagtattctcagagcatgtgtcagagtgttgttccgttaacctttttgtaaatactgcttgaccgtactctcacatgtggcaaaatatggtttggtttttctttttttttttttttgaaagtgttttttcttcgtccttttggtttaaaaagtttcacgtcttggtgccttttgtgtgatgcgccttgctgatggcttgacatgtgcaattgtgagggacatgctcacctctagccttaaggggggcagggagtgatgatttgggggaggctttgggagcaaaataaggaagagggctgagctgagcttcggttctccagaatgtaagaaaacaaaatctaaaacaaaatctgaactctcaaaagtctatttttttaactgaaaatgtaaatttataaatatattcaggagttggaatgttgtagttacctactgagtaggcggcgatttttgtatgttatgaacatgcagttcattattttgtggttctattttactttgtacttgtgtttgcttaaacaaagtgactgtttggcttataaacacattgaatgcgctttattgcccatgggatatgtggtgtatatccttccaaaaaattaaaacgaaaataaagtagctgcgattggg

SEQ ID NO: 367 - DNA, 20747 bp, Homo sapiens
  source 1..20747: mol_type = other DNA
ttcctcccctggactctttctgagctcagagccgccgcagccgggacaggagggcaggctttctccaaccatcatgctgcggagcatattacctgtacgccctggctccgggagcggcagtcgagtatcctctggtcaggcggcgcgggcggcgcctcagcggaagagcgggcctctgggccgcagtgaccaacccccgcccctcaccccacgtggttggaggtttccagaagcgctgccgccaccgcatcgcgcagctctttgccgtcggagcgcttgtttgctgcctcgtactcctccatttatccgccatgataagtgccagccgagctgcagcagcccgtctcgtgggcgccgcagcctcccggggccctacggccgcccgccaccaggtgaggaactgggaccttcccgaatggggtcacggcctcgggccttgggcctcgggcttcgctgcggcaggccgcgcgccctttagggtttgaattctccagtataggtcaggcgggaaggaaggtaacgggccttccatagttagcgctgccgggtcaagattttgcccaaggttttgcctccggcttgggccctgctgagtcacacccctcgcgatctagagtgtcatttcaaaattaccaggtagtggtcctcatggcctgttctgtggctgaatggaaaggtttggccttgggggtgagggatgcagtctattgggaaagccactattttcagttttatttttggctcctctacagaatacagagtgtgtaaggatcccgttgatacggtgaaataaaataagaaagctctgagtcggaactccagttttcgtgcttagcaacattttctcaaaatctgtggtgtaagattgtactcgtttgttacttcagaaaaaaaagcagatcgtggggcggagaaaaggctatggagtggttacttgttttctaaaataaaagacaaatgctttagagaacaggaattgtatgtgggcattaaggaaggcttggaaggagcctgaggttaagttgtaataaaggtcttttatcctagtgaaacgccactacttttcttttttctttcaaagacccttagtaactctagttcttttaaactaattgcacggcaaggtaaggggaagtgttttcccccaggggacatctggcaatgtctgtggatattttaggttgtcacttacttactggggtgcttattggtttctagggtgtcgaggccagggatgctgctgtatatcctacaatgcacagaacagcccccaccacaaaaatttcgcccaaaattaatagcgccacggttgagaaatcctactgtaatgtgattctaaggccatcttttatttaccttttttcgtcttacttatttgggaaactttaatatttactgttttagtagcttaatgtattttatatactaagtgagcccaagttttctctttttcctcccaggatacacactggttggtgactgagtcagttttttcttttttaggatagctggaatggccttagtcatgaggcttttagacttgtttcaaggcgggattatgcgtaagtataatatcatttcctttgagagggaatacatattaaacttcaaagcagtgttttctacatttgtgattattcttctctgtaattatttatctgtatttatttagagattatgtagtataccactgttaattttccaattaaatattatcttccagtgactttggtctatcaagataacaatagctgtgacactgttctaaatgtcttacagatcagaagcaatcaagggagcagttgttggtattgatttgggtactaccaactcctgcgtggcagttatggaaggtaaacaagcaaaggtgagcatgattgataactagtaccttatccagaatctgtccagaattctgtgctcttttccttagttaaggaatttgagaacctgatttgcgctttttttttttttttttttttttttttggagacagtctctatagcccatggtggagtgcagtggcacggtctccgctcactgcaacctctgcctcctgggttcaaacagttctcctgccttggccacatagctgggattacaggcatgaaccaccattcctggctaattttttgtattttcagtagagacagttccactgtgttggccaggctggtcttgagctcaagtgatccgcccacgttggcctccaaagtgctgggattacagatgtgaaccactaagcctggcctcgaagtacttccaactaaaacagcaaaaacataactatagatcagggctgaccgggcataatggctcacgcctgcagtcccagcactttgggaggccaaggggggtggattacctgaggtcccaagttcaagaccagcccggccaaaatggtgaaaccccgtctctactaaaaatgcaaaaaattggccgggtacagtggctcacacctgaaatcctagcactttgggaggccaaggcgggtggatcacaaggtcaagagatcgagaccattctggccaacatggtgaaacctgtctctactaaaaatacaaaaattagctgggcgtagtggcacacacctgtagtccccgctactcgggaggctgaggcaggagaatcgcttgaacccaggaggtggaggttgcagtgagccaagatcacatcactgtactccagcctgggtgacagagcgagactttgtctcaaaaaaaaaaaaagaagagactatagatcaggtttttcatacccaatgttgggacaagaatctttacttccacatggagaattatatctacttctaagttttttggggggttggccacagatatcaggcatataggaaaaatgccaagaagcccaaattagggccaagagaaggaataatctcttggtgccaaacaagtgggataagaagaccatagacagttcaggttatttcagaagaggagattggggggaaaggaagtatgaaagcaaaagaggccatgaatggaagaagcaagagtcaagaattccaggtgttctaaatcttgctaagaacccggtgggaataaaggttgcatgtacagagtaaggaggcttcaaaagaaatagcctgctccaatgaacaacatgcattacttcagagatgaagctccacttctagtctgtctctgcacacccaactttgtttcaatttagaaaatgcagcactttggtggttaccagagtaaccaaacagtgcaagccattcccacccctcttaatagtaaattagtagtcctacctctataccacatttaaatccttttctgggaagttagatacatacaattatcagcactacaaaggttcacctgacaagagtcttaagcaaccaaagcagtttttaaaatgtaaatcagggccaggcctggtgggtcatgcctgtaatcccaacacttggggaggccacttgagtgtgggagttgaagatcaccctaggcaacatagcaaaacactgtctctacaaaaaattagccgggcatagtggtgtgcccctgtagtcccagctactctggaggctaaggtgggaggatcagctgaggctggcaggtcaatgctgcagtgagccgtgacagtgccactgcactccagcctaggtgacagtgagactctgtctcaaaaaaaaaaaaaaaagccaggcgcagtgcctcaagcctgtaatcccagcattttgggaggccaaggtgggcggatcgcctgaggtcaggagttcgagaccagcctggccaacttggcaaaaccccatctctactaaaagtacacacacacacacacacacacaaaattagttgggtgtggtggcaggcacctgtaatcccagctactcaggaggctgaagtaggagaattgaacccaggacagggagtttgcagtgagccgagatcgcgccactgcactccagtctgggtgacaagagcgagactccctctcaaaaaaaaaaaaaaaatagtagtttgaaagtaaagggctaaagataccttaactaaatatctactgttcattaactatcagcagtaaagcatgcccggtagtattgttgatgtgcatttgtttcgcaatttgggagctgtttctgtgtcttaaatgattgctgcaaacataccagtaataggctgggcgtattggctcatgcctgtatcgcaacacttcgggaggctgaggcgggcagatcacctgaggtcaggagttcgagaccagcctggccaaaatggtgaaacccccgtctctactaaaaaatgccgaaaaattagcttggtgtggtggtgcacgcctatagtaccagctactagggaggctgagacagaagaatcgcttgaacccaggatgcggaggttgcagtgagccaagattgtgccattgtactccagccttagcgacagagtgagactccatctcaaaaaacataccagtgataactacaaacttactctctatcacattttgggagtttaggtgctggagaatgccgaaggtgccagaaccaccccttcagttgtggcctttacagcagatggtgagcgacttgttggaatgccggccaagcgacaggctgtcaccaacccaaacaatacattttatgctaccaagcgtctcattggccggcgatatgatgatcctgaagtacagaaagacatgtgagtaacagcaaaagttttttgcaaaaagcagttatttgcaagggccacacagaagagcctcagcatgttgatgaggatccctggagcaccttactttagtaattttacttattgtccctaggggaaatctgtaccactgccaaaagggtaatccctttaaaaaattcatttttggccagtgcagtggctcacacctgtaatcctagcactttgggaggccgaggtgggtggatcacctgaagtcaggagttcaagaccagcctggccaacatggtgaaaccctgtctctactaaaatacaaaaattagctgtgcatgatggtgggtgcctgtaatcccggctactcaggaggctgagacgggagaatcacttgaacccgggagacggtggttgcggtgagccgagatcactgccactgcactccagcctgggctgctgagactctgtctcaaaagaaaaaaattcatttttgtctttacagattaggtctttgctatgtattgacatgatacatgaaaatttgcaaagcattcctaaaccacatagttcagtgttgaatacataaggcagaaatggcataggttctatcatgtgttgatccagtacagaaaaagacttgatttttcttttttcttcccccctcccaatagaaacggggctcactatgttgcccaagttggtgttgaactcctggactcaactgacccttccaccccagcctcccaaattattgggattacaggcgtgagccaccatgcccagcctgcctttttctaaaatagacatactagaggctcggtggggtgactcacacctgtaatcctaacactttgggaggctgaggtgagctcaggagttcgagaccagcctggacaacttggggaaaagccacctctgcaaaaaatacaaaaaagagccaagctcggtggtgcgcgcctatagtcccagctactagtgaggcttgagcgttgaggggcggaggttccagtgagctgagatcatgccattgcactccagtctgagtaatagcagtgaaaccctgtctcaaaaaaaaaaaaaactagaagcataggtagagtttcctgttgtatacaaaatgttttaggcctagagcagtggctcatgtctgtaatcctagcactttaggaggcagaggtggaaagactgtctgaggctgagtttaagaccatctaggccaacaaggcaagactgtgtgtgtctctgtctatatatatataaactaaatatttttaaaaatttaaacagctttattgagcttgagtagaatatgaattctgtatgcatggagttgcgtggacctctatgactggcttctttcacttagcatgttttcaaggttcatccatgttgtagcatgtgtcagtactgcattcctttttatggccaaataatactatactgtatggacatacagcacattttgtttatccatttgtcaagtgatggacatttgagctgtttctgctttttggctattagaaataatgctgccataaacatttgtgtacaagtttttgtgtggacataaatatttccatttgtcttagagagtagaattgctggatcatacagtaacggtttcatcaaattattctaaagtggctgcaaaaatcttctgcctggggcgctaaataaagaatgttgaggtttcatcataatgtttttatatgttagtgattgctttctttttatttatttatttcattttgccttgtaattctcataaaccatgttagtgattgctttctaaagaatttcacaaactgtcatttgttggccatgaatgagtctcttggggtggaagatggatgttcatggtatgtggtaattttgtcatggtaagttgttcaggtagttttctctaatagaatttttgtgtcttacagtaaaaatgttccctttaaaattgtccgtgcctccaatggtgatgcctgggttgaggctcatgggaaattgtattctccgagtcagattggagcatttgtgttgatgaagatgaaagagactgcaggtgagtgggtttagttcacatctgggaaagttctaagaacaatgattcctgtgagatcactagctccctgtgctccagctcctgtagatgaatctgtggtcccttttgtatagaaaaactaggaatggcaaaactgtgttatacttcatgctttccctgcagattgaattaatcttcaaatctcactaatggtggctggcttgtttctttttttccagtagggggtaatgttctatattgaaagccacaagactacacattaagcttttgtccctgttaggtataaattagaacttcctatttgaagtggctgttgtaagtctaaaggtcattgtagtttagtgaaccttcactaaaatgttgaaagagtgatcttaggggtttctgttttttggggtttttttgttgttgttttttgagacagagtttcactcttgttgcccaggctggagtgcagtggcacaatctcggctcaccaaagcctccgcctcccgggttcaagcgattatcctgccctctccctcccccccaacgtagctgggattacaggcatgcgccatcatgcctagccacttttgtgtttttagtaaagagatgggggtttcttcatgttggtcaggctggtctccaactcccgacaaatcaggtgattcatccgcctcagcctctcagagtgctgggattacaggcatgagccaccgtgcctggccggccgatcttgggtttgtttgtttgttttgagacaagagtctcgctctgtcgcccaagctagagtgcagtggtgcgatcttgtctcactgcaacctccgcctcccaggttcaaacaattctcccgcctcagcctcctgagtagctgaaatgacaggcatgcgccaccatgcctgaataattttgtatttttagtagagatggggtttctccatattggttaggctggtctcaaaactctcaaccttaggtgatctgcccgcctcagcctcccaaagtgctgggattacgagtgtgagccaccgtgcccggcctgatcttgggtttttaaccagtgtatttacttggagtgtttcctgcaaggacatattaggtcacttaccaaaagactgaagaatgttgtctgtggctgcaaaaggatgacacaggttgttgggctatattaataattctgttctgacagaattccatgattgaatttcattcttttccagaaaattacttggggcacacagcaaaaaatgctgtgatcacagtcccagcttatttcaatgactcgcagagacaggtgaggtcaattagcattcttattcacaaaaagtaaggtgcctgggatggaagggtacaaaaatgtttttctctttgttttctctaggccactaaagatgctggccagatatctggactgaatgtgcttcgggtgattaatgagcccacagctgctgctcttgcctatggtctagacaaatcagaagacaaagtgtaagtttgtgcagtaaatttctcacctggatgtgtgaaactaaagtgtcacttaattttttagtaattgagccttttacagtgcttttactgattttaagtctgtattgtctttgttttttcatttcaaaaccattcttttcttttcttttgggccatggtaatttaactagtacatatctcagggaaatagcttagattatctgtatttggttattgaaatttatatcctggtgataggttttgttcttaaggatttcttttcttttttttttcacaaatcatttacagcattgctgtatatgatttaggtggtggaacttttgatatttctatcctggaaattcagaaaggagtatttgaggtgaaatccacaaatggggataccttcttaggtggggaagactttgaccaggccttgctacggcacattgtgaaggagttcaagagagaggtgagttaccaatgtggttaatatgtagacgttgggatattgagaaattctttgttcagattgctctttgctttgtttacgagttcagttcaacccccttattctagacacagatactcttttcagaatattttttttccctacacattaagggtaataaaaagtaattcatgcttatatataaaggtatgactccattttgtgttgttccaccttattactgcagtttatttatcacctcactaatgctggtgtttggtgttcaatgtcttcactttatagacaggggttgatttgactaaagacaacatggcacttcagagggtacgggaagctgctgaaaaggctaaatgtgaactctcctcatctgtgcaggtgagacacggaaaattcgagcagtcttgatggatattttcagccggagcttatttaaaataaatagtattttctaattggcctaatgtcagttgagttttttttgtttgtttgttttttcagttttctggtttctagagacctttgccatgagcacagggacagtaaggtctttagtttctttatgagctgaaatttttttagccactcaaatcagttacatatactggagctaaataatgtgtgaatgatgtgctgggtgtacttgtttgcctttcagttaaagacatttattttaaaacctgctctggcagtgtttaaaactagaattactagcttggaaaaactgctgtcttaactgacaatattaaataacctctctccttgtgaattggagagtctctgagtgtcttttttttttttttttttttttttttgagacagagttttgctcctgttgcccaggctacagtgcaatggcgtgatcttggctcaccgcaacctctgcctcctgggttcaagtgatttctcctgcctcgacctcccaagtagctgggattacaggtgtgcaccaccatgcctggctaatttttgtatttatagtacagacagggttctgccatgttggccaggttggtccttggactcctgacctcaggtgattgacctgcctcggcctcccaaagtgctgggataatgggcgtgagccactgagcccggctaattgtctctcacttaataatttgaaaaattagctggtcatagtctatacaactgtggtcccagccactccagaggctaagaggattgtttgagcccaggaggttgaggctgcagtgagccgtgatcacaccatttcactccagcctgggtgacaaatgagaccctgtgtcaaaaaatgacaataatttgaatcaccagtctagaaaaagagctgaagcttgtgcaagtttccgtctgtgagcatcagatttacacagcctctttgtcagtttggttagctccagttctgagaggtgaaacttgtcttcaccaccaagaatagaattatataaaccattttagatctgtgttagagacccatgaagatagaaagcagcagatctatttccggtgtcttgggtgacagcaggaaaagcagagcggtgacacctttattttgatcacccacaagggaagaggtatttatgatggttgtcactgtggttgctgctaatgaaccttcccctcaaacctggatttttttttttaagtggctgtgaggagtgacatagttatacacacgcatccatggtcttgctgatgttactttgcccctgctatcatggagtggcagaacattgcaacgttggttagggttgaggttgaaatacctggcactgccagaagataattcttcccagggatttgacatttggggtaggggatgcgaggtgttggaagagattggttggttttaattagtgtggctgcatcctattgatagacattttgattgttttccagtgtttattatagcaagatgtattgagcatccttacacattcagttttgcataggtgattttaaatctatagaataaattcttagcgtttattaccctcatgcagattatattgtggtttggaaagatggacattaattagaacagattagtaaacgttaaactagaagtgatacaaagtaaaggttaagggtggttctgcaagcattctgctggggttcaagtcccccttgtattgcttattaattggtgatcttggatgaattaacattactgttacttatctacaaaacaaggataatagtggtactcttcccctaagagttgtgagcattaccaagttcataaatattacatgcttaggaaaacataggaaattgtgaatactctaaatgtaagttactattaatgtaacaagtggtaaaaatgcagttacaatttaagaaggggcctcactttgggtggccagggcaggaatatcacttgagctcaggaattggggaccagcctgggcaaaatagtgagaacccccgtctctacaaaactagctgggcgtggtgcactacaccacaggtgcgtgcctgtagtcccagctactcaggagactgaggcacaagaatcttttgagcccaagtgtttgaggctgcagtgagctgtgaatgccactgcaccccaacctgggtgacagagcaggtctcttaaaagcaatctaagaaggggccgcacgcagtggctcacatctgtaatctcagcactttgggaggccaaggccggtgaatcacttgaggtcaggagttccagaccagcctcgccaacacggtgaaaccgtgtctctactaaaaatacaaaaattagccaagtgtggttgcaggtgcctgtaatcccagctactcagtaggctgaggcaggagaatcgcttgaacccaggaggcagaggttgcagtgagcccagatggcaccactgcagtccagtctgggtgactgaatgagactctgtctcaaaaaataaaaatgaaaaataaaaataataaaaataatctaagaaggtacctgagagaggtgttcagcataacaagaatagcatctgagagatgagtttatcagaaaaagataaatgggcatgtgtaatgggttaagagtaaggctctcaggtgaagacctgagaaagggccagagtggccaaaagggcagagtgaagattggggtcggttgttggtgggcatggaaaatgaggctagagcaggcttgtccaacctgcagcctagaatggctttgaatgtggcccaacacaaatttgtaaactttcttaaaatactgagggttttgttttttgtttttgttttaagctcatcagctattgttagtgttaatgtattttatgtgtggcccaaggaagccaaaagattggatacccttgggctagaggctttatagatttgggatttggtgtctctccctagataagtgaatacaaaccccagaggagttgaggatagtaacatggtcatgtgtcgatttgtgaaaagccctttggctggagtagagtggagaattgtgaagggcagaaggcaccctgagtgggtgtaggggggctgttggtaaccatgtgttgagaaaagacttggatgagagtgagagtaagacacaagtgattgggtttgagagaggagggtaaggaaagaacattgtgatagatgttggactggttgtagagggttgagagttagtgctggagattttcaggttgccattagcttttagtgtttagagtcgtgctactataatagccaaatatgggttttgaattaattaaaattaaataacatttaaaattacatttctcagttacactagtcttatttcaagtgctcagtagtcatgttagtggttgctgaattgagcagcataaggagcattttcattgtcacagaaaattctactggatagcattgatttagataattctgtgttctgatttggttaatcaacattttgcaaaaaagaaattgtcaataatatttaggtatcactattctacagatggtgtgttaactctatttattaagtattcaaatgtttaggatacttctcctgaagaaaggtggttaaggactcactctcagttacacactgtaagatcccatgttgtactgggatttgggatttattaaatactggatattacatggtgtgactgtcagctgctctccatggatgtgatggccatacaagtcagtcctcatacattaatgagagcatgtctgtagctttcgtatcacttgtaaacgtcctggaacttacagagcccagggttaatggcatgttatttggttcagaacataactttgacatttctcttcacctacatgggatatttttaaaacttggtgaaggaaaacatcagtagtgtggttctaatgaatatgtagtggcagaatagttctttatcttctgaatggggatttttttcctgcttatctgctgcattcttgttaataactataaactttattaaaacattctatagtgcttatctctggggagataaaacattgtttttttgtttttttgagacggagtttcactcttgttgcccaggctggagtgcagtggcacaatctcggctcaccgcaacctccacctcccgggttcaagcgattctcctgcctcagcctcccaagtagctgggattacaggcatgtgccaccacgcccggctaattttttttgtatttttagtagagacggggtttcaccatgttagccaggatggtctcgatctcctgacctcgtgatccacccgcctcgccctcccaaagtgctgggattacaggcgtgagccactgcacccggcaaaacattgcatcttaaagagtaactattcttggccgggtggggtggctcacgcctgtaatcccagcactttgggaggctgaggcaggcggatcacgaggtcaagagatcgagaccatcctggccaacatgctgaaaccctgtctctactaaaaatacaaaaattagctgggcatggtggcacatgcctgtagtcccagctacttgggaggctgaggcaggagaatcgcttgaacctgggaggcggaggttgcagtgagccaagatcatgccactgcactccagcctggcgatagaatgagactctgtctcaaaaaaaaaaaaagtattcttggtgactattcatttaaattagatctcaccctccctttggttttgcaagtcttctgtcctagggcatggtcatattttagttgaaataataaatgtaaccgtcatttggcctgctcgctgacatgcaattaaacatttcctttgcagactgacatcaatttgccctatcttacaatggattcttctggacccaagcatttgaatatgaagttgacccgtgctcaatttgaagggattgtcactgatctaatcagaaggactatcgctccatgccaaaaagctatgcaagatgcagaagtcagcaagagtgacataggagaagtgattcttgtgggtggcatgactaggatgcccaaggtatggaccagtggaattctgtcgtggagagagagggctggcgcatagtgtattcttgggacaggtggcacaaatatatggcccattctgctggggtgacctaaaagggagatgagattatatactcactaaagaattcttttctgtttgttttgttaaaattgaaaaataggctgggcatggtggttcacgcctataatcccaacacttcgggaggctgaggcgggcagatcacatgagtctaatttatatatatatatgtatgtatgtatgtatgaaaaattagggaggggcagaatttctttaggggcagtagcagggaggatcccgaactcagtcatagaatttttaggattgaaacaaagtttgaggtcagaggggaacataaaaccttggtaataccccgcccccggccaccatctttgtacatgtgtctttgcagcttagtgcatctctttgacaaagatttgtgcaatgatgtattttattcaacacatcattctgaaagaacgtgtggaaaactaatgactgagcacaaacctgttgaagatgcagttcttcttggtagcctaaataggattatcttggacctaagatagtgaccttgttttttttcttaatttttccattgaaatacatggccttaaggaaatatgcaaaaaaaaaaaaaatgaacctggaaaaaaaaggtcctggaccaggtggatgcctcatatattaagaaatccccgaggccgggtacagtggcttacgcctgtaatcccagcactttgggaggccaaggcgggcggatcacgaggtcaagagatcgagaccatcctggctaacacggtgaaaccctgtctctactaaaaatataaaaaatttggtgggcgcctgtagtcccagctacttgggaggctgaggtaggagaatggcgtgaacgcaggaggtggagcttgcggtgagtggagattgcgccaccgcactccagcctgagcgacacagcgagactccgtctcaaaaaaaaaaaaaagaagaagaaaaagtatccccgatactattcaaatggaactttatcactaataaacacaagggaagaccatgccccatgttagcaatgcaaattattgctacagctgcctatgataatttggtctttagttgataatatacaagagaatgtggacttctaagtccccttgccttgcatcctctgtttcaaatgatttaatgtgttgtgtaggaaagcagataataaaacttaggagaatccttcccagatttacaagggtcatgaaggagatacttctataggtataaagtgtatgagtgttagaagatcattagcaggaacccaagtacgaaatggttatttgaataaacattctcagatttgagttagcctgtcttgagatctggctgggagcgtaggacacgtgctcccttttgttctgctcaggtagttcccaagtgtgggccgacaggttctttttccttgatgttcaggttcagcagactgtacaggatctttttggcagagccccaagtaaagctgtcaatcctgatgaggctgtggccattggagctgccattcagggaggtgtgttggccggcgatgtcacggatgtgctgctccttgatgtcactcccctgtctctgggtattgaaactctaggaggtgtctttaccaaacttattaataggaataccactattccaaccaagaagagccaggtaagagccatcacttcctaccttgtcacatgggttttaggttctatgacggatgtaattgcagccactttcatgagttttttctagaaaacttcatttttatctgttttacagtttagaatattaaacagttaactgtgggtggtgagaatcctgtgttttgttttttgtttttttgttaccagaaaagttcttacatgttagctggtagtgatgattataagaaggacatcagtagtctcctccacaggattaacataatttgctaaaagggatctcagtcatttgagactgaatttcctgtagtcttctgttctcaaagacagtaaaaagggtagtctggaccagacttaggggagtgttcttatcttatggatgaatgaagggggtggtatgagggtgccgagataccaagcagggctacttggacatggcttgttcttgaagtaggaattatttctggctgggcaccgtggctcatgcctgtaatcccagcactttgggaggctgtggcgagaggattacttgagctgaggagtttgagaccagcctgggtaacatggtgaagctccctctctccaaaaagttaaattagccaggcatggtgctgtgtacctgtagtcccagctactcaggaggctgaggtgggtggatcacttgagcatgggaggcagaggttgcaatgagctgaggtcatgccactgcactccagcctgggcgacagtatgaagtgaggtcttgtctcaaaaaaaaaaaaaaaattatttcctgacttacccaatcttgtgatgtttttccataaaactatggttgttggtatatttgtgccgtgatgtatttgtcaacacatcactctgaagaaaagtatgtggtgactttctgtgactgagcatgatacatcttctttctctgatcccgtttccccagatgagcatgtttcaacattttagttccttttgaggacttctgtcctaatgctgcgtctttgtacaatgcatttgcttagctgaaacagttgctattgtatgcccatttgctgtactaatcctacttctattccctataaagacatcagcctttgttctgaacataccgtaaattaggagtcttccagtcttggaatgtaaacctttggctttcattttttctatagaaatggagtaggttaatcacattgacaacccaggagggtttcttcttccctaggtattctctactgccgctgatggtcaaacgcaagtggaaattaaagtgtgtcagggtgaaagagagatggctggagacaacaaactccttggacagtttactttggtaggttattgtgaatcctgaatactatgcctccttcactgtaaagtgagataatattctaagccataaaaatattagtataaactgctggcatacacatacatactgagtagtcttgagaagaagggatgcaactagatacccatggcatcagtttttacctgaaagccttgctttttccttgtgccttaggaatttcctcagaaataaactcctgattactcatttaaaagacatttgatattgttactggtttctgatcagcattgcttattggttattggtgaggtgaataataggagatttgctatctgtcatttagtgtgtccacaggtacatacagccattatggttacttgctatagctaaacttcactggtataaaaccagttgatttcaggcagcgaactactactgttgcttataaactttgtgttttgtacattaaatcacttgtttctcccaggaaccaagtgacttgtttactagaaaaccatatagatttggaaataatagcactggacccctctgtaagaggaccttactctggatattatttattttagattggaattccaccagcccctcgtggagttcctcagattgaagttacatttgacattgatgccaatgggatagtacatgtttctgctaaagataaaggcacaggacgtgagcagcagagtaagtcaccttgtttatcagaccctaagagtgaggtgagggaggtcttgggaatagaccctcttagaatgatgagtcctctttgcccctcagttatcagatttacttgtacaagtgtaatgtttattccccacaaacaggcactgagcctgtggattgctgaagttttgatgggcaaacaggccagttggtgtttgtgtatatattgggtccttggtttcattttgctttataggactatagggtatttctcctcttcataatttgtatcaagattggctgctatgagcaggagtactcttaatgcaatggaggaagaagaggcatataactttacctgggaattaatgaaatgccttctgtttactacagttgtaatccagtcttctggtggattaagcaaagatgatattgaaaatatggttaaaaatgcagagaaatatgctgaagaagaccggcgaaagaaggtgattacttcttgtcttctgaactttaatcttagtaaagctcagtcttgacagtgggagtttggggctgggcgcagtgtctcactcctgtaatcccagcactgtaagcccactgccaaggtgggcagatcgtttgaagccgggcgtggtggtgcacgcctgcagtcccagctacttgggaggctcaggcaggagaatcgcttgaacaagaaagtgggagagtttggacatgtcataggttgtgggtaagagaaaacctaagataatctattcttccttccccgttgtttataccttatgtttgcagtgcctttattatttcttctgttttccctgtcacaattctgatgttacaaaatctagcccaaatctctctcaaagccatcccagactctttcatgccactctgatttctccctcttactctatttttatctgtaactgtatgtaacacatagcttattgtctgagtatagacattcagcaaactttggttgattggaaagtcttcgtttaaacttctaatttctctaaggaacgagttgaagcagttaatatggctgaaggaatcattcacgacacagaaaccaagatggaagaattcaaggaccaattacctgctgatgaggtgagttctattttaaagtaactcaagaggttgaacacatttttaccaatgccagtgaagtttatttttctgtgggttttgataggggtttaattattttaaaatgtttctaaatagtacttctacttgtaatggtacaggagacctggaaaagtaaggatttttgttttctttttttaagtgcaacaagctgaaagaagagatttccaaaatgagggagctcctggctagaaaagacagcgaaacaggagaaaatattagacaggcagcatcctctcttcagcaggcatcactgaagctgttcgaaatggcatacaaaaaggtacaagggctgaagtggattttgattctaacttgatctggatggaactgttcttgatgactgtcactggtggctccctccatagccatttgtggaatttagagtgagattagagttgggagatagtctcctgccgtcttgactctactttggcattggagttagtgtcaaagggaaggaatccagaaaccaccagtagggtagaaagtggggagggggagtggaatagaaatgaatgatgaggacatatgtgggtccctcatcttggagtgcaacaaagagcaaatggttagctctaacgttaaatctgagtggctctcaaatgttttcttaacagatggcatctgagcgagaaggctctggaagttctggcactggggaacaaaaggaagatcaaaaggaggaaaaacagtaataatagcagaaattttgaagccagaaggacaacatatgaagcttaggagtgaagagacttcctgagcagaaatgggcgaacttcagtctttttactgtgtttttgcagtattctatatataatttccttaatttgtaaatttagtgaccattagctagtgatcatttaatggacagtgattctaacagtataaagttcacaatattctatgtccctagcctgtcatttttcagctgcatgtaaaaggaggtaggatgaattgatcattataaagatttaactattttatgctgaagtgaccatattttcaaggggtgaaaccatctcgcacacagcaatgaaggtagtcatccatagacttgaaatgagaccacatatggggatgagatccttctagttagcctagtactgctgtactggcctgtatgtacatggggtccttcaactgaggccttgcaagtcaagctggctgtgccatgtttgtagatggggcagaggaatctagaacaatgggaaacttagctatttatattaggtacagctattaaaacaaggtaggaatgaggctagacctttaacttccctaaggcatacttttctagctaccttctgccctgtgtctggcacctacatccttgatgattgttctcttacccattctggaatttttttttttttaaataaatacagaaagcatcttgatctcttgtttgtgaggggtgatgccctgagatttagcttcaagaatatgccatggctcatgcttcccatatttcccaaagagggaaatacaggatttgctaacactggttaaaaatgcaaattcaagatttggaagggctgttataatgaaataatgagcagtatcagcatgtgcaaatcttgtttgaaggattttattttctccccttagacctttggtacatttagaatcttgaaagtttctagatctctaacatgaaagtttctagatctctaacatgaaagtttttagatctctaacatgaaaaccaaggtggctattttcaggttgctttcagctccaagtagaaataaccagaattggcttacattaaagaaactgcatctagaaataagtcctaagatactatttctatggctcaaaaataaaaggaacccagatttctttccct

SEQ ID NO: 368 - DNA, 27888 bp, Homo sapiens
  source 1..27888: mol_type = other DNA
aagtcacttccgggctggggtgtttgtttggactggagaagggaggcggcgggcgaagcgcacgtcgagcgggggagcggcgctgcctgtggagatccgcggaggccgacaggattcgttggctgccgtccccgctgctgtgcattgggtgaggggtcctctcgggcagagtggcgacaggggtgcggaggtcgagggacagcaagtcggcgacggcagaggggcctaaagggttccctgggtggttggccaccgagtccattgcggcctccgttgttcattgcctctttccaccaagtctgagggatgagcttgggccgacttcgtctctgtcttctccgagacatggccgtcgcttttttttcattgtcattattaatgatttggatctcgcagctctctatccgggtcctcagtggcgcgagggttgccgggatagcactttctcctgttcctcattctcccggtcctttatccctccgccgggtaccctttcccctgcccccctcccaccgcctcggcaacaaagcttattgtttctacccactttacgcctgcgcgtcgccacgcgcagcccctacttgctgcgcgtgcgcgcctcagccgaggctggggtttggggagagaggggcggagggactggcgggctcttggcgtcttgggggaacgctgcaaccgtcgacgggcctgatcagaagatcgtctttctcccgtttcttcgccatcgctaccccttatttttggttgtattgcagctcatgccctggaaaaaagaacctttggggtactgggaacccttaccctaggagggcgttgagttagatgaactttaaggtcctcttaccttttaataattttctgtgcttactctcctccttccccaccatcgccaccagaaataaataaggcttgtggtgaacttaggtcttcaaaacatttgttgcagcagccagcagtgatattttttagggactcctaaaaggggtcttacctgcttccttttgtttcttttttccctgatttggcacccgtatcaactcataaaaaccccaaactctagaaagaatttggcttccaatttgccttggaaggtgtagcagctgacagcctttgacgtttatttcaacggaaagtagatgttcatgttgggtgtgctggctaatgttgaaacgtggtggcattgttttttcacagatttcattagcacagttagatcaggtgttggtttatattttcattaagtcgcttttgaaatttcttctggcgtaggttgtgtttgcaataagtaaaagttctctacaataatttttaatgagactccactatttgcttttgtgattctgtttccagttagtgaaagacaggatatttggggaaaattagtctgtttatactacttgtcagttgtgaacttgaataaaactttttcacacacacacaaaatcacaggataggtaacttgacaagaactatagaacccacttgtgtttctttaagggatggaggttagggaatggagatttcctctaatgattcaaggctgtgcacgttgctccttaggaactcaaattgaggtaggtaatttcaccctcttttggtcagaatgagtttatagcaggcttttccttaaataagcactctgcactttattcaggtttatcactttatgactctagagtgtgatgctccagttttagtgaaaaacttgaacacttagcacagcaatttggttgatactgtgggagattaaagaatgtggaaggcaagacctctgcccccttgtaatctaataaccttttgtgcttttaaaacattttcttgtaatttacatcctattgtcattcattatcatgaaacgtgaaatgggcagagcaagtttttttttttttttttttttgagatggagtctcactctgtcgccaggctggagtgctggagtgcagtggcgcaattggctcactgcaacctccgcctccccgggttcaagcgattctcctgcctccgcctccctagtagctgggactacaggcgcttgccaccacgccggctaattttttgtatttttagtagagacagggtttcaccgtgttagccaggatggtctcgatctcctgactttgtgatccgcccccgtcggcctcccaacagagcaagttttatcttgcccatttgggaattaaagaaatagaagcctgaaagattatttttatttagcaaatatttatataacaataatgccaggcattgttctcattgcctttacaaatattaactaatttgatccacaacatagctagaaggtaggccctactgtaaaatgaagataacaaatgagacgtgaagtaactttcccaatgtcacagagctatgatagtcggaattcaaatccagatagtccagagattctatgctcttaaccattatgtggtgctgtgtgatttagtgacaggtctagggtactttaaggtggctatgtagcatagctgggatttgaacctacgtcttctgactgtggtctaagattaaagttgtccaagtcattgcctttgtgatctagaccacctgttgcacaggtgcatgaatagtttgcatttgatataggctaaggttcagttccaaaaaactcccttttttcttaattttttcattgtttagagtggtgctgtccaatgatgtaggtactgtgtgtggttatgagcacttgagatgtggctagtgtaaatgaagaactaaattttaattaaatagatctgtgtagccgatggccaccatattggatgggcacacgtttggagaatttgaatagcctctgcttcttatatcagtttgtataaatttgggtggcatttctaatgtacttgagcttttatcagttaggatgacccattcttgctctcacctaattacccttgttacactacagttgagattagggtagactttgggattttcttgtgacattgtttcacctctgtagatttaagatctctaatttttaccttgtcccttggtctagagacctttaactgccctaaatatttaatcaccgagatagttaatgccaattgttatgtgctaggttctctaactaggtactattattaattcccatgcaacagatgaggaaaccgagactcaggttaagtaacttgccatggtcacacagttagtaaagcagcctggttccagagcccatgggtttttgttgttgttgttgttgttgttgtttttgaaacggagtcttgctctgttgcccaggctggagtgcagtggcgcgatctcggctcactgcacgctccacctccagggttcatgccattcttctgcctcagcctcctgagtagctgcacccgacaccacacctggctacttttgtttttgtatttttaatagagacggggtttcaccgtgttagccaggatggtctcgatctcctgacctcgtgatccaacggccttggcctcccaaagtgctgggattacaggtgtgagccaccgcgcccagcccagagcccatgttttttaatcgttaccttactgtgccaaatagtaaaacaaaaaattcggtgcttttcacagacttcagagtggaaaacagaccaattgaaaaatgttgcgatcctctttaactgccaaaggaagtatgcttaaacgtatatatgcgtaaaatacgattaaaaaatatgcaaataaggtaaggatcacagtggttcaaaacagagtccaagggaatgagaaaagatggtgcctatggaggtagattaatgaaagaaacagaagagaactatgcttgaatttttttttttttttttttgaaacggagtcttgctctgttgcccaggcctgagtgcagtggcatgatctcatttcactgcaagctccacctcccgggttcatgccattctcttgcctcagcctcctgagtagctgggactacagacgcttgccaccatgcctggctaattttttgtatttttaggagagatggggtttcaccgtgttagccaggatggtctcaatctcctgaccttgtgatccgcccacctcggcctcccaaagtgctgggattacaggcgtgagccaccgcaccaggcctatatttgaattttaatgagaattcttaaaagatgaaactagtggagaaagattgtaaaacctaaaagatttctgtattttaaaattccatagacaatataaaaggacactgctggaaaccaatatgtctaagaggcatttcaggaggggaaaaacagctgaagacacaataaagccctaagttgataaattgaaagggtttgctgacttccaggcagtagtactgggaaaaaattgctcttacctatccaaaatctggtgaaatatatgaatttgttaaaacatcttaagctgtcgtctagaacaggatttttaaatttttatttatttttttgagacggagatttgctctgtcaccaggccggagtgcagtggcgcaatcttggctcactgcaacctccgcctcccaggttccagtgattctcctgcctcagcctccccagtagctgggactacaagcatgtgccaccacgcccagctaatgtttgtatttttagagacggggtttcaccatgttggccaggatggtctcaatctcttgacctcatgatccacccccttggcctcccaaagtgttgggattacaggcgtgagccaccgcacctggcctatttttattttttgagatgcagtctccctctgatgctcaggttggaatgcagtggcaccatctcagctcactgcaacctctgcctcccaggttcaagcaattctcctgcctcagcctcccgagtagctgggactacaagcgtgcacctccatgtccagctaatttttgcatttttagagacggggtttcgcccaagttggccaggatggcctcaatctcttgacctcgtgatccaccccctttggcctcccaaagtgctgggcgtgagctgctgcgcccagcttatttttattttttgagatgcagtctcagtctgttgctcaggctggaatgcaccatctcagctcactgcaacctctgcctcccaggttcaagcagtgctcctgcctcaggctcccgagtagctgggactacagctgtgcgccaccatgcctggcttagtttttgtattactagagatggggtttcaccatgttggccagggccggtctcaaactcctcacctcaagtgatccacctcccttggcctcctaaagtgctaggattataggtgtgagccactgcacccagcctagaacaggatttttaaaaggaaagaaaattgattttctacaacattgaaagttggaattattgacaatagattatcaacaggaagcacagacatctcagaattctgttacaactaattttttttttagcacatttacatggaaatactcatgttacaactttttttttttttttttttttttaagacacagttccgctctgtcgcccaggctggagtgcagtggcgcgatcttggctcactgctacctccacctcccgagttcaagcgattctcctgcctcagcctcctgagtagctgacactacaggcgcccaccaccatgcccggctaatttttgtatttttggtagaggcaaggtttcaccatattggccgggcttttctagaactcctgacctcaaatgatccacccaccttggcctcccaaagtggtgggattacaggcctgagccaccacgccaggccatacaacatttttattcaaacatgaaggcaaaagatgttttgtagcattaggagatacacctaatgctaaatgacgagttaatgggtgcagcacaccagcatggcacatgtatacatatgtaactaacctgcacattgtgcacatgtaccctaaaacttaaagtataataataatttttaaaaaactgtggtacatccataaaaaaaaaaaagatgttttggacactggcttagaatgataaatcctcaggtagccttttgaactattttacaaagataggaagttaggggaagatgatgaatataagaaacaactcggccagtgtggtggctcatatctgtaatcccagcacttcgggaggccgaggtgggcggatcacctgagttcaggagttctagacgagcctggccaacatagtgaaaccccatctctactaaaaatacagaaattagccaggcacaggcatggtgttacacacttgtaattccagctactcaggaggcagaggttgcagtgacccgagatcgtgcagctgcactttagcctgggcaacagagtgagactccatgtcaaaaaaaaaaaaaaaaaaactacgagtgatgaatttatttatttatttatttatattttttgagacagggtcttgctgtgtcacccaggctggggtgcagtggcgtgatcttggctcactgcagcctctgcctcccaggctcgagcaattctcctgcttcagccttctgagtagctgggacaacaggggaccaccaccaagcctggctaatttttttttttttttttgagacggagtctcactctgtcgcccaagttggagtgcagtggcgtagtctcagctgactgcaagctctgcctcccgggttcacgccaatttcctgcctcggcctcctgagtagctgggactacaggtgcctgccaccatacttggctaatttttttttgtatttttagtagagatggggtttcaccgtgttagccaagatggtctagatctcctgaccccatgatctgcccacctcggcctcccaaagtgctgggattacaggcgtgagccactgtgcctggccacgcccagctaatctttgtatcttttttttttttttttaaagtcagagtttcactcttattgcttaggctgaagtgcaggacacagtcttggctcactgcaacctctgcctcccaggttcaagcaattctcctgcctcagcctccccagtagctgggattacaggtgcctgccaccacacccagctaatttttgtatttttagtagagacggtttcgccatgttggccaggctagtcttgaactcctgacctcaggtgatctgcctgcctcagcctcccaaagtgctgggattacaagcgtgagccactgtgcatggcctgagtgatgaatttagtaaaatataaatggatgataatgtgtattgtcaagtattcaattcaaaaattattttaaaacatagtaagagaaaacctaatagtaggaatctaccagtgctaacttccacaaaactgaagattggggagggaagaagtgtgtaagtaaaataattttaaagggcttgccttggctcagagtaagcattgggttgggtatattggagaaggaaaggcattctaaatggatgtatagagttgttttttgctgttgttgttgttgttgtttttctctgagacggagtctcgctctgtcgcccaggctggagtacagtggtgtgatcttagctcactgcaacctccgcctcctgagttcaagcaattctcctgcctcagcttcctgactagctagaactacaagctcacaccaccatgcctggctaatttttgtatttttagtagataccgggtttcgccatgttggccaggatggtctcgatctcctgaccttgtgatccacgcgcctcagcctcccaaagtgctgggattacaggcatgagccactgcctcctgcccttggagtacatttttaattgataggaaaatagttaaagttattaagtgtaggaaaataaacgctatagaaaagaaatagttaatagaacatttgaaaaagcataagaaaagtaaacatgaaattattatgaaagacataaaacgaaacatcagttatcaaaaatgttaattcctggctgggcacagtgtctcacacctgtaattccagcactttgggaggctgagataggtggatcacaaagtcaagagattgagaccatcctggccaacatggtgaaaccccgtttctactaaaaatacaaaagttagctggacatggtggcgtgcacctgtgatcccagctactcgggaggctgaggcaggagaatcacttgaacgcgggaggcagaggttacagtgatccgagattgcgccactacactccagcctggcgacagagtgagactctgtctcaaaaaataaaaataagaaataaaagttagccaggtgtggtggcgggcgcctgtaatcccagctactctggaggctgaggcaggagaattgcttgaaccctggaggcagagactgcagtgagctgagatcgcgccactgcactccagcctgggcagcaaaggcgagactctgtctcaaaaaaaaaaaaaaaaagttaattccttatgagacagaaattctcagactgggtcacatattctatctactgtagtagaggacttggataaaccactttcagaattgaccagattaagtaaaaaagatgagtgtaatatatacatcattcttgtactttagaaatagaaatcacaggccaggggcggtggctcatgcctgtaatcccagcactttgggaggccgaggtgggcggatcatgaggtcaggagttggagaccagcctggccaacatgacaaaaccccatgtctactaaaaatgcaaaaattagtgtgtcatggtggcatgcgcctgtagtcccagctactcgggaggctgagacaggaaaagcacttaaactcaggaggtggaggttgcagtgagccgagattgtgccactgcactccagcctgggtgacagagtgagactctgtctcaaaaaaataaataaataaataaataaaaaattgaaatagttgaggttgaaagatcatacctgcaacttatcaaatggttaagcaaaaaaaaagaagaaaaaaatagagaaaacaggcaaaagactgatgaatctagatgaaaggtttgtgctccttgtcctctttcagtttttgatattggtatagaaatacacaattacagaataaagaatctcagaatagattcagacaaatgggaattcaattatgataaacatgaggaataagctttcattagtgggggatgatgtaatttatatggagaaatatagatccttcacatattcaaatgttcacatgaactaaagatttaaatataaaaacttgaaactataaaaatattgagagaaaatacaggaaatataatctcaatgtgggaaaagacttcccagaagctgtaaaggaaaacaaatgtcatttttagctcatctgattgcaaaaataaaatacaatacatatataatatctgggattgttgaagatgcagcaaaatggatgcacccaaacagtataataggaatgcgtattgccacatttttataaataatctgtcatctcttacagttaaaatgcaatggcccttgacacagttattcccacttacaggaatatatcctatacgaagcactactaccttgtctctactaaaaaaaaaaaagagtgatcatagcaagattgtgtgtaatggcaaaaagtgggaacataaatgtacatcagaagggggtggttgaataagtggtgttgtatccattaaaaagtgaagtataccaatacctgttgactagggaagattttatgtaatgtatttaatataattctgttaaaatacagaaatgctttatgtgtgtttatataaacaaagaattatgaaaggatacatattaagctgttaacattgatgaattacctctatgataggatcggagagggaaaaactatatacgctttagacgtttgtatacctaactttttttctttttttttgtaagtagtgtgtactttttacattcatccctgtcactctttttttgagagatggggtcttgctgtatcacccaggctggagtgcagtggtgcaatcatggttcaagtaatcctcctgtctcagctttccaagtaattgggtctacaggtgaacaccaccatgcccagctaattaaaaatgttttttgtatagatgggctcttggtatgtttcccacactgatcttgaattcctgaccccaagtgatcctcccgcatcggcctacacttcaatgcttgctttcctaacaaaattgatcctaaatttgtgcaaagaccctgctgtccaaaaattttcaaatgaatactgaaagcataaagtgaaaaattactgtttatgacaggttgagcatcccagtttgaaaatttgatatctgaactgttccaaagtccagaactttttgaatgccaacatgacactcaaaatttcagatttgggattctcaactgcaagtataatacagtattccaaaatctgaaaaaaaaaaaaacaccaaaacacttctggttctaagcattttggataatcacatttattttgtgattttcactagggaaatctgatttacaagtattttaatgactactagatacattaagctagtttttctgagttagtcttgccgtgttatgaagacgtgttatctcctttgcatgagattaatactgaacattttttatttttgatatattttctgacagttttagggttttaaagcataacatgccttgaaacaaatacaggctgtaaaaaacctggggaaaaaatattggctttctcagttaattcctgccagttttttttttgttgttttttttttttgagatggagtttcgtccttgttgcccaggctggagtgcaatggagtgatcttggctcaccgcaacctctgcctcagcctcccgagtagctgtgattacaggcatgtgccaccacgcccggctacttttgtgtttttagtagagacagggtttctccatgttggtcaggctggtctcaaactcctgacctcaggtgatcttcctgcctcagcctcccaaagtgctgggattacaggcatgagccaccacgcccagcctacctgccagttttatagtgggtcagaatgaggcatgagccaaagataagatagtaacagatgaggctgggtgcgttggctcacgcctgtaatccagcactttgggaggccaaagtgggcagatcacctgaagttgggagtttgagaccagcctgaccaacgtggagaaactcccgtctctactaaaaatacaaagttagccgggcgtggtggagcatgcctgtaatcccagctgctccggaggctgaggcaggacaatcgtttgaacccaggggagatggaggttgtggtgagccattgcactccagcctgggcaacaagaatgaaactctgtctcaaaaaaaaaaaaaagtaacagctgagtatagtcagcctctcagttttgtgttttttgttttcctctgtgacttatttgtaccagagtttgtttttttactgtattgttaagtcattgtctgttttcggtccttaaaagtcattcaagcaaattagggccttcttttgtgtttccagcatttcctctaagttttaattatttttgttctggagaaaagcattctctcagccaggggagactctcaacatatataggtttgagctcattgactcttaggatgttaaagacatttgtttctggctatttctgaataggatgatgatataccccagctgttgtacacatttttactgtgtattattttcttaagggttaccctggaggttataattaacatcttagtttgtaacaattcagtttgagttaatatcagcttagtttcaagtgtatccaaaagactatatagcttcctgtcgcccaccattattacatttgtaataatgtaattacaaaataattacatgtcttttgtaatttgttactacaaaatacatctttatacattgtatgtccattaacatagatttataattcttatattatgcattgtcttttcttttttttttttaaggcagagtctcactgttgttggcccaggctggagtgcagtggcgctgtctcgactcactgtaccctctgcctcccgggttccagcagttctcctgcctcagcctcccgagtagctgagattacaggtgcctgccaccacacccacctaatttttttgtatttttagtagagacggggttttgccatgttggccaggctggtctcgaactcctgacctcaggtgatccacccacttcggcctcccaaagtgctgggattacaggcatgagccactgtgcccagccttatcttttaaataatgcagaaagaaagaggagtaataagccaaaatatgttattacagacttttgtgactacctgtataagttacttttactggcattttaattttgtgtggattcaatttaatgtctgtagagttctttcatttcagcctgaacgactcactttagcttttcttataggacaggtctactagtgacaaactctgtccattttttcttatctggcagtgacttaatttctccttcatttttgaaagggtagttttgccagataaagaattcttagttcgatttttttttctttcagcattttgaatatgttaccttctgacctccatggtttctggtgagaaatcagctgttaatcttattgaggatcccttgtatgtaatgagttgcttctcttggtgttttcaagatgctctctttgtctttcaacaattcgattgtaatgtgtattggtacgggtcatattgagtttatcctactttgggttaattgagcttcttagatacatagatttgtgtctttttatcaaatttggggagttttaggctgttatctcttcaaatgtttctgaactattctccttttcttctggtaattccattgtatatattttggcacagttgatgtctcctgggtctgtcaacgttctgttcatttttcttcatttcctcattctgcttctcagactggataaatctcaattgaccttaacttaaatttgctgattcttttgtctctctgctcatatctgctgttgaacccctctagtaaatttttcatttcagttgtaccttttttttttttttttgagatggagtcttgctctgttacccgggctggagtgcagtggcgtggtctcagctcactacagcctccacctccaggttcaagcgatactcctggctcagcctcctgagtagctgggactacaggcacgtgctaccacatctggctaatttttgtacttttagtagagacagggtttcactatgttggccaggctggtcttgaactcctgacctcgtgatcctcctgccccagccttccaaagtcccaaagtgctgggattacaagcatgagccaccgcacctggcccagtttacttttaaactccaaaatttctatttgtctctctcttttttttttttttttttggagacagagttttcactcttgttgcccaggctggagtgcagtggcatgatctctgttcactgcaacctccacttcttgggttcaagtgattctcctgcctcagcctcccaagtagctgggattacaggcatgcacccccatgcccagctaaattttttgtatttttagtagagacaggatttcaccatgttgtccaggctgggcttgaactcctgacctcaggtgatctgcctgccttggcctctcaaagtgctgggattacaggcgtaagccaccacggcccactatttgtctctactgatattctctatttggtgagacatcattctatggttccttttatttttttctacatggtttcctttagctcttttaacatacttaatatacttgatttgaagtctttggccaggcacagtggcactttgggaggctgatgtggggagatcacctgaggtcaggagttcgagaccaacctggccaacatggtgaaaccccttctctgctaaaataatacaaaaattaattgggtgtggtggcgggcgcctgtaatcccagctacttgggaggctgaggaaggagaatcgcttgaacccaggaggcggaggttgcagtgagccaagatcaagccactgcactccagcctgggcaacacagggagactcagtctcaaaaaataaataggctgggcgtggtggctcacgcctgtaatcctagcactttgggaggcacctgaggtcaggagtttgagaccaggctggccaacatggtgaaaaccctgtctctactaaaagctgcaaaaattagccagacatggtgttgggtgcctgtgatcccagctacttgggaggctgaggcaggggaaccacttgaacccaggaggcagaaattgcaatgagctgagatcgtgccattgcactccagcctgggtgacagagcaaaactctgtctcaaaaacgatacgttaaataaataaagtcggctgggcacggtggctcacgcctgtaataccagcactttgggagaccaaggcaggcggatcacaaggtgaggagtttgagactagcctgaccaacatggtgaaaccccgtctctactaaaaatataaaaattagccaggcctggtggcatgcacctgtaatcccagctactcgggaggctgaggcaggagaatcacttgaacccaggaggcggaggttgcagtgagccaagatcgcgccattgcactccagcctgggcaaaaagagcaaaacactcctcgtcaaaaataataaataaataaagtctttgtccaatgtaatatctgggctcccttggggacagtttctgttaatttattttttgcctgtgtatgggccatacttttttatttctttgcatgcctcataatttttgttgaaaatgacatttcgggctgggcacggtgacttacgcctgtaatcccaacactttgagagagagtccaaggcgagtggattatttgatgtcaggagttcgagaccagcctagccaacatggtgaaaccccgtctctactaaaagtatacagaaaattagccaggtgtgctggcatgcgcctgtagtcccagctactcgggaggctgaggcaggagaatcgcttgaacccgggaggtggaggttgcagtgagctgagattgagccactgcacttcagcctgagtgacagagcaagactctgtctccagaaaaaaaaaaaaaaaaaaagacattttgaatgatataatgtggcaattctggaaattagattctccccaggtttgttgccacttattgtagttgtcattttagtgccttttctgaaagagtttagtaaaatttgtattctttttgtgtgtgtggccattgaaatctctcttccattagcttagtggtcagctagtgatttgacagattttttttaaatgcctttaagcaaaaaacaactcccctagtcttggtatatgggtcctatggatgtgttgaggcacaccttcaacagctctgcctttgccttcacttcctgcatgggcagagcctgagccagaggtgaaaacttagagccttttcaggtcttttctgaacatctgctcagcactgacatgcctatggctttctaggactaccaggatatgtgggagcttttcaaagctcttactctcaaagcatctccttcaccagcttttcttcccaggctttttactgtgttgattgtttgccccgttattgctactatatttacccttaactgtttttgacaaatatgtgtgctactgccccacctcactccccatagcaaactcttgagccagtccttcagggagccaggtcaaaacaaccagagttttttgttaatatttattatattgcagccaggggccgtggctcacgcctgtaatccaaacactctgggaggctgaagcgggcggatcacgaggtcaagagatcgagaccatcctggccaacatggtgaaaccccgcctctactaaaaatacaaaaattagcggggcatggtggcacgcgcctgtagtcccagctacttgtgaggctgaggaaggagaatcgcttgaacctaggaggcagaggttgcaatgagctgagattacgcgactacactccagcctgggcaacagagcgagattccatctcaaaaaaataaaaataatattgatattgctacctccaacttgtaccaagaatgcaggctattgtcttcaaggcttaccaagctgcaaatgggagatggcactagggtagtttaaaataccacagaggtgttttaccagaattgaactgttggttttttttttcttaagcattcctctggaagtttatcattgcattggcagttctttttagtagttctgtagagataggggtctcactatgttgcccatgctggttttcaacagctgggtctggaggcccacctcagactcccaaagtgctgggccctggtgcatgttttagagtcaggctaccttgacttgaatttcagctccactgttcactagttgtgtaacctggaacaagttacttaagacttagttctttgtcatggaaatgaatttgaccataatccctacatccacaggacttgtgagtattaaatagatgatgactgtaaggcccttaaatgcaatactattgttgcatatgtgtttactttttaagaaaaatatataccacattagcagtgcttacttttgggaaaaggattgggagtgaggattgtgtctggtggtggggagggagtcagctaccttttttactcattttttctatcacagttgaaaatgtatagctaaaagactgactagcattgaacacattgggtatatattcaagagaactgaaaacgtgctcatataaaaacttgtacacaaataccgataacagcattattaatagccaaaaagtggaaacgactgcagatgctcattaatcagagtagataaaatgtgtatctctatacaatggaatattgtttggcaataaaaaggaatgaaatgctgatacatgctacaacataggtgaaccttgaaaacattgtaataagtgaaagaagccagacatgagaagaggacacatattttatgattccatttatatgcaatgttcagaataggcaaatctatagagacagaaagtagactagtggttgtccaagttggggggcttgggaaatggagagtgactacagatgggtatggagtttccttttggggtggtgaaaatgttctggaattaggtaatggtggtgtgttaaaaccactgaatcaaacactttaaaacagtaaattctttttttgagacgaggtcttgctctgttgcccaggctggaatgcagtggcgtgcgatcatggctctctgcagccttgacctcgggctaatatgatcttcccacctcactctcctgagtatctgggaccacaggcgtgcaccaccacacccagctaagttatttgtttgagacagagtcttactctgtctcccaggctggagagtgcagtggcgcgatcttggcacactggaacctctacctcctgggttcaagtgattctcctgcctcagcctcctgtgtagctggcattacaggtgtgcgccatcacacccggctaattttttttcattttcagtagagacagggtttcgccatgttggccaggctggtctcaaactcctgacctcaagtgatctgcccgcctcagcctcccaaagtgctcggattacaggcatgagccacagtgcccggtgtgaaaagtaggattttatgggcataagttgggacaggatacaaattgggaaaataatgaaaacctgtttatattggggtgtctttgtacctaacttaatgataaggttcagatgcagattaaccaaagttccatccagttgtgaggcaggatcaatcccagccattcacagtgttagaggaatatctaaaatgtaattatttaacagtaagcagtttggtagcctgccatataagaatgagtaattttcggccggacacggtggctcatgcctgtaatcccagcactttgggaggctgaggtgggcggatcacttgaggtcaggcgtttgaggccagccgggccaacgtggtgaaaccctgtctctactaaaaatacaaaaaaattagccggccatggtggcacgctcctgtaatcccagctacacaggaggcggaggcaggagaatctcttgaaccaggaggcagaggttgcagtgagctgagattgcaccactgtactctccgtctcaaaaaaaaatgggtaattttcttcttttcttttttttgagatgtagtcgcgctctgttgcccaggccagagtgcagtggcgcagtctcggctcactgcaacctccacctctcaggttcaagcgattcttctgccttggcctcccaagtagctgggactacaggtgcgtgccaccatacctggctagtttttgtatttttagtagagacgggatttcaccatattggccaggctggtctcgaactcccgatctcgtgatctgcccgccttggcctcccaaagtgttgggattataggcgggagccaccgcacccagtctaattattttctttagaggaactggttattatttagtcaaaacttgctatcaaaatagtttttcatccaagtttaatgataaaaataacagatatccattgtctgttttctgtcttgtctgcttttacagtgcctcaatttcctaacaaatcatattatcatattttctttctactaacaccatagcacataactctgagtctgtttctgcctttcttcttttgtttgattgtattattgtttttcaagatagggtcttgctctgccgcccaggctggagtgcagtggcactatctcagctcactgcaacctccacctcccagggtcaggagatcctcctaccttggcctcccaagtagctgggactgcaggcgtgcaccactgtacccagctttgccatattgcccaggctagtatcaaactcctgggctcaagcgatccacccctgttgacctcccaaagtgttgggattacaggcatgagccgcacccagtttgtttcttcctgcctttctttttttttttttcttttttggagacagggtcttgctttcttgcccaggctgaagtgcagtgatgtgatcttgcctctctgcaacctctgcctcccaggttccagtgattctcttgcctcagcctcccagatagctgggattataggcatgcaccaccacatccagctaattttttgtatttgtagtagagatggggttctctatgttgcccaggctggtctcgaactcctgggctcaagcagtccgcctgctttgtcctcccaaaatgctggaattactggagtgagccacagtgcccggcctgcctttcttttatagatatacatactataactaggacagaagttcccagaaatttttagttgaggacctctcaacaattaaaattttcaccactatgatcctgttgtcattagtatctagtatttgtcatattacatgaacagctatggatttttattacacttatgtcctcttaaggataagtccataaaatttaaagggccaggcaacacacatagggttcatcttttccctgaaacttatcccaaagggaaaaaaatacatatatttccagtaggagattttagatttagtgttttacttgattatgacaaatgtgaggtaagcagacctcaataagcctttctttggcacaagtcactatactgcttgagtttacgtacaggtgaattgttttatgtaaatctatttttagtgatttcaaacttaatgaattggaatattttagaatgtgaaaccttgtgcttcagatatttagcctgcaatgtatcaattaggttagatcatgttatcagctattgagtagtataagacatcaggcttgtatttgatactacttttactcaggtgaaaagatactgggctgggcgcgatggctcatgcatgtaatcccagcactttgggaggctgagacaggtggatcatttgaggtcttgagttcaaggctagcctggccaacatggtgaaacccagtctctactaaaaatacaaaagttagccaggtgataatggcatacgcctgtaatcccagctactctggaggctgaggcaggagaattgcttgagcctgggaggcggaggttgcggtgagctgagatcacgccactgcactcgtctgggtgagaccctgtctcaaaaaaaaaaaaaaaaaaaagatgcctgaaactcactgtacagtgaggaactccagacatggaagaacttgacatggacctagagaaaaagcagacacagaatatgggctatcaaggagagatccagagctatatacatgaagaacctaagaagttattaaaaatctgttagttttcactttcaatccctggactttttgaagtcagtttttaaaaattgaatttgcttttcatcatttcatcacttgatgactcagtctttcagaccgtgtttggtttttgttgttgttgttgttgttgtttgaggtggagtttccctctgttgcctaggctggagtgcagtggtgcagtctcggctcactgtaccctctgcctcctggtttcaagtgattctcccacctcagcctcctgagtagctgggattacaggcatgtaccaccatgcccagctaaattttttgtttttgggtgttttttttttttttttttttttgagatggagtttcactctttttgcccaggctggagtgcaacggcgcaatcttggctcaccacagcctccgcctcccgggttcaagcaattctcctgcctcagcctccggagtagctgggattacaggcatgtgccaccacgcccggctaattttgtatttttagtagagacggggtttcaccatgttgatcaggctggtcttgaactctcgacctcaggtgatccacctgcctcggcctcccaaagtgctgggattacaggcatgagccaccgcgcctggccttttttgtatttttagtagagacagggtttcaccatgttaggctggtctcaaactcctgaccttaaatgatccacctgcccccgcctcccaaagtgccgggattataggcatgagccactgcacccagccgaccatgcttgctttacaaagcaagtgatatgtaatataaaatataaattggatggtttggagagtccatgtaagcaactgatggacttcatttactgttatcggaaaacattagatgtggccgggcgtggtggcgcacacctataatctcagcactttgggaggccaaggcaggcagatcatctgaggtcaggagttcaagaccagcctggccaacgtggcgaaactccatctctactaaaaatacaaaaattagctgggcatggtagcacgtgcctgtaatcccagctacttgggaggctgaggcgggagaatcgcttaaacatgggcagttgaggttgcagtgaaccaagatcatgccactgcattccagcctgggtgacagagtgaaactctatctcaaaaaaaaaaagaaaacattagatgttttaggctgtcctctcctgtttcttaaaacattaaaatcatttggaaaaaacaaacatgaagctttccaattattcaacttaccgtgtatttttaatgtatcatctgcctctaacacctattcatgatgcctgctaataataaacagatgctcactaagaactgaaagaatcagctgggcctggtggctcatgcatataatcccagcactttgagaggcttgggtgggaggatcacttgagcccagaaatttgagaccagcttgggtaacacagaccttgtttctacaaaaaataaaaaaaattcagccgggtggtgtggtggtgcacacctgtagtcccagttacttgggaggctgaggcaagagatcgaggctgtggtgagccatgatcacaccattgcactccagcctggatgacggagtgaaaccttgtctcagaaagaaaaaaccctgaatgagtaagtaaattaactgtgctgttgttcttttaaggttaaaaacgacaaccaacatcagccatgaaagatccaagtcgcagcagtactagcccaagcatcatcaatgaagatgtgattattaacggtcattctcatgaagatgacaatccatttgcagagtacatgtggatggaaaatgaagaagaattcaacagacaagttagttttttgtacaaacatgtttttatagtccattctggccctcaatatgattgtacttgtccctgaaatgtgtttatcttgtcctttatgtataaagtatgtagactgatgtgccaccactcctgtttatttggctgctgattactaccaggcttaactgcttacggaaataacctggggagcttgtttcagggtcccaccctagagatgtctgaatcaggaggatgagggtggagcctgggaaactttttcagagctctcagatggttccattgagcagtcagatgtggaaaccactgccttatgccagtaagattgctggttaccgtgaaagtcaagagaattcaggagtcaggagcagacaggcacagaaaaaagagacaggcatctctttttacttcttccctgccaccctcaatggaaaaaagaatgttctactaataaaagtaaaaacatagaaaaaccctaaacagatagatcttcgccggtcattatggtaagcattttttttccttagcatggaagcagaaaagaaagtatgactttgtgcctttaaatggtttagttcaagatattttaagccattcctagtgatatctaccaagtgtgctataaattatcctttattataaatctagatagaagaggagttatgggaagaagaatttattgaacgctgtttccaagaaatgctggaagaggaagaagagcatgaatggtttattccagctcgagatctcccacaaactatggaccaaatccaagaccagtttaatgaccttgttatcagtgatggctcttctctggaagatcttgtggtaaaaagttatttttcatctttttaaaacctagtgcatcttttgcataagtggaaaagccagctcccatctatttaagaattctacatctctttccccttcagaaattgtgctgcttctggccgggcatgtggctcacgcctgtaatcccagcactttgggaggccgaggcaggcagttgacttgaggtcaggagtttgagaccagcctgaccaacatggagaaaccccatctctactaaaaataaaaaattagccgggcatggtagcacatgcctgtgatcccagctactcgggaggctgaggcaggagaatcgcttgaacccgggagacggaagttgtggtgagctgagattgcaccattgcactccagcctgggcaacaagagtgaaactctattaaataaataaataaataaataaataaataaataaataaatagaataaaaaatacaaaatttggccaggcacggtggctcatgcctttaattccagcactttgggaggccgaggtgggtggatcacctgaggtcaggagttcaagaccagcctggccaacgtggtgaaaccccatctgtactaaaattacaaaaattagctgggtgtggtggtgcatgcctgtaagtaatcccagctactcaaaaggctgaggcaggagaattgcttgaatctgggaggcggaggttgcagtgagtggagatcgcaccattgcactccagcctgggcaacagagtgagactctgactcaaaaaaaagaaaaaaaaaatacaaaaattagctggacatggtggcgggcgcctgtagttccagctacttgggaggctgaggcaggagaatcgcttcaacctggaaggcagaggttgcagtgatccgagattacgccactgcactccagcgtgggtgacacagcaagactgtctcaaaaaaaaaaaaaggaaaaaggaattgtgctgctttttacaatggaagcagagtctcacgacatggaatcacttccggcaacactgtagagctagtcttagacggacttctagcccctgcttttagtcctgatgttgccctagggtacttaaatgtcctaaagaattaataatttaaaaacacacacaatattatcatgttacttgcctatacagaagtagcttgatggagaagttttgctctttaatcttgtcttggctgggtgcagtggctcatgcctgtaatcccaacactttgggacgccgaggcacgcggatcacgaggtcaagagttcgagaccagcctgaccaacatggtgaaaccccgtctctactaaaagtatacagaaaattagctggttgtggtggtgcgtgcctgtaatcccagctacctgggaggctaaggcaggagaatcgcatgaatctgggaggtggaggttgtggtgaaccaagatggtgtcgttgcactctagcctgggcgacagagtgagactccacctcaaaaaaaaaaaaaaaaaaaaaagcggggtggggggaattgtgataactaaacatcagcactagagtgagaactggctgggtccactgaactaatctgtacaccatgattacctatgaagcattaaatacaaaaatcagttctttagttacatcccaacatgctcagttgtctgggcatgttaattttttaaaagtactacagaggatttattatacagccaacttgcctgagtcggtcatttggaaaccattcttctaaaggatggtgtagagagcactgaagtttacattgtggtatatagcctttgttgcagtaagtgatggtaacccatttgagcagctgtatgatctgaatagtctggaggggggtatgattacttacggctacattagtcaccataaataatccagttgccctgcagagtaacactcttggctgagcataatgtataactttaatctggacccagtataattccatagtacagaagctggtttgttcttctcagtctatttgatattactttgtttcattcttctgttgctcccagaaaattgttcatttaagaacactgtgcctggatgtggtggctcatgcttgtaatcccagcactttgggaggccaaagtgggaagattactttggcccaggagttcgagaccagcctgggcaacaaagggagaccctgtttctacaaaaagtttaaagttagctgggtgtggtggcacaggcctgtggtcccaggtacttgggaggcagaggccagaggatcacttgagcccaggaggccgatgctgcagtgagctgtgattgttccgctgccctccagtctaagcaacagagcgagtccatgtctcaaaaaaagagaaaaggaatgctgcttttttttcttaaacttcacacttttaaaatgtagatacattatttcccttgggggaagggagaatatatcctgtccaaagaaactgctatgtataaattacgaaactaaaattatttcttcaacatgatgtttaatattatgcattagtcttgaagtgatgtagggtcaaattcaatgtaaaagccttgcagcatacctacatttcaggccctggaacctgccctcatttctttttatttttttcaacttgcagtctaaaatatcacagaggaaaatttctagctgttcttcctagatgctgacaagtctacttaggagagtaaagatttagagacatagcataacattggtacaagtctctaagactcagactttggcccattcccccccacccctttttttttaactgatgcaaaaatttgaatcccagagaaaggtgacttatctgagtttacacagaagttagttaggggcagggctgggatttcaggcttaggtcttctggttccccatgtagttttcttttcctgttatataccatgcttcctgtgggaattagaagatggcaattgtagaaaaacaactccacatttttagtgaggattctaaagtaaaatcagcaattccccagttactttaatcataatttcaacacttgtttaacatggttccttggtatttagtgtttaaagaaagctacataccatagttcgattaacagaattccttgttccgtgctattcctttaacttatgtgaagttactggatttctggttacacttaagcaaactgaatttcaattcctattttctctttagaaaattgatgtaatttaggccgggtgcagtggctcacgcctgtagtcccagcattttaggaggccgaggcaggcagatcacgaggtcagatcaacaccatcctggctaacatggtgaaaccccttctctactaaaaatacgaaaaattaggccgggcgcggtggcttacgcctgtaatcccagcactttgggaggccaaggcgggcggatcacgaggtcaggagatcgagaccatcctggctaacatggtgaaaccccgtctttactaaaaatacaacaaaaaattagctgggcgtggcggtgggcgcctgtagtcccagctactcaggaggatgagagacaggagaatggtgtgaacccgggaggcggagcttgcagtgagctgagatcgcgccactgcactgcagcctgggtgacagagtgagactccgtctcataaaaaaaaaactaaataaataaataaaaatacaaaaaattagttgggtgtggtggcacgcgcctgtagtcccagctactcaggaggctgaggcaggagaatcgcttgaacccaggtggcagaggttgcagtaagcctagattgtgccactgcactccagcctgggcgacagagcaagactccgtcacaaaaaaagaaaagaaaaagttgatgtaatttaatatgatatatagcttacatctggttcttcctttttggggtttagtatagtcttacagactgagttcttttgtctttttttttttggaagatgtttttgcatgaggatctagattgaattagtacctgaaactgtgttaatgaacttgcttttttatgtacttattttccaggtcaagagcaatctgaatccaaatgcaaaggagtttgttcctggggtgaagtacggaaatatttgagtagacggggccctcttttggtggatgtagcacaatttccacactgtgaaggcagtattagaagacttaattgtaaaagctctcttgtcactgtgttacacttatgcattgccaaagtttttgttagtcttgcatgcttaataaaagtgctgagactgttactaagtaaaaagctgtcaaacatttactgaaaatagaattggccccatggcttgatgtgaagacagcaaggaaagaagcaccagtcaagttgtgaacaagcaccaaattaaaagacctaaaccttaccaaattgtctttttttgaggctaatctatcacttgttaatgtctaaactttaaaatcagtacatttaatttgagttccaactgttaagcatatttctcagacttaaatttgattatgtccccatcaaaaagaatctccattttctgaaggtctgttagttaatttgagataatttgttaaaggcaagtatgtcatattactgaggctacaagttagtcagcagatgagtgccagtccagccttttctggtatgttattgttagaaatattgagttctaatgttacatctgaggaagtatgtaatttgagaattgtaacttctaagggattcactgcatcatagctatgcctgtatggagtctaacatatgaccaataccaacccataatccagctgaacaaagatactgtaacatgatttgagtggtgcttttccttgctttgttaaccatcacgagagtctgcagcacaacttttaacaaagctagaacagttttggcttcttaaacttcatatttgggtaggttaagctgccatacgtgttcagtgtgaatagtgtttaagttgaaaatattgtaaaaaaattatattttttcaaaaatatttaaaaaaataaataatagtagaactgagca

SEQ ID NO: 369 - DNA, 1973 bp, Homo sapiens
  source 1..1973: mol_type = other DNA
aattctaccccccttggtgccaacagatgaggttcacaatctcttccacaaaacatgcagttaaatatctgaggatattcagggacttggatttggtggcaggagatcaacataaaccaagacaaggaagaagtcaaagaaatgaatcaagtagattctctgggatataaggtagggggattggggggttggatagtgcagagtatggtactggcctaaggcactgaggatcatccttttcccacacccaccagagaaggcttaggctcccgagtcaacagggcattcaccgcctggggcgcctgagtcatcaggacactgccaggagacacagaaccctagatgccctgcagaatccttcctgttacggtccccctccctgaaacatccttcattgcaatatttccaggaaaggaagggggctggctcggaggaagagaggtggggaggtgatcagggttcacagaggagggaactgaatgacatcccaggattacataaactgtcagaggcagccgaagagttcacaagtgtgaagcctggaagccggcgggtgccgctgtgtaggaaagaagctaaagcacttccagagcctgtccggagctcagaggttcggaagacttatcgaccatggtgagtgtagggtcttggggtcgaacgcgtgccactcgggagccacaggggttggatggggcctcctagacctctgctctctccccaggagcgcgcgtcctgcttgttgctgctgctgctgccgctggtgcacgtctctgcgaccacgccagaaccttgtgagctggacgatgaagatttccgctgcgtctgcaacttctccgaacctcagcccgactggtccgaagccttccagtgtgtgtctgcagtagaggtggagatccatgccggcggtctcaacctagagccgtttctaaagcgcgtcgatgcggacgccgacccgcggcagtatgctgacacggtcaaggctctccgcgtgcggcggctcacagtgggagccgcacaggttcctgctcagctactggtaggcgccctgcgtgtgctagcgtactcccgcctcaaggaactgacgctcgaggacctaaagataaccggcaccatgcctccgctgcctctggaagccacaggacttgcactttccagcttgcgcctacgcaacgtgtcgtgggcgacagggcgttcttggctcgccgagctgcagcagtggctcaagccaggcctcaaggtactgagcattgcccaagcacactcgcctgccttttcctgcgaacaggttcgcgccttcccggcccttaccagcctagacctgtctgacaatcctggactgggcgaacgcggactgatggcggctctctgtccccacaagttcccggccatccagaatctagcgctgcgcaacacaggaatggagacgcccacaggcgtgtgcgccgcactggcggcggcaggtgtgcagccccacagcctagacctcagccacaactcgctgcgcgccaccgtaaaccctagcgctccgagatgcatgtggtccagcgccctgaactccctcaatctgtcgttcgctgggctggaacaggtgcctaaaggactgccagccaagctcagagtgctcgatctcagctgcaacagactgaacagggcgccgcagcctgacgagctgcccgaggtggataacctgacactggacgggaatcccttcctggtccctggaactgccctcccccacgagggctcaatgaactccggcgtggtcccagcctgtgcacgttcgaccctgtcggtgggggtgtcgggaaccctggtgctgctccaaggggcccggggctttgcctaagatccaagacagaataatgaatggactcaaactgccttggcttcaggggagtcccgtcaggacgttgaggacttttcgaccaattcaaccctttgccccacctttattaaaatcttaaacaacgggt

SEQ ID NO: 370 - DNA, 2884 bp, Homo sapiens
  source 1..2884: mol_type = other DNA
aaaaaaggaaaaggaaaaagcccatgaaatgctactagctacttcagacctctttcagcctaagaggaaagcctgttagcagagcacggaccagtgtctccggagaatgctattctcctacatttccgaacaggttatcaacgcacagatcgatcactgcctctgtcccatcgctccctgaagtagctctgactccggttccttgaaaggggcgtgtacagaagtaaagatggagcctgcaggggagcgctttcccgaacaaaggcaagtcctgattctccttcttttactggaagtgactctggcaggctgggaaccccgtcgctattctgtgatggaggaaacagagagaggttcttttgtagccaacctggccaatgacctagggctgggagtgggggagctagccgagcggggagcccgggtagtttctgaggataacgaacaaggcttgcagcttgatctgcagaccgggcagttgatattaaatgagaagctggaccgggagaagctgtgtggccctactgagccctgtataatgcatttccaagtgttactgaaaaaacctttggaagtatttcgagctgaactactagtgacagacataaacgatcattctcctgagtttcctgaaagagaaatgaccctgaaaatcccagaaactagctcccttgggactgtgtttcctctgaaaaaagctcgggacttggacgtgggcagcaataatgttcaaaactacaatatttctcccaattctcatttccatgtttccactcgcacccgaggggatggcaggaaatacccagagctggtgctggacacagaactggatcgcgaggagcaggccgagctcagattaaccttgacagcggtggacggtggctctccaccccgatctggcaccgtccagatcctcatcttggtcttggacgccaatgacaatgccccggagtttgtgcaggcgctctacgaggtgcaggtcccagagaacagcccagtaggctccctagttgtcaaggtctctgctagggatttagacactgggacaaatggagagatatcatactccctttattacagctctcaggagatagacaaaccttttgagctaagcagcctttcaggagaaattcgactaattaaaaaactagattttgagacaatgtcttcgtatgatctagatatagaggcatctgatggcgggggactttctggaaaatgctctgtctctgttaaggtgctggatgttaacgataacttcccggaactaagtatttcatcacttaccagccctattcccgagaattctccagagacagaagtggccctgtttaggattagagaccgagactctggggaaaatggaaaaatgatttgctcaattcaggatgatgttccttttaagctaaaaccttctgttgagaatttctacaggctggtaacagaaggggcgctggacagagagaccagagccgagtacaacatcaccatcaccatcacagacttggggactccaaggctgaaaaccgagcagagcataaccgtgctggtgtcggacgtcaatgacaacgcccccgccttcacccaaacctcctacaccctgttcgtccgcgagaacaacagccccgccctgcacatcggcagtgtcagcgccacagacagagactcgggcaccaacgcccaggtcacctactcgctgctgccgccccgggacccgcacctgcccctcacctccctggtctccattaacacggacaacggccacctgttcgctctccagtcgctggactacgaggccctgcaggctttcgagttccgcgtgggcgccacagaccgcggcttcccggcgctgagcagcgaggcgctggtgcgagtgctggtgctggacgccaacgacaactcgcccttcgtgctgtacccgctgcagaacggctccgcgccctgcaccgagctggtgccccgggcggccgagccgggctacctggtgaccaaggtggtggcggtggacggcgactcgggccagaacgcctggctgtcgtaccagctgctcaaggccacggagcccgggctgttcggcgtgtgggcgcacaatggcgaggtgcgcaccgccaggctgctgagcgagcgcgacgtggccaagcacaggctagtggtgctggtcaaggacaatggcgagcctccgcgctcggccaccgccacgctgcaagtgctcctggtggacggcttctctcagccctacctgccgctcccagaggcggccccggcccaagcccaggccgactcgcttaccgtctacctggtggtggcattggcctcggtgtcttcgctcttcctcttctcggtgttcctgttcgtggcagtgcggctgtgcaggaggagcagggcggcctcagtgggtcgctgctcggtgcccgagggcccctttccagggcatctggtggacgtgagcggcaccgggaccctttcccagagctaccagtacgaggtgtgtctgacgggaggctctgaaagtaatgatttcaagttcttgaagcctatattcccaaatattgtaagccaggactctaggaggaaatcagaatttctagaataatgtaggtatctgtagctttccgaccgtctgttaattttgtcttcctcacttttcaccttagttttttttaaccctttagtaatcttgaattctacttttttttaaatttctactgttgtctttagtaatgttactcatttcctttgtctgattgttagttttcaaattattgtattattataaatattttatatcaggaaagttcatatttctgaataaattaatagtattcattcctgaagggtgatatgaaagttaaccccacctaataaacataactctaattctgaa

SEQ ID NO: 371 - DNA, 32742 bp, Homo sapiens
  source 1..32742: mol_type = other DNA
cagtttcagggtctcgccggcagccccagccggcgggcgcggagcgggcagcggggcccggatcgcaggctcctctgggggccccggagttgggaagcggcgtccgggagcccccggaggaggatgggctgcagacacagcaggctgagcagctgcaaacccccgaaaaaggtaaagggcgccggcggagaagtttgctttcagaggagaggggagtgcggaatcgctccgccgcagaggactcggcgccccgggctctctctggtcggcccgggataccggacggagaacctggagaggccagctcagagacgagggaggctctgctgggaggcgccctttaccccggcccgagccgcaccaagcagccgagtttacaaacacggcacccgggccagggaaaggcagctgattcccgctgcctcgggtggggagatgtcgtgtgtctgtggcaggtgccctctgctttcggtctggggctgttcgctgtgtggccatggacaagtgacttgacctctctgggccttcggcttcctccccccgggggttaaaggctgataatctcagggctgctcgaagagtgttccacagactcgcagtatcagcatccctggggacctgtcagaaatgcagaatctcaggctcaggcccagtcttgccaagacagaagctgccttttaacaatatgcccaggtgatgacgctttaaagtttgaggcgctggtcttagggctcttgcaggccccagagctggtgagtgtgggctgcccttggggtagctgggaggggccaaagagggaggagatctactgcgttctgtggccctctcctcccttcctgtccttcccccaaggggccttggagctgggtcagggcccaggggacaattctcaggtttcttgcagtgagaccagctgccccttggggtctgacgagcccagaaggtcagagcctggagctagaaagatagcctcctcaggggacactgtgaggcagaggggaagaaggaccctcaaattctggccccttttcttaccactacctgccccctagccaggtgggactaggtgatcccttaaactttatcatcattcccccttgagaccttgagaggccccaaactgtgacagtgtttaatagttttgcaatgaactttagtcctccctctgctcctgctttgcttgtgccctgagtacaggtttttctgcctaacagtagtcctagcctggaggattctactcccttctctgacacctcctggctttccttgctctccctttattaccagattgaaattctcaccaactcctgacctagaaaccctcatgtctttactcactccaacagggaaactgaggcttggctctatcagtagaaggaaggggctggctgacagggatgacaaggcggagagacctgagccttggctgagacttgtaactgagcaagtggtaggcagacattagccctgggtgtaagtcctggtggtgccataaacatactgggtgaccccaagcaagcccttgtgtctccctgggtctcagtttctccctgtatggggagtgatgagcaggatgatccctaagcatctgagagtctgtgttctctgcacctgtgtcaaccttgtagcttgcaaagtggaccaagggtgaattccatctacctagaggtggaggaaacggggaagagcctgacccttccacaagctggaagaggaggtcacagtaagcacaggttctttggctcctgctccttctgagagacttaccagctgttcctgcctgtccctggcacagccaaagctctgaagggcaagtaaagctggcacagcctgtctgagttggaaagggcctttgggtactacctgggctgacgcacccactatacagataggaggttaaggcctagaaaagggaaggagcatgactgaggtcacagagcaacacagagcagaacccaggtatctagtcccctagctccgtgttctttgtctccacctcctcccgctgtgcttccagtggcttcttgatgactttagcgtaaaatcttttactcctgttgcctcagagaacagcctggcatgccttcttggccccagccatgccaggcccctgcccctatatggcaagatttatgggctgtttttgtttaaagttctcatccctgtaggctgtgctcctgcccaatttctcacccaggtgccaaccccttggaaggcatgagctcccaagttcatccccaacaggctaccagccccctgggagagagggggactccagggatgggatggacaaaaatgagctcaggctacagaggggttaggttctgataaccatgactcaccctgagtgtttacagcatgctttcacatcccgcccagtctcacagaagccctggaagttaggctgagctgcagaatctttcccactttaccggggaaactgaggctcagtgaggaacgatgggtccaaagtcacacagccagttggtggcaaagctgtgcagttgagcctggctttctgcactccccatctggtgctcattgccttatacagatcatggagcaggtgcttaagtagatatttgagtgaatgagggacaaataagagccatgctaggggttggcccagggagcagtaggagcatcacatctagccttgagagatgcaggaagggtttttgaggaagggtggtttggaaggtatggcaggagttacccactcatggccaaggcctaagcaaaggctgagccactgaaagcacagcgtgagggggttctttgtggagaatggaggtggcaggcagcaaggaatgaggcaggcacttttagaaaggattatcctggctagggacaggagcttgaccatgaggccttctcatgtccctccaggttcaaggatctgggggtctgctgagttctgtggtctatggtgcctgttgggcttggccgactagatgttctagaccaccctgagaggcctggcctgggactaggtcactgccttattgggacaagttgaaatgctgggaataaatgaatagggttcctggcaggctgggggtgggtgctgaggaaccatctggatcgtgtggtcctgcctaaacccttcttcttggcaaagaccatggctaatgtggtcacatcccccaggaggactcaggagaaggccaggcagagtgggtaggggtcaaggaaacaagccttctggggagttgccagccacagtggtaaggaggggccttcctatccccaacaggttaccagcctcccttgggcaatagggtaggaagcggagggggggtggggactggtgcaggaggcatctcgtggccaaccccctttgtgtgacactgcagagtaccaggaatgatgtctgaactctccattcccgaaggctgtggctatagctccatagttccaagcaggacctctgagaaggggctcagcacagctgccaaagctgggcctcaggtgacaggtacttggtgggtcagtcattcagcagcccttcatgagcacatccatgtagcaagccaggtgacagaagtgaatgataaggaagaggctggtgcaggcttgggtaattctgaaatcaaccagtagacaacaagggcatggctaacttggcaaacatttgtgggtcgaccacaccgggctctgggttggatgctggttcagtcctgactacatggaagatccattaagtgaccttaagagtggcttggcttctccatgcctcagtttcctcatctgtaagataggcttggtattagctcctgtgccatagggttgttctaaagattagatgaaagactgtatgtgacagagtctctgataccctgactagcaagaaggatgcctttgaaggagataaggaggcacagacttaatgttatgctttaaggacatcactgcctagattgtacccaaggaaagtaccccgggacgtgggagctaaaggacattagtgttcttggaaggttgacgcgggcagggtgggaggatgcaggctagtgtctggcctcttccttcaaatctctgaagtcttgtcaaggggcatggaaagcagtttttttctctgttgttccagaaggcagcacagtggccagtaggggaggctaaatcgagcagatttctactcatgaggaataagtggccaaaaaaaggcctcaaagggtagtgagttcctatcactggagggttcaagcaggggtcaggtggcattttggcaagaatattagaggggatgcaaacctacgactagcaaatatttacgattccattaaaaaatggaattgttctgattattattttgagtcaaaatttcaaaatgtgggaaagtataagaaattaaaaaatcttttaatctcacaattaagagatagccactgtgtacatttcagtgtcattctttgtaccattttttcctatgtatattatagatgtgagtatgactatctgtataaagctaagagtatgttttatatggttatattccagttacttaatattcttccgggggcattttcccatgttaagtagtccatggaaacacggactttttaatggctacctaatgtcctgtggctgttccgtggcttatttaaccggtttggacgcgtggttctttgcagtctgcactcctaccctggtaattgatgaacatcccttgtgttttcctcctacctggggccagtgtggctttggactcgggggggtcaaggaaggccccttagagagacagcatcttggctgggtttagaaggggggcgggggttaggcacttatggggcaggcgagttactcaggagggcatgctaggcagaaggaatatgggagcagcccttgacacctggtcaggaggagtgggcaaatctgatcttctagctcggttggtaagggcaggacagttgaggagcgtgaaggaaagctgcctctgcagcactcagccccctgccccaaccatcatggagatgttggcatgtacatggcctccgagctgatgattttgcccaacctagaaactaatgcccaccaatcttcctagctaaagccagtacaggcttccatgcacaaggcactctggaagacctgtgagattaaataccagatttttgcgtttggcaacctaaaacacactagaataattcccaatactctctgcctttgagatacaacctttggtgatatattttctgcacatgtacatgtttttaattcttttcctctattgaattcatgggtggctgatgtaggtcccctgagagcctgacgagttcccagatacctaagggctcccatttttgcttcagttggctgttaggcttgggacctgtgcttcatgtcagcactgtgtttcttttttgtcataaaaagggaagaaaagatgaaattttaaattaattgcacagaaacaggctgctatataaatcaagacagtgaaactctggttaggaggggctgccccctgacatctcagggtgcatagatcagccagtgaacagaagtctgagacctgcctggaaaaggagctctaaggggtctcagtatgaaattcatgaatgttcatattcaaaaaataaactcgaagagtgtaagtaccctcccaacgaaaggaagagcctctcagatgaccctagttctggctctgacacctcagggtgtacttgggcttccgtccacacggctggcactcggtcctctgcatcatcctccctcagcactgtgagccgtccccagtgaccaggggagagggccagactgggagcccccactgcagcaggactggcagtggggagggagctcctgctgtcccaccttggcagagaaaaggagcaagagaagatccatccatctttagcagatctaaacccatccattacctgaagacaagccatcctatttgtcttgcaaggtgaatcttaatccctaaaaatagtttatcttgtgtcaccttattttcaaatctgaaccttccagaacatctaggccaaacactgtactatacctaaaacagccatccacatccatgcatccccccaagacaagtgatatgcagtctgacctacttccagatttcctcctctctgcaatggagttttttttcactgagtgtacaatgacctttgtggctttcctcgccattttctactgccccatgtgaccctgcccctgtgccttccttaaggaaatggcctggacatcagaaaagctgttacctttactggattcagtaatgtcccctcctacatttacattcacccagaacctgtaaatgcgacattatttgaaatagggtctttgcaggggccattgagttaaaatgaggtcacattggatgggccctaatccagtgactggtgtcccaacaagaagagggaaatttggacacagacacacagggagaagagcagggaatgaagtgacacatctcccaagccagagaacgaaggattgccagcacccaccaggatctgggagagagggaggtaacagatcctccctcagagcctccagaagagccagctcggctgataccttgaatttacacttctaacttccagaactgtgagagaatacatttctgttgttttcagccaccaagtgcgtggtaatttgttacagcagctttaggaaactttcatatcgcaaggttaattgctccttacccaccctctcacccccagccccaagttgccagcaatcaaaaatgacagcaagaacccagtgcctccctttggaacccatcttggcagcagaagaggcagcactgtaaacaaggaggtgcctggacagggcccattgcttttggacaccagcagctgcatctgtagaggaaagagcactggactgggagtcaagaatggggcctacttctttatattttttattgatatataatattttacatacttctcaggtacatatgatattttgttaggtgcatagactgtgtaatgatcaagtcagggtatttggagtttcatcacctcgagtatttatcatttctatgtgttgggaacgtttcaagtcctctcttctagctattttaaagtatacagttcatggttgctatggaacattagaatgtagtccttccatctggctgtatgtttgtatcgtttgaccagcctttcttcattccccgcaccccacacacacgtccttcccaacctctggtattcatcattctaacaatgggtccacttctgcctcttttgctaactattctcttccccagccttgatttctctgtctgtaccttgactctgggggaggctttcaggttccaagagaggtacctttttcttgttgttgttaatttctttgtatataagtaattcttgaatgcgttgttgctttaaaaatcctaagaattggccaggcgtggtggctcacgcctgtaatccctgcactttgggagactgaggcgggcggatcacctgaggtcaggagtttgagaccagcctgaccaacatggtgaaaccccgtctctactaaaaatacaaaaattagccgggcgtgtggcacgtgcctgtaatctcagctacccaggaggctgaggcaggagaatcgctggaacctgggaggcagaggctgcagcgagccgagatcgcaccactgcacaccactcgctctaggtgacagagcaagactcagtctcaaaaaaaaaaaaaaaaaaaaaaaatcctaataatttaggtaaaatgtaaaatggaagctacccttccttgaccacagtaattttagtccattctctggagatgacaactgttatcagtttgtgcttttctaggtactttttcctatgcatttttttatcattagtaatagttggccgggcatggtggctcacgcctgtaatcccagcactttgggaggctaaggcgggcagatcacctgaggtcaggagttcaagatcagcttggtcaacatggtaaaaccctgtctctactaaaaatacaaaaattagctgggcatggtggcacatgcctgtagtcccagttactggggaggctgaggcaggagaattgcttgaacctgggaggtggacgttgcagtgagccaagaatacaccactgcactccagcctgggtgacagaaaagaaatagtttagtttggatattggtattttaccaaatgcctttccatctttgtacataaaggtctacttcactctcttaaacatatgaatgaaatgacatagtattatgtccctgagtatatccagccagtcctcagtttacagcatttccctactgcaaatggtcctgccctgagcatcctgtgcatcctccttgtcctcactaatgggtacttatttctgttcacagtgctactgtagaattaggagcatgctgcgtgcaacttgggagatggctgagctctgtcattctctgctttcaggcaatcccgccctctcttttacaaccacccttacactgtctgctgaagaacaggggatggtgtggagggctccaggttctcacccaggcctcctgagcaagggaccctcctttcctgctctccagagaagccccctccatgaccagagctaacagctgagtgtgtcaaactgcctctgccctgcccagagcaaacaagccggacaggatcgacagaagatgagatagcaagatgacctcactctgccccttcttccccatccacagcatgtcaaaaccagaagggctcttacgtatcccattgcacaattccatgccatgcagaggagggtacagaagcacagaaaaggaagagtgtccactcaaggtcacacagcaagcagatggcaagctaggaccttggctctggactctcaatttgccattggactgtgagacaggtatccaggcgctcagcctcagatggcaagctaggaccttggctctggccttccagtttgccattggactgggagacaggtatctgggccctcagcctgtctctttccccacccccatccagctactgacaccattttctgtccagctccttcagggtcctgcctgccaggctgacccaaatgctagaaataatgtctagtgcttttgccagctccaggccctctgaggcaaccagaactagcagacaccctgggaagctgatatgggacaagaaaacgggagccctagggaggaagaaaataaataaggtgtattagaaaggctttctctaggcctcagtgtcatcgtctgtgaagtgaggccttgcactcaaggcccttctgatgcttgtctgctgtggtctggctcaccaggtgcaggggtatttaagaaggaagtggtcctttgctcccctgagacacctcatcagttggtcagataggagcagtggagaccacatccgcccctgacttgtgtgctctgggggtcctgcaggtgttcagagcataggccgtgtccccggtgcagcggagtggtgcagcctggcacttctaactttaagttggttgtacaatcacattggactgtcctccagccagtgaggaaatgttgaccacacactatatgatatgaaggggatgaattaaatctttaatgtccctggcagtgtttgagtttcaatgacatcaaattcaggcattactttggcagaatatctctgcccatcttagagatggggaggctaaggcctgtatttatggtgttctgtctgagcttctgtaattcgggtgtgaacactaacatttctcaacagccctgatcatttaggccccgcccttcctccccgaaggccctggagtggggccccttgggccacactccccgcctccttcctgcctctaccctcggccaataggctctgactgtggttacttagatcccagcactagtggtgctgggccagacaccggaaaggcagctctgatattgaggagggtgtgacctgagccccttgagacttagaatcacctctcccctacaggctcagctactcagataaagctgaccctggcatcagggggacggaaaggactctagcctcagctgtgagtctggattctccccagggctctgcttccctgctttgcagcttctgacaagttatctgcccacccacctctgggcctcagcttttctatctggaaaaaggaggtggggattggagtcagctgcctcctggggcccttccaaccctgctctgggttcccgtaagccttcctcagccaggataggtgtgatagaactacatgctcagaggaagccaggcctgtgatgtatgggacacggaggagctgggtgaactcttaaggagtcttctttaattactaaattctctaagttaagcaggaacaatgaggacacaaagcacttaatcagaaatacacaagccttgaaggctgacaaacagaatggagtgatggctcccaaagagggctagctcaagtctctgcaggacaggctgaacctccctcagggctactcttaccttccatcctactaggattcccaaggtagggaatagctgggcggcttctatccaagttgcttctgcctaattcactcttgcctggtgaggctcagaatttgagggtagttggccgggcatggtggctcacgcctataatcccagcactttgggaggccgaggcgggtggatcactaggtcaggagattgagaccatcctggctaacatggtgaaaccccatcttcacaaaaaatacaaaaaaaaaaaaatagccggacatggtggtgggcacctgtagtcccagctactcaggaggctgagacaggagaatggcgtgaacccaggaggcagagcttgcagtgagccgagatcacgccactgcactctagcctgggcaactgagcaagactccgtctcaaaaaataaaaaataaaaaataatttgagggaagtttaggggtctatcccaaaggcttgagtatgtgactacagccattcaccccaaaatgctgctccctgaatagcattcaacagagctccctgaggttccattaatgctggtggtctttacatgccatgtagtagataatttctttatgcttaccagaggctttcacttgccgaacatcagtgatgctttttagaattatagactgttagagttcagggttctaaaagatcaccagtccaatctacagcatgaagtttgactctccaacctcttcttgcatgctactaatgatggagcgctcacttccaccacgattccccaccctccaatgaggcagcctaccagtttgtgatggttctgaaatttttcttcatactgaactgaaacttctggaacctcctcatgcttggccacaatcctgtcctccaaggctgtagatgacacgccagcagcttctacccatgacattcctgctgagatttgaagacaatatcaggtcttcctgcctgttctcaaggctgaccaactcttgttctgttaacagcccctcctataatttggttttgagccacctcctacatcctgtcggtttctttgggacgtcttccagtgtgtcagtttaccctctaaaatgagagtatactctagagcatctcaccagccccaatctgagctcatgtggctctccatggctctggacactgtcttctcattctaccctgactctgtctgcttttgacagctgtgtcctactatctcaggtttgcttcaggttgaacctactgcagggctctggtctgcttgacagcaaggatctaggccccaaagctgtgagtgtcacctgggtataggggctctatttccagccttcttaggagaagggctgccctggagctcaggaggactgaagagagcatctgttccagccctgacccttcacagatggggaaactgagaaggaacatgacttacctaaaggcacacagtaaagctggaattgagtctcctggcctcaaccccaggcctgggttctccctgcatcctgtactgccggcagcctcctctgcagctttcttgctaccaagtttccgttgactcaggaagctgtcatccctcttccagagtgtagtccggataccccaccccagccctatgctccccacccctcttttggaagggaaaattcttatgtccccctcccaactcccccccccaccaccaccacccacgcacacactgcaggtgccgtctgctccatgacctctgaggaggaagtggtcaggaccccaacctggggattttccactcagtagttgcttgttgagacctacctagctcagggtcacatgtcctcaggcttttgtgtgcactaggatcatctggctagactgctaaagatggagattccggccaggcgtggtggctaatgcctgtaatctcagcactttgggaggctgaggtgggtggatcacttgaagtcaggagtttgagacctgcctggccaacatggtgaaaccccgtctctactaaaaatacaaaaattagcctggtgtggtggtatgtgcctgtaatcccagctactctggaggctgaggcaggagaattgcttgagcctgggaggcagaggttgcaattgagccaagatcgtgccactgcactccagcctgggcaacagagccagactccatctcaaaaaaaaaaaaaaaaaaaaaagcagatgcaaattcccagcacacatactgtaggtctagaatgcagcctggacattcgtgttaagcaagctttccaggtggctctagtacaggaggtccatagaccacattcctaagaaatactgttctgggcatcataacatactggggcaagtccaatacagatttcaaaatcctgtccttcaggagccctttgggctagcaggagagacagacagctaaccagatgtagatactctcaggggtgcctggaacatggagaaaacaggaactaactccgccccagggcaggtcaggagagaagcagagaaatggtgtgtgcactgagcctgggggcccgaggtagacctaaccacgcgtcacggtgggatggtcttgagcatgtaagatgtctcgaacatacagatgcctgtgttgggggcaggcatgtaataggtagcactaggttattttagttgggttttgacctagcaaatttgccaacatttttttaaaaagtgataatattccacattggcaaggttgcagtgaaactggtctttttcttttttcttgagacagtcttgctctgtcacccagggtggagtgcagtggcccaatctcagttcactgcaacctccgcctcccaggttcaaacaaatctcgtgcctcagcatcccaagtagctgagattacaggcacgtgccaccacacctggctaatttttgtatttttagtagagatggggttttgtcatgttggccaggctggtctcaaactcctggcttcaagtgatcctcccgcctcggcctcctaaagtgctaggattacaggtgtgagctaccacacctagctgaaactgatcttcttgcgtgccatttgaaggtgagtaaattggtcgaaccttccaatattagacatgtaatattagatgtgtataaaattttacaaatcaatatgtttattttttaattttaattttaattttttattttttgggacagggtctcactctgtcgcccagactggagtgcagtggtgcgatcttggctcactgcaacctccacctcctgggttcaagcaattctcctgcctcagcttcccaagtagctggggttagaggcgcatgccactaccgcctggctaatttttgtatttttagtagagacggggtttcacaggttggccaggctagtctcgaactcctgacctcaaatgatccacccacctctgcctcccaaagtgctaggattataggcatgagccaccgcacctggcctaaatcaatatatttattaaagcaaattaacctgcaaattaaaaagtggaaacaatttaaacactcaacagtgaatgactaaattcatccatagggatgttctgctcatcattaaaattaacacatttgcagaatagttaatgctgtgtagtaagtgctcgtaatatatttgaaaaagtaagatatgaggaagtatatgtaatatcattgcatatgtatatgtagatgaacaatatatgccaccaggttatggggttctctctgggtcgtgagattttctttctatattttcatgtattttctgtactttctacaacaaatgcctactagtactttaactggaagaagatgtttataaataatttaagtattaagaaattgaggctgggtaccttggctcatgcctgtaatcccagtactttggaaggccaaggcaggcaaatcacttgagcctaggagtccgagaccatcctgagcagcatggcaaaattccatctctaccaaaaatacaaaaattagccaggtgtggtagcacacgcctgtagtcccagctacttgggaggctgaggcaggagaattgcttgagcctgggaggcggaggttgcagtgagccctgatcacaccactgcactccagcctgggcaacagagcaagaccccatctcaaaaaaaaaaagacagaagaaaaagaaagaaattggaatgggggtagactggggacagatggtgatagccttaactgccattctgaaggagttatcttgttttgtcaagagctggggactcaagtacaaggccacgtgctgcctgtggtctgaaagctgtttgtggaaaagagttctccaccattctctggtggtggttatctgaaagaaggcagcatttcatgagattatgaacttatttcagatgacaaaactgagacccaggggcagcccaagaggtctgccaaagcagatgacgtgggatctttgttcttgccatgtttgtgaaacatggcaatcgtcttatgcaatatttgagctcttagtatgtgcaagacactgcagttgcattatttcatctcatcctaaaagagcctcatgagaaatccgaggcatggagaggtcatacagtcacacggtgttggatttagtatttgaacccagatctgtgtgattctagaattctggagttcttaaccactctgctctgcagtctctgatattctcacacctggttctaatgctgatttgaacattatggcacagtgtgacagtgtcttaagtctccctgagcctcagtttcctcgcctgtagtgacctttacctcacagtgctgttgagaggagctgagatgagagcttagagtttgaacactatgggatcatccagttaaaccaccagacgtcctcatccccacctcacagaggaggaagcagaagccagagtgggaagggatttgcccaagtttgtaacagagctggcactagaatctaggccttctggctcccataaaaacattgtctgagttcagctaatcagtcgtggcaacaaggaagagacaaccatttatgtttatctcccttcttcctccagcccagggtggggaggctggctgctgtcacttccccagattccggagttgacagcttctctgagtcgtgcctggaccaggcttcctcctcttccctggaaagggaggattgagtcttcaccagggtggtgggggagctaaattgtcaggtctgcccagccactcagcagatttggggcacgaggacctgggggaggccccatgactccctcagtcctccaggggcttacacatgccaggctctgtgcccagcaccatgggggagaagcaggctattctagaagacttcccttgatacatcttccctccccagtgagaagcatgctttctagaagtatttcagtggttcttcagtttaggacatttttaataatttttgtcgaacattttcatagcctcttcatagtttgacttgtgtttttgtttgtttgttttttgagacagagtctcactctattgcacaggctggagtgcagtggcgagatcttggctcactgcaacttccacctcctgggttcaagcaattctcatgcctcagcctcctgagtagttgggattacaggtgtgcgccaccacacctgcctaatttttgtatttttattagagaggggtttttgccatgttggtcaggttgatctcgaactcctgactgcaaatgatttgcccacttcggcctcccagagtgccaagattataggcatgagccactgtgcccaggcctgacttgttttttaaagtgtttcttaaaattgaatctagaacatcttcttccttccttccttttttccttcctttctgccctttcccttccttctctctttctttctcttctttgtaagagaagagaaaagcatacaaaagggcttaaattttttttacccaaatcctggtctggtgaccaccgccagacttcaaccaacttttcacctctccagcatgagatgagaaaatgatggtgtgagcgagtgtgtaatgttcagtaagcacgtcagttctcctttcctggaagactgttcttaagcttttccttactatattttggaagactaaaatgtcctttattttatataatgatagtaataatctataaatagttaggccgggtacagtggctcatgcctgtaatcccagcactttgggaggccaaggtgggtggatcatgaggtcaggagatcgagaccatcctggccaacacggtgaaactccatctctactaaaaatacaaaaaattagccgggcgtggtggcgggcgcctgtagtcccagctactcgagaggctgaggcaggagaatggcgtgaacccaggaggcggagcttgcagtgagctgagattgcgccactgcactccagcctgggtgacagagcgagactccatctaaaataataataataataataatctacaaatagtttttttcagcatcctcatcagcccatatcaactctcccattaaaaaatattactcatttggccaggtacagtggctcaggcctctaatcccagcactttgggatgccaaggtgggcagatcacttgaggccaggagttaaaaccagcctggccaacatggcgaaaccccatctctactaaaaatacaaaaattagccaggtgtggtggcacatgcctgtagtctcagccactctggaggctgaggatcacttgaacccaggaggtggaggttgcagtgagccagaatcacgcaattgcactccagcctgggcaacagagcaagactctgtctcaaaaagtaaaaaaaggtcgagtgcggtggctcacacctgtaatcccagcactttgggaggctgaggcgggtagatcacaaggtcaggagattgagaccatcctggctaacacagtgccaccccatctctactaaaaatacaagaaattagccgggcatggtggcatgcacctgtagtcccagctactcaggaggctgaggcaggagaatcacttgaacccaggaggtggaggttacagtgagccgagatcgtgccactgtactccaggctgagaggtggaggttgcagtgagccgagatcacaccaccgcactccagcctgggcgacagagcaagactcagtctcaaaataaatacattaattagttaattaattaaattttttaaaaattactcatttatgaaatctgggagccactgacactgctttgtgatgcagaaagcccttttgtattacttattcctcttagaggtttgggactttcacccccacccgacaacctctggggaggggagagggactagaatgtcaaattgatcaccaatggtcaatagtttaatcaatcatgcctacataatgaagcctccatgaaaaacccgagaggattgggtttggagagcttccgcatagctgaacacatggaggttcctggatggtagcccccaaggagggcatggaagctccctccctttctcccataccttgtcctatgcagctcatcatctgcatccttcgtactatcctttacaataaaccagtcattataagtaagtgttttcccaagttctgtgagccactccagcaaattaatcaaacccaaagaggaggtcaaggaaacctcaacttgaagcccatctgtcaaaagttctggaggcccagacttgtgacactatctccaggtagatagtgtcagaattgaattagaggacacccagctgatgtctgctgcagcactgatggggagagcccctcccacacacacagaagtcttcttctgtgtggatgattattgtggtgtgagagcagagaaaaaatggtttgagttttctccaagcaaaaatcatctccgaattgggggttgggaggtttctagggcacctcaagtgcatagctggagtgagggtaatagcaggtccggccagatcccgggagaagaaagaggtggtctgagaggcccccagggatggcagcaggagccagactgcaaggatctagggacaggtcaagcagtgtcaaactcccctgagggtttccctgacagggatgagaagtcctgttctggggcccctcccccggtagagggtctgctgcctggggctgcgaggcagcccaatgcgcaggcgtggggcagggtctggtgtaactgaaggtcctgccttgcctttggaagagtcccactatagcagcccgtcctcgcattgacctcccaccctctacccacgccttgctgttgtctcatttcttccagaagcgccaagaaccagaaccagaacagccacccagaccagagccccatgaattaggtcccctcaatggggacacaggtgagtagccagccccacaaaggccccaactgccatctgtgaggttcctaccttataatcaacacagatgatacagctgctgaaatatctcatgagatctcagataggttaccttaataggagtatcgtgtctaaaatcagggaggtaattaatagtcctgacctgtgcttccctattctaggctgttgataccacacctagagtgctatatatgtttctggaaaatacatttttagaggaatccagaaaaaaattggagggagtacaatggaacaagatcagactggtgaagaatctggaaaacatgtcctataaggaacagttaaaggaacagagaatgttcatctggaaagaagatgtcaccatagggagggagggagggagggagggatgggagcaagagttgaaaaactgttgggtactatgcttagtacctgggtgacaggatcatttgtacccaaaactcagcatcacccaatatacccaggtaatgaatctgcatgcgtacccctaaatctaaacaaaagttgaaaaagaaaaatatatacatatatataaaataagttaaaatcaattttaatttgtaatggatcatgtgggaaccttctaacttgaatatctaattttctttttcaaatgagtagagctaaatacaatgaaataatatttgttttcttttctttgaaatgtccatggtacgaaaataaaaattactacatccagaaaaaaaatatatgttgccataaaacaacagttttctccacatgtctgaagtgtcctaatggagaagaaagatgagccttgtttagtgtgatacagaggtcagtattaaggcctcagggtagcagcaacatgcaggcagaattcaacacaatctcaaagaattttttgtgtggttgttgatttaaaatcatcagagctacctggtaataggaggagctccctatctctgaacgtgtttagttacagcctagaggctgttgggaatattgtgggtgaagttcaagtaccgcataagtaattggaccacaaaatccaatctgattatatataagaattatccaggccaggtgcggtggctcttgcctataatcccagcactttgggaggccaaggtggatggaatgcttgagcccaagagttcaagatcagactgggcaatatggtgaaaccccgtctctaccaaaaatacacacacaaaaaactagcctggagtggcggtgtgcctgtagtcccagctacttgggaagctgaagagggaggatcacctgagccaaggaggttgaggctgtggtgagctgtgatcacaccactgcactccaacctgggcaacagagcaagaccctgtctcagaaaaagaaaaattacctggagaacttcaaagatgcagattctagggacctaccacagaccaactaaataaaaatctcagatttgtattatatatatatagtatatatattttatttattagtatatatactatatatacgatatatattttatatatatactatatatacgatatatattttatatatatactatatatgatatatattttatatatatactatatatacgatatatattatatatactatatatattttatttattagtatatatatactatatagattttattagtatatattatatatactatatagattttattagtatatataatatatatactatatatattttattatatatactattttttatatatactaaatatgcagaagctgcatatttagtacatatatataactaaatatatatatttactaatatataaatatatatatttactatatattaaatatgtatatttactaaatatatatatatttattttttatttttatttttatttttttgagacggagtttcactcttgttgccaggctggagtgtagtggcaggatcttgactcactgcaacctccgcctcccaggttcaagcaattctcctgcttcagcctcccgagtagctgggattacaggcgcctgccaccatgcccacctaaatttttttgtatttttggtagagacggggcttcaccatggccaggctggtctcgaactcctgaccttaagtgatctgctcacctcggcctcccaaagtgctgggattacaggtgtgagccatcgcgcctggcctacatttccttttgtgcacaagcaagcaggataaggtggtagttaggagtatttgctgtggaaacagattgtgtaggttcatatccctgctcccttaattttgaactgggtgactttgaacaagttgcatgactcctctgagcctcagcttcctcgtctgtagcatgggggtaataatattactcacgactatagggtagctgtgaggagcaggtgagtcatccctctgaggcacttggaacagtgctggacatgttgcaggcatggtaagctctcagtcctcctatcctgcttttactatttttattgccattgtttcctgatttaatcatctcagcctcactcatgtggtaggtgccataattatcctgatcccatgtattaggtaactgaggcacagagaggatggccactgccttaggtcatacctagtatctgatagactcagtgtggcattggcaggtcctgttttggagtttcccgaagcaggggctagacttcctgtttgtgtttccttcctgctctcaagtagcaccctctactaccagctgaggagacgctaaaggtgaggggccacaaactcagatgctcatgggccccagcaggtaaagcaaatgacatgtggccctttgtatacatttttaataacagcaggaggtgaagactatagccaactgcagagccctatcctggccggccaaagaggaggcagctgcttctggctccagcccctggttgacatgaaggcatacattgccagttcttctttggattcttcaagaaaaattggaaatcagaattattaagtaaaagcttcccagttattaagtatcaacaactaatttttaaattattattattattttagagacaggatctcgctctgttgcgcagactggagtgcagtgatgcagtcatagcttactgcagccttgaactcctgtgctcaaaccatcctcctgctttggtctccctagtagctgggactgcaggtgcatgccatcatgcccagcttttttttttttttttttttttttagagatagggtctcactatgtttcctagtctggtctccaactcctggtctcaagtgctcctcccacctcagcctcccaaagtgctgggactacaggtgtgagccaccatgtctggccagcgactaattttttaaaaaatggggtagaacagggagaccagaggacaaaatgagaccattggcttattccttgaaagaggatctccaagtccaaagagactcgaggggctgtctctggagactggtcccactcgaaatcattcttgaggcagagaccagaagacaaaatgagaccattggcttattccttgaaagaggatctccaagtccaaagagactcgaggggctgtctctggagactggtcccacccgaaatcattcttgaggcagagaccagggttctcatcccttagccccatttcccacactctctctgccagctctgactgtacttccactctgtgagtttttttatttttatttttttgctttttcatctctagctataactgtccagctctgtgcatcagaggaggctgagcggcaccagaaggatataaccagaattctccagcaacatgaggaggaaaagaagaaatgggcacaacaggtaagtccaggtgcccccaccccctgtctttctcctgctcagctaactttggtgaatcccagagtgagtgcctaccttaggtttttgttgctgttgtaagagtcccttactcattttaccaggaagggagtcctttatctgttgaacacatatttttatcagggcactgtgtgctgggcacattggttaaaacaagcagagctggcagctgctttcacgaagctgagagtctatttgggaagagtaaaagctgttgatgccactagattaattgcctttctgggcccacctcatggttgggtgggaccacggaactcgttctggctgatgcgttatagaaagaagaaccagtgtcacttctagggcaagcatttagttgccagttcaagaccctcaaggtctttctgtctagctaagtgacgggactgttgtaatggccgctctatcagcctgatctctgggtgattatccctggataatcctggataatccctggcagcagagctccctgccacacaaaatgggtaggtagtgagggcaaaataaacattttgtcttaagccactgagactttgtcattgtttgttatggcagcataatttagcttatatgactgagatgggacatcagatgctaaacacaattacacagaaatacttactgcaaatataagtgctatgaaaagtttacagtgccgtgaaaggacataatagaacccttaaccaaggctgtgggatcagagaaggcttctctaaagggatgacacggaggctttaaaattacccagaaatgaaaattgagggacattctacagaatttccagcctatattagtcaaatgtcaaggccatgaaacatgaggaaagactggggaacaattctagattgaaggacactaaagtgatgggatgactgaatgtaacctgcagcccaggatttccttttcctcattctaacttggtcactcacccttcacctctctttgcctccatttcttcctttaccagagggaatgggtagagcagcaggaaagatttggtggtgtacacaagttttctctaaattttctttagtttaaattataaatatgaaatatgttcagggtaaatattcaaaattctgaaatttaaagtcactgctttaagatagatctgggccaggcatgcctataatcctagcactttgggaggccgaggcaggcagatcacctgacgtcaggagttcgagaacagcctgggcaacatggcgagaccaccgtctctacaaaaatacaaaaattagcccagcctggtggcacatgcctgtaatcccagctacttgggaagctgaggcaggagaatcacttgaacctgggaggcagaggttgcagtgagctgagatctcaccactgcactcttgcctgggtggcagagcaagaatccatctcaaaaaaaaaaaaagtctccgtagttataaactaatcactctattaaatcacatggttatttattactgaaagattttctgctagattttattcacccagtcgacttgctgggggagattactatgtgcggggagggtgcggcctcagcactgccaggggtacagggagaaatcgggtccagaccctgccctcaggtgttcgctgggtggaaggctgtggcaagtgcccccacacacattaaaatggttttagcttagacgcatttttcagaaacacaccttttatgaaaggtaagttaactgtatgcagctgctggtctttagtttgttttggtagagttaccatggtaatgtcatttggccctgaccattacctgtggaatccttaaccttgagacttgtaagggccccaggtattgtcaagttgagtcccttcattatacagtggagggagctcattacccaggaactcagtggtatgctggggctagaatgcctaatttaagtcatgccttgcctctggatatgccccatcagctgtaccttacaggtggcaaagggactggaaaacatctcaagtgggggacaatgagaatggctgggagggttcagcctggggaagagaaatgttgggaatatgggccactatgctcagatctctgaggggctgcctgggttgagggaacagtctggctctgtgtgaccccagagggcagatctgggacctgatggtagaagttggaggtcacttgaaacagtaagccttacgcaagcagagaaacaccatgggaggcttcctgccttgaggaagcatcaggattagaatactcctaaatccttttccatgtggataattacatgggaaccccctgctaaaccctaaagaaggcaaattctgccacgcttgctgtgtcttggaagtcttgtgtcctttctgggcgtgtcattcccatccctcagaggaagggttaggactctggtcaccaagttccacgtaggcccaggtgaggggataagagatgctgtgctgatcctgctcaatctcagtcctgcccgggactctctgcccccaggtggagaaggaaagggagctagagcttcgagacagactggatgagcagcaaagggtcctggaaggaaagaatgaagaggccctgcaaggtaagggtagagatgttccactggccaaggtggtggggggtgcttccttctggccccacctgcccagttcacctgggcactcccactgttccctccctgtctgtctgatccacaagcaattgactcaaatctacaggatccttggccctagagggttgatggacttttcctttggggcatggatttaagaggctggcatcaacctttctttttccttatttgagaggtatttttttctttccatttaaaaagcaatccatatttattaagggaaatttggaaaacccagacaaatagaagaatttttaaatacacatattccatccccacgatgatggtagctcttatttattgttagattgattattttgaaaaatgactttctttcctcttatatcaccaaaggtgatcatcacagaaaatttggaaactgtagattagacaaaaagatcttacagcacagtggttaacgtctcattcttggctgggcattgtggctcacgcctgtattcctggcactttgagagtccaaggtggatagattgcttgagcccaggagttcaagactaacctgggcaacatagcaagatgctgtcactattaaaaataaatagatagatagatagatatcaaactttccagtttggtaagatagatagatagatagatagatagatagatagatagatagatagatagatagatcaatctcattctctagagctccagtccctgggtctaaacttcagccccactgcttaccagctctgtaaccttgaagaagttactttacctccctaataggttgtttgtaagaattaaacaatttaatgatagatagaccgagatagaatttagaacagtgcaagttacttagcaataattcttagcactgattttattattgagaaaatttaaatcataattccacccagagttagccactgttacccctttgaaatagattccttccatttctttttctgtaatatacatagaatatacatctatacacacacactttggggtgaggaagtgaattattttttccactttgtgttgcattagcatcctgtcattaaactcttctataccaagagttttagtaactacatagcattccaatatgcacccttgttcatttaactgagtccctttgttaggcatttaggtaatttcaagatttttctcattgtctataacagcaatgatacttacataatcaaccccggttttataacatctttgtcacattcatgatttcagcattagaataacatcctaatagaattggtgtggtaaagtttatgtatatctattttttattttggtaaaatagacataagatttaccattagtgacatttaatacattcacagtgccatcaccccaaaaggaaactcccacccaccgagcaggcactttttttgtttgttttgtttttgttttttttgttttgtttgtttgtttgtttgagacagggtctcgctctgttgcccaggctggagtacagtggcacgatctcggctcacttcaacctccgcctcttgggctcaagcagtccttgcccctcagccttctgagtagctacaggcgcgtgccaccatgcccagctaatttttatatttttttgtagagatggggttttgccatgtttcccaggcagatctcaaactcctgggctcaagtgatccgcccacctcggcctcccaaagtgctgggattacaggcatgagccattgtgcccagcctaagcagtcacttcttatcttaccactagcccctggcaaccaccaatccactgtctgtctctatggccttgtccattctggacacgcatataaacgggattgtataacccacatgatcacccacatctgacttctttcaccttggaatgttttcaccttgaaatgtttccagggctcatctgtgttgcagcatgcatctacactttgtttctttttacggctgggtaatttgccattgcacagacacaccacactctacccattcatcatcagttgatggacacctaggctgcctccaccatttagccactgtaaatagtgccactagtacaggcacctacttgaacagctgttttcagttccccctgggtgtacacccaggagaattgctgggtcatacgatcattctgtgcttaactttttgaacaactgccaaactgttttccacaggggctgtaccactttatgttcccatcagcaacccacaagagttccaatggtggcacatccttttcaacacttgttattttctgcaacacctgttgctatcctagtgcacataaagtggtttcgcattgtggttgtgatttgcatttccctaatgcctaattctgttgagcatcttttcatgtgcttcttggtgacttgtgtatcttctctggagaaggttatgtatattactgatgttactgaaattgaccttgaaaatgctttactgatttttcctttcatcatgagtattcgcatggcctttccccagaattatttatcttcttaaaacatggctgtggctgggtgcagtggctcacacctgtaataccagcactttgggaggccgaggcgggtgtatcacaaggtcaggagttcgagaccagcctggccaacatgatgaaaccccgtctctactaaaaaataaaattagtctggtgtggtggtgtgcacctataatcccagctactcaggatactgaggaggctgaggcaggagaattgcttgaacccgggaggcagaggttgcagtgagccaagatctcaccactgtactccagcctgggtgacagagcaagactccatctaaaaaacaaaacaaaacaacaaaacacatggttgtgattattttgtacgtaaaagtgtatatcctgttcttttcatttaacattgtatcaaatatgtttccaagtaattatgctgctactaaaatgtttataaaggcaagaccgtaaagtacatggctttccttatttcttgtgagtctagacctctagatctcaaaacagcttttgcataatgttgccggtatttcacattatgtccttagatttacccagatggaataactagaacagaggtctgaatgattttaagaatcttgaaacatattgcaacattagcacacattattgcaaacattgtgaaatggaattaaagtccttgcctggaaattgaagaattgtggttttgtgggtgtgggtgtgtgtgggtgtgtgtgtgggtgtgagtgtgcgtgtttttttttttttttttttttgagatggagtctcactctgtcccccaggctggagtgcagtggcatgatctcggttcactgtaacctccgcctcccgggttcaagtgattcttctgcctcagcctcccgagtagctgggattacaggcacctgcaaccacgcctggctaatttttgtatttttagtagagacagggtttcaccatgttggccaggctggtcccgaattcctgacctcataatccgcctgcctcggcctcctaaagtgctgagattacaggcgtgagccacctcgcccagccgaagaattgtgttttaataataccataccctgttgaactggggctatcactcaacctccttgaatcttggttcagtttctctatctctaaaatctaccttctgtacctcacaagactttatgggaaaacaactttattctccaagcattgctttgatattatttttagcgttacaaatatattaataagaagaatttcctactgtaacacccaggggagaagagattgcctgtcttgagtttttcccattagtcagaattcttctatagttatttttaaattgtttggcacatactaagtgctacataagtctataatgaatgaatgaaagcacaggatggtggaaatatatgacattttatatgtatggggagaggtacacagataaccaggagagactagtggtgattttccacattcgatgaccctttgctgtcttttttttattttttaaattatcatatagtaaaattgactctttttgaggggatgtgcattttcataaattctaatgcatgtatagattcttttttttttttttttttttgagatggaggctcgccctgtcacccaggctggagtgcagtggcgtgatctcggctcactgcaacctccgcctcccgggttcaagcaattctttgcctgagcctcccgagtaactgggattacaggcacgtgccactatgcccagctaatttttgtatttttagtagagacagtgtttcaccatcttggtcaggctggtcttcaactcctgacctcgtgatccacccgccttggcctcccaaagtactgggattacaggtgtaagccaccgcgccctgccgcatgtatagattcttgtaaccatcgccacaatcaggatacacaacagttttatcactcccaaaaagccgtctcaaaatacccttgtattcacatccttctcccaccctaacccctggcaattactgatctgttctccatctctgtagctttgtcttttctaggctattacataaatgaaataatacaatatgattttttatattggcttccttcatgcatcacgatgcctttgacattcattccaattgttgcatatctcaataattcatacattttcattgtggagttatattccattgtttactcattcactgttgcaggacatttgaggcaattatgaatagagctgttctaacattcatgtgcaggctttgtgtggacataggttttcatttatcttgggtgaatacacaggagtgggataggtcatatgataaatgtatgtttagctttatgagaaacagctaaactgtcttccagagtgaccactattttatatcaccatctgtgatgtatgagttataccgttgctacttcatgccaatacttgctgtcactggttttttattttagctgttctaataggtgtgcagtaatcttcaccataggtttaatttacatttcaataacaactcatgtgcttatttgctgtctacatatcctctttggtcaaatgtgtgttcaggtctttttcccatttaaattaacttgcttgtccttactgtggagttttgagatatctttatatattttggacaagagttctttgtatttgcacatattttctcctagccagtggggtgatttttttcattctgttaataatgtctttcacaaagccaagcttttaattttgataaagtccaatttatttttttctttgattatacttcttatgtcatgtctgtgaactctttgctaaaccccaggtaacaaagattttcttcaatgttttcttccaaagccttatggttttatatttagatctaagatccatataatcatgtggtctttctttctctctctctttcttctttcttcctcttttttccctctcctctcctctcctgtcttcttttttcttttcttttctttccaacaggatgtcactctgatgcccaggctggagtgcagtggtgctatcttggttcactgcagcctccacctctggggctcaggtgatcctcccactacagcctcccaagtagttgggactatagtgcacatcaccatgcctagctaatttttttttttttttttttttttttgtagaaatgagtttttgccatgttgcccagcctggtctcaaactcaaatgaaccactggcctttccctcccaaagtgctgggattgcaggtgtgagccaccgcatctggcctggtttttctttagatggttaatatagtggattacatttgtttgagttttcaaatatagttatccctaggtatccatggggaattgattctcggacccactttggataccaaaatctgcaaatgctccagtcacttatataaaatggcgtattatttgcatataacctatgtacatccttccatacattttaaatcatctctagattccttataatacctaatacaatgtaaaagtaaggtgaatagttgttagactgtatttttatttgtattatcttttattgttgtttggtattttttatttttattttttcaaattttttttatccacacttggttgaatctgaggatgggaaacctgcaaatacagaaggctgactgcattgaactagccttgcattcctggcataagctccacttggttgtgttatattactctttttatgtattgctgaatttgatcctctaatgttttactgagaatgtttgtgtctatgttcatgaggaatattggcctgtagttttcttacactatctggttttagtatcaggataaagcttgccccatgtagtaatgtcccctcatcttctctttctgggagagattatatagaattggtgttatatcgtttttaaatgtttaatcgaatttttcaatgaaataatctgtgcttgggcatgtctttcaaagtgtttaacaacaaattcaatttctttttaatatttaaaggaatttcaggttatatacttcaccttgggtgagttttggtcattttttttttttgaagaattgttacattcatctaagttgttgaatctaggtgcataggattgttcagcatatttccttaatatcatttcatatatctgctgtgtctgtagtgatatttcattcctgatattggtcatgtgtatgttctctcttttctttgtcagtcttgcttgaggttatcaattttattaattatttcaaagaaccagcttttggtttcattgatttccccacccaccccccttattttaccattttccatctcactggtttctgttattttcatttccttccttctgtgtgcttgctttatatttggttagcttttttttttttttatttcttttcattctttttttttttttttttttcctgagacagggttttgctctgtctcccaggctggagtacagtgtcatgatcatagctcagggcagcctcaaactcctggaatcaagcaatcttcccacctcagcctcctgagtagttgagactataggtaccccaccacacctagccagctaatttttaaatttttaacagaggcaggtctctctatgttacccaggctggtctcaaattcctggtctcagcagtcctcctgactccgcctctcaaagtgctgggattacaggtgtgagtcactgggcctgataccttttcctgatttcttcagcttagaatattgatttgagacctttctccttttctaatataaacatttaagctataaattttctcctaaactctgctttacctgcatcctacatattgatggttttattttcattttgttgagttcaaaatattttcagtcttattttccttgagacttcctctctggcattgaatatgtggaagtgcatttccaagtgttgggagattttctggttctctttctgttatttgatttccagtttgattgcattacagtcagagaacatagtttgtattttgctgcttttatagtttgttaaggtttgtttcatgactcagggtatggtcgatcttgtttcatgtatacttgaaaggaatgtgtattctgctattgttgggttgagtattttagatataaatcaattagataaagtttggttaatgttagta

SEQ ID NO: 372 - DNA, 31436 bp, Homo sapiens
  source 1..31436: mol_type = other DNA
ttctttcttcgtgttcctgtgcgggattggtgtgcccaggggtttggctttccaattggctaacgccggggtgggtggggaatgtggggagatttgaatttgaaaccggtagggagtgataatccgcattcagttgtcgaggagtgccagtcaccttcagtttctggagctggccgtcaacatgtcctttcctaaggcgcccttgaaacgattcaatgacccttctggtgcgtaagggggaaagagctgggggacgggagacgccctaacgccctttgcctctttcagctcccttcttgggaggcaagcaggaggcgattttagggtcgggctggggctcattcagttgattgatttttctcaaatatgctctaagcatctgttacatgccaagcactaatcaggatgctaaggataccgcagtgaaacagtctccgccccgtggggcttacattcaggcggggaatactgtcaataaacagcggtaatggagaaactacagcagggcgaagggaatggacccgagacgttggtagctacttgattttcaagtccgagagggcctcactgataagaacactggagtattacttgtagtctgaacttgtgcatttcttttgtgtattccatttgggcataaaagaaggaagattagtaaaggcagtttatgggtgtaaaattagagcagcagcacttattgaaaacataaacaatgaagttatggctgatattgaccacttatacctcaagcaccgtactaaggctttacatcgattattagttatgttaatttcccaccaactctaaggggtaatcctattattattttattgataaaaagactgagacttaaatttgctcagtgctacattaccaaagtgaccggactggaatatgaacccagcccccatcgtgtgctcttaacaccgcaatgcacagcacagtaaccaggaagccttagctgtgtttggtaggcactcatcatttaagatgctgtatgcggccgggcgcggcggctcacgcctgtaatcccagcactttgggaggccgaggcaggtggatcacgaggtcaggagatcgagaccaccgtgaaaccccgtctgtactaaaaatacaaaaaaaattagccaggcgcggtggcgggcgcctgtagtcccagctgactacaggctgaggcaggagaatggcgtgaacccgggaggcggagcttgcgatgagccgagatcgcgccactgcactccagcctgggcgacagagcaagactctgtcttacagaaaaaaaaaaaatgctgtatgctgggactgtgctactagatcttgtttattccttccaaaagccaagtgaggaaggtactgatattgacctcattttacagatgagaaaacagaggttttgtatcttgcacaatcagtaagtggtagagctaaatattaaagctcatgatttattcactatcatacactatttcgtggttactcattacgtctctaagttttgtcagccaacgtgtgaatgaaaatacaactactcacaaaggaaggccaaatgagcaagtgaatcagcacaaacttattttcttagttaaaagactcaaggaccatatgatttcccgagtaatcaaaggacctactcttaagttttgtcagcagtgtggctttaaggtttttttggtttttttgttgtttgcattatagtaggttaaactggctttatcaaagatatagtatttcaggctcacagttacagaaataatactaattattaatttgatgcttaatgtgtatgaggcactgtggtgatttttcatattccagtactccagcctgggtgacagtgcgagactctgtttcaaaaaaaaaaaagcaaaaaaacccccaaaatttatatttcaacctaagatgtatttttatatctctacacatacatacgaaagaaaagtttcacaaaacaatgcctaactttgcagcatatgagtcatgctttttctattgtttttactttttaaaaaatgctaatcaagatctactcatggggctgggcctggtggttcacacgtgtaatcctagcactttgggaggccgaggcagagagatcagctgaggtcaggagttcaagaccagcctggccaacatggtgaaaccctgtctctagtaaaaatacaaaaaactagctgggcgtggtggtgggagcctgtaatcccagctactcgggaggctgaggcaggagaatcgcttgaacccaggaggcaaaggtttcagtgagccaagatggcgccactacactccagcctagacaacagagcaagactccgtctcaaaaaaaaaaaaaaaaaaaaaaaaatcatgagttcctgtctactgtttgacaaacatttaggggacagcagtagttgcctgggaatggtccaagctccttgctcttcctatttatttgcatgagactctagactgaagtaaatagcttttcagagaatagtattaatctatttgttcccaatcagctaaagctttaggctagtagtattttaattactttaagtcctaaaggccccatctcaggtctgctatgtgtatttactcagaaatgccttcaaatctgggactttagttaagtgaaattatgcagtataaacttctggaacatacaaatatagtctagtacaatttgtactttgtgtaacattggctttttgaatttcctaagcctcacattctttgtctataaattatcacacaggattcttgtgaggattaaataaaataacatctgtgaaatgcttagcataatgcctggcatttagtaagtgctcaaaaaattctagttgctctagtgtggttgcttttcttccatgtgtttgaattgcagttgacatctttaataggtctgatgtattgatattagccagagatggattatcactataaatttttattctaggctaaacattgagggatagacaattttaattactttatttctagaaactgatagtagttatctttgtgactctcttcgagtagagttgacaccaagtattttatttgctatattcaatccttagtaagaaagccatatattgcctgtaatatatgatgttcatctcaaaactgtcgtttgctcagttgcctgtgttcctttgacccggttgatataaagggcaagatgatattgttcttcatagagaggccttctttgtaatatcaaatggatgcaattttttacatttaaaaaaagcagtttgttaatgacatttttacatttatattcactttattatgacatgttttaacttaagatcataagtaacattagataatatattaatgttttctatttcctctaggttgtgcaccatctccaggtgcttatgatgttaaaactttagaagtattgaaaggaccagtatcctttcagaaatcacaaagatttaaacagcaaaaaggtaatatagatcaccaaagaacaatggttatgtgatcttataagttttaaagttatgaataacaatatttaaagatgttatagcattttttaaaatgtgaagctagaactatatttaaattttatttgatggatttatgaaagggtcaagtacagaataatgctgtcatcattacattgttatataaccaggaaaattaagcaagatacttatattgatatgtagcttcccttttggtaattaccttgacttgtcagggaatattaggaaaatcagaaaggtgttagatgtgtaaaaaaattgtatgagtaattatttgaaaatgtacaactaaggaaagaatatattgtttcatcaaaagttgtaattagaaatttggggccgggcaaggtggctcgtgctcgtaatcctggcactctgtgaggccaaggtgggtggatcacatgagttcaggatttcgagacaagcctggccaacatggtgaaaccccatctctactaaaaatacagaaattagccaggtgtggtggggtgcgcctgtggttccagctactagggaggaaagtgggagagttgcttgaaactgggaggcagaggttgcagtgggctgagatgacaccactgcagtccaggctgggtgacagtgagactgtctcaaaaaacaaaaacaaacaaaaagagaaagacaaaaaaatttggaaattgtgttttgtgtgtagttaaaacacattgacatcaaccatgatctgtacaattcatttttccgcagaatctaaacaaaatcttaatgttgacaaagatactaccttgcctgcttcagctagaaaagttaagtcttcggaatcaaaggtgaggagcttttatatgccagctggtttatcaagtgtatcatcaaaaacatctgaaagtattgtatttgattagaatgggttaagtgtatgaatcaaggttataagtaaatctgtaaattaatgaaatgagttatcattagaactctagcaagttttacatttctgcctaggtcattatgtttaaatgtgcccttagttcacaattataatggtcttcaattctcaatcacttctatgtttaaattgttcattacctagtaaacatttcaaaattatgtgatgctttgatttattaagtaccaccatttgagttgttttgtttttgtgtatttgtttgtggggaagggtaagtgtttttgaagaaaagtgggaaaaaatgccaatatctaagagaggtttgctactgagaaactgttaaggagtggtgagagattaaattcttaatagtcttgtggcttgtgcaagagctactattactcttttcataagtttataaacaggcaagctgcatagtactttttaaattttatttatgtattttttttttgagatggagtatcactctgtcacccaggctaaagtgcagtggcgccatctcagcttactgcagcctctgtccccacaggctcaagcgattctcctgcctcagcctccccagtagctgggattacaggcacgccccaccacgcccagttactttttgtgtttttgctaaagacgaggtttaaacatattagccagttgggcaggctaggctggtcttgaattcctgacttcaggtgatcagcccactttggcctcccaaagtgctgggattacaggtgttgtccaccacacccagccgccatataatactttttaaaagacagctggggggcgcacagtggttcacgcctataatcccagcactttgggaggcaaggcaggtggatcacttgaggtcaggagtttgagaccagcctggccaacatgtagtcaaaccccatctctactaaaaaatacaaaaatgtgctggacgtggtggcacgtgcctgtagtcccagctacttgggaagctgaggcaggagaattgcttgaacctgggaggcagaggttgcagtcagccaaggtggtgccactgtactccagcctgggcaacagagcgagactcagtctctccaaaaaaaaaaaaaaagacagccgggcacagtagctcacgcctgtaatcccagcactttgggaggctgaagcaggtggattgcttgaggtcaagagttcgagaccagcctgacccacatggtgaaaccccgtctctactaaaaatacaagaaaattagccgtgtgtggtggcacgtacctgtaatcccagctactcgggaggctgaggcaggagaactgcttgaacctagggaggcagaggttgcagtgagccgagagattgcaccactgcactccagcctgggcagcagagcgagacctatctcaaagataaaaataaagtaaaaaagttgtacaaattaataggttttttgatgtgaaaaatattcagagttggaaaaaggcttaggttgttcattcatttggcagttgcctaagcctcatattctgtaatatagagctatgttgttctgtatggaagcatagccacatgtgtctattgagcaactgaaatgtggctagtgctattaaagaactaaatttttaatatttaattttaattaatacatatttaaagacatactcgattttgttagtggaacgcttttaaatatttttggaacaacttgagtatgtgaatttactttctcctttctatgttttatgaaattaaatatacataaacatttctgatgaaaatttagcattgaattaagacgtgctataagtgtagaatacaaagaaaactttaaagacttagtacaaaaatataaaacatctcattgataattttataccaatgacatgctgaaaaaatatatttgatatgttgggttaaataaaatatattaagatttttactttttaaacacactactagaaaaatttaaatgcataggtggcttgcattatttttattgggcaggactattatagacactcttttcttagaaattgatgtaagtggtttgacttaaatttcttgaagaaactgttctgtaattttgtaatttataaagccccttagaaaactaaattacatacaagtttgtatggagccccaaaataatagtccttccccataaaaaatttcatggagtgtgaaattaataaacatgacactgatgtcacccccacctcctgccccacttagaaacatctgaaacagatttcattcaagatgttgatgcctttcttccatttttagatggaaaagatattctttttctagccattgtgtcagaaagtctgttggatataaaaagatatagtgtgaaaattatatgtcttatttagaataaagccaatgagaaaattagaatcagagcttatgctgtttcagtttttatttctttgcatctgtatattttcctcttcgggtatcaaagtttaagtcgatttctctttgtaagattctttctgagatagcataattaaatattcaagatgtgttgctatttaacattagagggaggcagtcagtagctttattcataaagttccacctgttcttttcactgggctgattaggaaaatcctgatttattgggttgaaaatttctaaacctaaaatgtcttgagatttttagaatattttatttatcagatgagtggcctacacaatgtttaacagtgtaatgtttaaaatagaaactaactgattggatcccttcatcttttctgataactgaaaaacaaatttggctgtcatatctgtgacatctaaatttgcttataagtttttttggcttttaaacagaaggaatctcaaaagaatgataaagatttgaagatattagagaaagaggtaagcagtgctttaaacttagtgaaaagtacacatgatagaaagagagttacacagatttaagagataaggattctgttgcagtgtgaggagtcctgcagtgaggcaaacatgccatccagaacagtgcctacaggaaaacagttcttacagtatttcacagatctatccgggctatgttaatgtggtatgctggcaacgccgagattaaagatagcccacttaatgaaaaactgataactgaaaaatcattatgtcagttgattacaattatatatgtggatcaaatatttatatctatccatcgttcacagtcttcctgtatgctaacttatgttaacacaacatagctagaggatttcttagtgagcatgcaatcctagctggttagactgtgatgaagttaggctaactcgatgcattgctctgcacaataggtataggccttcctcatgggtgaaataacatagagctgtgctgtttgatatggtagctactcaccacatgtgatgatctaaattaaataagaactcaattcctcagttgcaataatcacatttcaagtgctcagtagccacatgtgattggcagctaccatactggacagggcatttccaccatgacagaaatttctattgaacagtactaacctaaagaacccatttactttcctagcaatgctaagcagctcactgtgaactttgcttctctgcagtcttttttttctgtttccattgctgaccaactcttttcctcatggatatattctttcaatatattaaaatctttcatttgattacagtcgaatgttggctttcaaccaagagtatgtcagagtaactgtaaatgtctgctcagttgctctgattcttttttatgtattctaataatgttagctatcattttactgagggtacatgtaggggttgatacttacaggaataatcactgagtctcagtgagatagctggtaagtgagtggtagagccaggattagaactaataatttacaccagtgacttcattgggtatagaattttagggtggcaggttcccccccattatattaaaaatatcatttcattgtcttttggcttccacattttctgttgacaaatattggtttgggtttttttttgttttttgtttttttaatctggtaatagcagcaagaatgatggcttgccaatgcctagtacattctcctcagaagcccagctctgccttcttgaaataaaaaacatttagcattttaagctaatttgaatttgtgtaattgaagctagagaaaataactattataggtggaaataccttaaaagtgaataaatagcggccgggtgtggtggcttacacctgtaatcctagcactttgggaggctgaggcgggtggatcacgaggtcaggagatcgagaccatcctggctaatatggtgaaaccccgtctctattaaaaatacaaaaaattagccgggtgtggtggcccgtgctggtagtcccagctattcgggaggctgaggcaggagaatcgcttgaacccaggaggcggagcttgcagtgagccgagatcgtgccactgcactccagcctgggcaacagagcacagagcaagactccatctcaaaaaaaaaaaaaaaaaagtgaatagatagcttaattgtacttggaacttatggcaactaaagttcttatgttcttaaaatgcattaagacttttaagatgtatcataggtaaatatgattattcaaatagctagtaacattagaatatctacaagcataatgtcaaaatcagagatttttccagaaactttaggggtgattattggtagcatctccttatgttggcattctatcagtgaatcatttattatcaccttgtttttgtccagattcgtgttcttctacaggaacgtggtgcccaggacaggcggatccaggatctggaaactgagttggaaaagatggaagcaaggctaaatgctgcactaagggaaaaaacatctctctctgcaaataatgctacactggaaaaacaacttattgaattgaccaggactaatgaactactaaaatctaaggtatctgagcctcatgataatatttacaattgaataaatataaacacgttttttagggccgggcacggtggctcacgcctgtgttcccagcattttgggaggccaaggcaggcggatcacctgaggtcgggagttcgagaccagcctgaccaacatggagaaaccctgtctctactaaaaatacaaaaattagctaggcctattggcgggcgcctgtaatctcagctactcgggaggctgaggcagaagaatcacttgaacccaggaggtggaggttgcagtgagctgacatggcgccattgcacttcagcctaggcaagagagtgcgactccatctcaaaaaacaaaacaaaacaaaacaacatacaccaggcgattcagattcattttgttaagcaaacatgtttcaagaaatcctttctcagggacttgctttagagtcttgcaatggactttccagcatatagaggtaagtgaccacccaaacaacctttcaaaaatgaaccaacaggccagccacagtggctcacacctgtaattccagcgctttgggaagctgagacggatggatcacttgaggtcaggattttgagactagcctagcctaacatggcgaaaccccatctttactaaaaatacaaaaattagtcaggtatggtggcgtacacccgtaattccagctactcaggaggctgaggcatgagaatagcttgaactcgggaggctgaggcatgagaatagcttgaactcgggaggtggaagttgcagtgagcaacacggcactccagcctgggtgacagagtgagactctgtcttacaaaaataaaataaaaataaaccagcaagtcacattaaggaaaagagggataagaacagtagactggtacagtggctcatgcctgtatttccagcattttggaaggctgagggctggagaattgcttgaggccaggagtttgagaccagcctgggcaacatatcaagaccccatctctataaacaaattgaaaaattagctaggcatggtggtggtgcacaccggtaatcccagctactcaggaagatgaggcaggaggattgattgagcccaggagtttgagattatagcgagctatgatcatgccactccactctagcctggacagcggagcgagacttgatctcttaaaaagaaaagaaaaaaaaattaaatcaatcagtaattatggtgtaggtcaaagactgttctctctaccaaagtatattaaagtcaaaaacataaccccagtgataggtagaaaaatcaatatttgtgtattttaaatatgtcttagcagaaaatatttctgaattttttacgtgtttgttgtatttagttttctgaaaatggtaaccagaagaatttgagaattctaagcttggagttgatgaaacttagaaacaaaagagaaacaaagatgagggtgagtgctgcccttggcaggtttgctgtgtctggatctggggatcagtacaactttctcatttcctaaaacaggtatctttgttgtgtagggtatgatggctaagcaagaaggcatggagatgaagctgcaggtcacccaaaggagtctcgaagagtctcaagggaaaatagcccaactggagggaaaactgtaagtgagtgaatgtgaagagaaattgttaagtggaagcaattcttgatttgagtctcttcacaaattattgtttactgagacttcaaccttctgttagtacttatctcattgcctccctccagttgccctatttctctttttaaactagaatgagccctaatcattctcaaacatgttgtgctacaaagttgtatgagtgcattacttttgtacatcttctgtattattaatgatgaggaaagatttcatgatcttatgaaagtggtcattagattgaaattgagaaacactggtataggaaattgtgatttatgcacaatcctagcctttgattttgagctttaatatacatataataaaatgtgtggatagtaagtattcagtttggtgactttagcaattgtatacacctacgtaaccactaccaaacaagatagagaacattttcatcccttcagaaagttccttcataccccttcttgtccccctgctactgcctatgtcatgtccccatccccataactactttctcacttacatcatcataaattagctttgcctttttttatttattattattattatttatttttttttttagagatggggcattgctttgttactcaggctggtctcatactcctggactcaagtgataccaccctggccttcagagtgctggagttatagacatgggccactatacctggccagttttgcctttttttaggacatgcaaaagagaaagagcatgtgtgtgtgttgcttcttttgtttgatgtaatttttcaagattcatccaaaccgttctgtatactgtaatttttcctattttatttctgagtagtggttcaccttatgaatatacctccatctctttactcttctccttttgatcattatttgggctgttgccagtgtctgccattaaaaagactgctgtgaacatgttttatgtttttttatggacacgtttttatttctcagagaaatttctaggagtagaattcttgggtaatagggtagtgtatatataatgttttttaaaactcagaagtgtttttgccatttttatacaccccctggcaatgtatgatagtttcagttgttccagattctcaccaacatttaatgttgtcagtctgtttgattttagcctttctactaggtaggaagtggtatctcctttgtgattttaatttgttaccatgaatgttgaccttatttttatgtgcttattgaccattttatgtgcatatcaccttttgcaaggtgtctattgaagtcttttgtccatttcttgcattggacagtttggtggaggtaaacagataagtaattgaagaccaggtagtctgggacaaaagctttatgggcacacaaaatgctatttagtatgttggatgggtggggaaaccaggaagaccacaaaaagaatattatttctaacacttgggatactgtaatgatggttcttgtcatcataggtttttttgtcagtatatattcagaaaactttctcacttaaataaaaattttagtcttctattttgatgtaaattgtgaatttgagaaattacataaaataatagttaagagttagggctctgtagtcagcctgcctgatacaggagtatctggtacataagcattatgtaagattattaaataacgaaactagaatgtattaacatatgcaatttttgttttagtgtttcaatagagaaagaaaagattgatgaaaaatctgaaacagaaaaactcttggaatacatcgaagaaattaggtaatatgagcagtagctttaaattgaaccttatttttttaatactcagtcattttcatcatttttctgttattttccctgtgcctaaatagatgtgctttttaagataatttgttttaatgcagttgtgcttcagatcaagtggaaaaatacaagctagatattgcccagttagaagaaaatttgaaagagaagaatgatgaaattttaagccttaagcagtctcttgaggagaatattgttatattatctaaacaagtagaagatctaaatgtgaaatgtcagctgcttgaaaaagaaaaaggtattacagtgttttatagttactttgtttagataagtgttacatacaacatttaggaaaaatactactatgctaaaacaaccttttaaatataattagctatactaacattttaaatataattagctatatagctatacaacagcaaaaacctgtactgcattttagaatattttactcttataatgtttgttttctgtttatttcaatacagcatattacctgtcttgattgaaatatatacagtcatataattcttgacttttccactaggtggctgtgtaacaatcagtagataacacagaacaagatttgtgggttttattatttagcacatagtatatattacatggagtaatgatacaaagttcacagttttgttttcttctttggaaataccatgctaaaagcagtgtaatggaatattatgggagtccaggtttctcagtcttaatgttcttatctaattccagtattcttgatgttttgcgttttctagaagaccatgtcaacaggaatagagaacacaacgaaaatctaaatgcagagatgcaaaacttaaaacagaagtttattcttgaacaacaggaacgtgaaaagcttcaacaaaaagaattacaaattgattcacttctgcaacaagagaaagtaatttaccaccatatttttttaaactgttcattttgtgtcatacatttccctatgtctctgaacacctttaaattgtgtatatcctttgatctaccaattctatctttagagtcttatcctgaggacataatcatggatatgctgaggatttagctacgtattttcactacatgttcaccctagggttatgaataatgtgggaaaatgacaacagatacagcaaaatagggaatttttaaaaaattttctggctcattcttgtgttatttaggctatataaacatttacacttaccttgtaaaagactgtctaattacagaagaaacaaagcaatttttaaaatccagattatttatagaacattttacatatcagtgagaagaaagaaagtccactgaaaaattatgggcataggatggaaacagagaaggagaagttctggcctgtaaatatagaaagatactccaccttagtagtaaccaaggaagtagaaataatatttttttcacttacaaaattggcacaaattaaaacatttgataacacaaaatactggtgagagttaagccaacaggtacttacatgcactgatgtgaaatattatagtgttggacaacctacaacagctaaaggaattgagtagatctatatacactgacctggaaagatttcagcaacagagtatatatcatttatatccctccccaaatgtatatgtatatataagtgtaaagaaaaataccagaaggcatatatattccaaactagtagctatctctgcaatgggaaaactaaaattagggggggaagtcgtcaaagataatattaacatcatttgtaatgttagaattatttcacaatggtgatgtatttgtatattgtatagcttaaaaaataattttatgtaatatggaaatcaccacacactttttacataatatgtgaaaaataatgttaatatcaaagccagttgtaaaacagatatatatatataaaatataattttagattaagaagtttctgcatgtgcgttgcatagaaaaaagcctaagatgatatttgccacaatgttaacaaggtataggaaataatctatgaaaacaaatatgctatttctatattgttttaagtttccttgaatctgttgaatttaggtttcatccttctttatctgtacttttttttgtctcctagtacaacctcacaatgccattccaaattattttggtggttttctgtttggatataggaattatcttcgagtcttcatcagaagctctgttcttttcaagaggaaatggttaaagagaagaatctgtttgaggaagaattaaagcaaacactggatgagcttgataaattacagcaaaaggaggaacaagctgaaaggctggtcaagcaattggaagaggaagcaaaatctagagctgaagaattaaaactcctagaagaaaagctgaaagggtttgtattaataggatctcatgtttatgtatgacttcagatgtatttattttgagtactttttttagtattctcttatcaatcatgtgagcgtgttaggttggaattattttataattaagtagtaattattaattattttacaattaagtagtagacacagaatgtgaacacaaaatgtacatgcaaacaagtaagacagccccctcttttaagttaaaagttaaaggttttgccccctttttttaaggccaaagagagtttaaataaacaaatgacaaaagttttacacttctttactactctgctaatttctgaaatttattgaacatcagcattagaacaataatcaactcagggctggatgtggtggctgatgcctgcaattcccatactttgggatgccaaggtgagaggactgcttgagctcaggagtttgagaccagcctgtgcaatatagtgagacctcgtctctactaaaaattaaaaaaaaaactagctgggcacggtggtgtgtgcctgtagtcccagctacttagaaagttgtgggaggagaatcacttaagcccacgagattaaggctgcagttagccgtgatcacgtcactgcactctagcctgagcaacagagtgagactctgtctcaaaaacaaacaaaacacaataatgaacttgggggaaaaaaataaagaatccctcccattaataaatagcattcccatttttgtctatgcacttacatagtgtaagttatacctttaattacatttttccgggagcacaaacacttcagaaatagcaatcaaaatgcaaagcaggctggcacaatggcacatgcctaaagtcccagctactcaggaggctgagatgggaggatctttagagcccaggagtttgaggctgtaatgctcaacgattatacctgttaatagccatggcactctagcctgggcaacgtagcacaagatgccacctcaatcaataactgataaaaagcaaatgagaaaaaataattataactgggaaacattcagaagtaagaaatctcttatttacagtagaaagactgaaatcttggctgggtgcggtggctcacacctgtaatcccaccactttgggaagccaaggcagcgagatcacaaggtcaggagttcgagaccagcctggccaacatggtgaaaccccatctctactaaaaatacatagtaaattagcctggcatcgtggcgcacgcctgtaatcccagctattcaggaggctgaggcaggagaattgcttgaacccaggaggcggaggttgtggtgagctgacatcgcaccactgcactccagcctgggcgacagagggagactgtgtcccaaaaacaaaagaaaaactgaaatctcacttttttcccgaactctagttccttataatttctgccacattatgtttccttctcccatacacttatttatttcattttgttttgttttgtccatagtaattgctaattttttatttattaagagaaactattccttagcctacatattcatatttcatagttcaggaacacaggttagtgacaaacactactacatttatttaaattaaaaagtctgatttgattcttgagttcaaattgcaaatatttaaatccttgggatctgatcattaaaacacttgttgtcaaaggactgtgggctagatatgagtttgtattattgtaatatatctcacacctgtgtatctgtctcagtggatacttttgttattaatcttttctgttttcttatgattagtgatgcaaatgaacagcaaggtttttcatatccctgcttttgggggaacaatacaaaattgtaattaggggtgttgttctatactacagccaatctcagggaacaggaatcttgggaaaataagataatgtcattttaagagaggaaagaaaattgagataattttttattccaactcaaaaaactgtggtccaatggtcaagagataaggatttttattactaattctgttagctagctggttgattctgagcaaaacaatcttagtttctttgatcttctacttcattagatataaaagagttttattagatggtctctaagatcccttctagcctggaaatttcaagcttaagagaaaaacaaactaagaattgaaaataattcctctaggggacagggaagaaaatatttttattataaactctttagtcatatttgattgctcttgctgtggtgtgtatatttttgaaatccggcacttgttacagaatgaatttgatcagctatttttcttatctcagtgtccaacttagtctataagtacacaatgcttatttacaatttttagttctgtatattctttaaaagatctctcataagctcatatgcatatctaaaaattttatcaccactttggaaatatattatttccaaaatatccctgagatttaatagcatatgtatataaaaatgacttaaaacccattctgtctatgcaaaataatccattaaagaagttattaagtctttcagtaatagagtattatgtgggttattcatataatcagaataaatccacaaagtcttgtaactctgtagtttaaaatgaagtggctttaattgttcatggtatttctcaagtgtctaaatggagagaatgaaactttattcaatccagatgttttttgactggtaatcttttgcagtctttagtcctggctagtatcttaagatttggttttatagtcttttatatcctactaccttcttcacccaaatttttaaagtaaaataagcaggaaagataagttgaagctagtagaaaaatgcataaaaaacatgctttcgaggtaagtcataaattaggatctgagctatttagcaggtaatgcagtggtgaagatatgagctatatgattcacagtttcaaaggtaaatactattttctttcttagggtagtaattgtaggtggcattttatctttcaattatttctttttcttaggaaggaggctgaactggagaaaagtagtgctgctcatacccaggccaccctgcttttgcaggaaaagtatgacagtatggtgcaaagccttgaagatgttactgctcaatttgaaaggtatttttcttgggagcctgcactcttaaatatgatgtgtgcagaaaggggtgtttaccccaggaaatatgtgagcaaagcagtcacacaaaggatgattcatactagtttaaattccataatcaccaaccgtaagtgggcatttagcattatctggtaatcttattgtatttatataattcccctttataatttatagaaattcccctttctcaccatccacttcaacttttatgtgctgagccaggtgcggcagcatatgcctgtagtcctagccactgcataagctgaggtgggaggatcaagtcatgtacttagaagcatttggtgcttctgccctactctcttgatgttatcattttcataaagaattcagaagtttttatctcttgctaaacctataaagagacccacatttatactcatcctatcttcccacctattacagatgaaatgtcctagtcttttaatcttcagtgacctcattctatcattttgttttctcataatttgaaacctttttactggaatttttccaatcaatattaaaacatgttaatgtacatctgtctgtaaaatatattaattagctggccactgtggctcataccagtaatcccagtgctttgggagaccaaggcaggaggattgcttgaggtcaggagtttgagaccagcctgggcaatagagtaagaccttgtttctacaaaaaaaaatattaagaattagccaggcattgtggcacatgctacttgggaggctgagggcaggaggatcacctgagcccaggagttccaggctgcactgagctaagatcacaccactgcgctccagcctgggtgacagagcaagactgtctcaaaaacaaacgaaaaataaataaaatacataagttgttttaaatacttctctgaccctaacttccttttgtagctgtctcacaccaccagtcattcccttcttaaccccaaattctactccttttcagtccttttccttctcctcctttttcttctcttgacagagaagattgtctctatatccacttcctcacctcccatgccttctacttattttctccttaaataaaaagtttattttgggtggaactacaaattacaaaggccaatataatgaatacctatatattaatgttaacatttttatttatcacatttactttagctcattttgggggagagtttcctttcttttatttaataaatacaaaagaatgcataacatgtacataaactgtagagcttgaagataaaactgacatgcatgaacctataaaagacaaccagtaagccaaaagattttcaacaacttagtatccatatgtaagttcctctgccatcccatgaaaatgggacagataacactgtcctgaagtctacactaattatttccttgctttttcccccctgtgtattataattttatgacacgtatatccatacaaataatgcattatgtaattttccttctccttgaactttaccaaaaaatgtcatcatagtatatgccgtttcctgggacttattttttcattctgcattatgtgtgttttcaggattgaattgtgttgtctgaggctatggtttgttgatagtcactgctatgagtattttattgtatgaatataccacaacttatttattcattctttggactttgagttgtttcccatttggttagttattattagttattttgtgactataagaatacatgtatgtaagaatttctctaaagccaaaggtatatgaatgttcaactctaaaacttaatatcaaatcactttccaatgtgggagtaagaatctacactcccactagtgttgtataagtttccatttatcttctttgccaaagcttgttagacttcttaaactttgccagtgtacttagtgtaaaatggcttcttattgtggataattcatctttccttttccataaaatgcttgtttatgacttttgtttatttgtctatagggttatcatcttttcctcattgatttgtagaggttttctttatcagccatatgggttacaggtatcttctgccagtttagcttatttttttattttctttttggtttcttctgatgagtggaaattcttgatttcaatatggttaaaatatttatctgtatgtgggtacttttgcttctcatttaagaacttctttctatctcaaggtgtaaagatattcaaccagttttcttctaaaagtcttaaaatttcactttccatttttccacctagaactgatttctgtgtgtgtagcaatatagggatcaaattcattttttgttttccctatggacaaccaactgcctagtttaatttaattcattaaattgtaccttgtttccccagtgatctgttcccacatgtgatacattatgacagacacatagataaataatttataagtgtatatgttttatttataatttttattgtatcagaacatataaatcatataaatatatgtaaattttatatatatatatttattgctaatatcaatcctgtaaaggaatttcccttctcgttagtttgaagaatagtgcttcagggggtttttatctattctgtgattttagtcactatccatatactcgtggcattaaaatttatttcatcaaaccagacctttctttacagctccatattcacatatccagttacccacttgacatcttcaagtagatatcacactgtcttttaatattaacctgtccaaaccaactcttgatccttccattgctttctacccctagtctctcattgtttttattgtaatcagtgacatcatcttcccagcttttcattctgtaaatcttagagtcatccttcatcattctctcttccttacccccaatattcagtctatctcttgaattttcctactctgcttccaaaagagatcttgtgtctttccattgccagctccttagtctaagcctcctttatcactcacctgggctgataaataattgttttggagttgatccttcaattttccattcttttcccctgccctaatccatcttcctcatagctctagagtgagctacacatttaattaaacacctttttattttatttatttgtttattttgagtcggagtttcgctcttgttgcccaggctggagtgcaatggcactatctcaggtcactgcaacctccccctcccaggttcaagtgattctcctgcctcagcctcccgagtagctgagattacaggtgtccaccaccacgcttggctaattttttgtgtttttagtagtgatggggtttcaccatgttggtcatgctggtctcgaactcctgacctcaggtgatccacccgtctcggcctcccagagtgctgggattacaggcatgagccaccacgcccagcctacttggacacctttaatggttcccgtctgtccgccaggtaagcccactgtgccctgcggtgatgaccctcatgccaccagcttctgctccagcctttcttactcattaggctctagtctcacttcttattttttaaattgtgagtaattttcatgcttggtagttgatttcttttccatctctgtatgcatacttcctgcacctagtaggcacttgatttttttttctttgaatacacagcagatgccatgtaaactcattagtacttgcctcagaacactgaattcttacctgtgttaaatgcatgaatacattaaaaactttttagttttacttagaagtatataaagtgtaaactaatcagttatgattgtcatacgcaatagttagaaaactactttgacttttttttctttttaataagctataaagcgttaacagccagtgagatagaagatcttaagctggagaactcatcattacaggaaaaagcggccaaggctgggaaaaatgcagaggatgttcagcatcagattttggcaactgagagctcaaatcaagaatatgtaaggtatatagagcaaataatggccttagaaccattaagacaatttaatgttgaaagccagctagtaactgtcccttggcttgcttttggccatcttatactgcaaattaagaatttactcagttaaaaaatgacacttcttgaagagttccttgaggtttaaagaaaaaaaaaggaaaaattaatgaaagtggctataaaatgtttagtgacctcttctctctcaaaccaaaggatgcttctagatctgcagaccaagtcagcactaaaggaaacagaaattaaagaaatcacagtttcttttcttcaaaaaataactgatttgcagaaccaactcaagcaacaggaggaagactttagaaaacagctggaagatgaagaaggaaggtaatctatgattagaacctgagtgccttgttaactcagttacgatgtgattttttaaataactatgtttttctcaatttaattcttccatgcagaaaagctgaaaaagaaaatacaacagcagaattaactgaagaaattaacaagtggcgtctcctctatgaagaactatataataaaacaaaaccttttcaggtttgtcagttaggagtaaacttacttgtgtttattttagggactcactttgttccctattatagtgaggacagtgactcgggttttctgcaagatcattttgctctgcacttacagtgccaatttagctcactattaaaggtttatacattttattaaattatgcataattttttcccacattattgaagtataattgacaaatttaattgacataattttttcaatggaccctttgtggtttaaaaaaaaactttgtaatgtggaacttaaaagtttggctcagagggcttgcctggtatgagcttttgataattaacctattttaatttgtggtatgacttattgcaaatactcattgtttctcaatatactgatcttttaaaagaaaaaagaataaatgctgattttggaacttagaagtacagtattggttataatgtggtaatctaactgatacagataaaactggccagctggcttttttaccttgtttcttttcctctgttttaatgatctttaaaatgaaaaatacaaagtttaaaagattctcatagagaatctatggagagccctgagaatatgtgaacataccttgttttcatttgtgtttttaattttctttagtgtttatggtttatatgaaactagtaagatcaaactgttttaagtcttaactttatttaaaaaatctttttcagctacaactagatgcttttgaagtagaaaaacaggcattgttgaatgaacatggtgcagctcaggaacagctaaataaaataagagattcatatgctaaattattgggtcatcagaatttgaaacaaaaaatcaagcatgttgtgaagttgaaagatgaaaatagccaactcaaatcggtttgtaaaatgacttttcattttattaaagatattggagtgggggttattctaactataatacttaaataaaatgaatatctttggtatcagaaaaaaataactgtttatagaggaaaattgagctgtgatttagtggatttattttagagtgttgaccagatgggcattcaatgttctaaagttttctagctaccttcttaatatattgaaaattacttgagtaattggatgaattcattaagctttacatatctatttccatttgcaaaactgcaaactccttgatgtaaaaccataaagagaagcagtgttcaaaaatatttgggcatttaaattttttaacatatgtattgagatataattgacaacccatacaatccacccattgaaagtggacaattcagtgttttttagtatactcacagatttgtgcaaccatcaccatagtcaattttaggacattttcatcacctcaaaatgaaaccttgttatccttttcctaacactctcctatctcctcaccccaccccacccttcagccctaagaaaccactaatctactttctgtctctgttgatttccctattgtggacctggcatattcatggattcaaataatatgtggccttttgttactggcttctttcagtcaattagcataatattttcaagattcacctgtgttgtagcatggagagtactttattttttttatagcctaataattcattatgtgggtataccacattttatttattcgtttgtcagttgataaacacttgtttgcacatttttggctattatgaataatgctaccataaacattcatgtacaagtttttgtatggacatttgttttttcctgggacatattatttccctgggaaataataggagggaaattgccagatcatttgataactctacatttaatcatttcaggaagtatcagactacattcagatgagatcgggtgcgttcagggtggtatggccatagaaaggtcaggctgtattcaaaagtggctcataccaatctatattctacaggcggtgtacgagggttccaatttctccacattcttaccaacatttgttattatctgacttctttatcctagccattgtagtgggtatgaagtggtatctcattaacttaacttgcattttcttaattggtaatgatgttggtcatcttttcatgtgcttactggccatttgtatatcttcatgaaagaaatgtctgtttatactctgctcatttttaaattggattattagtctttttattattgtgagaattcttcatcaattctggacacaagtctcttatgtattatttgcgaatatcttctcccattctgtgcattgtcttttcactttcttgatgatgtcctttgacccaaaaaacttttatgacgtccagtgtgtctatttttttgtttgttcgttccttggtatctatctcctctgccaaattcaaggtcaggaagatttacccctgtgttttcttctaagagatttatagttttagctcttacatttagattattgattgattttgagttaatttttgtatgtggtgtgaggtaagggtccagcttcattctttagcatgtggacatgcaatagtccccacactattttttaaagagaatattcttgcctccagttaatggagttagcatccaattaaaaaatcatttagactgtacatgtatggatttatttctagactctcaactgtcttccattgatctatacatctatccttgtgccaccacactgtcttgattactgttgttttgtagtaagttttgaaatcaggaagcgtgagtcctctttgtatttttcaatatggttttgtctattctggacctcttgcaattctatattaattttggaatcagtttttctacaaagaaaccagctgggattctgatgggaattgcattgaatctgtagatcagtttgggacatattattatcttcactaggttaagtcttctaatacatgaatatgggatatttttccaattatttagatctcatttaatttctttcaacaatgttttatagttttcagagtataagttttccacttctcttgttaaatttattactattttattctttttgatgttttgtaaatgaaattgttaatttcatttttggattgttgattgccagtgtatagaaatacaattgattttaatatatttatcttgtatcctgcacccttgctaaactcattttagttctaatagttttttagtggattccttaggatgttcttatagatcatgtcttttgcaaatagagatagtgttacttattttccaatctggatgccttttatttctttttcttgtctaatatctctggctaaaacctgtagtataatacagtgttgaatttagaagtaatgaaaatggatggacagccttgctttgttcctgatctagggggaaagcattcagtctttctccatgatatatgatgttacctgtatgatgtatatagcgtgacattattagatgttgatttgttggccagccgaggtggcttacgcctataatcccagcactctgggaggccaaggcaggtggatcacctgaggtcaggagtttgagaccagcctggccaacatggtgaaacctcgtctctactaaaaatacaaaagttagctaggtgtggcggcgggcgcctgtaatcccagctacttgggtaggagaatggcttgaacccagaagacagaggttgcagtgaaccgagatggagccattgagcctgggagacaacagcgaaacaatctaaaaaaaacaaagatgtcgatttgtcatagatgctctttatcaagttgaggaagttcccttctgtttcctagtttgttgagcatttttatatgaaagggtaatgaattctatcaagtgcttcttctatttctattgagattatcatgtaatttttttattctgttgatatgatgtattttattaattgatttttagatattaatctaaccttctgagataaatctcacttggttatggcatataattatttttatatgttgctgaggggtttttttcagccatattcctaagatatactggtctgtaggttttctttgctttgtttttgtttttttaatgtctgtctcattttggtatcagggtaatggtgacatcacaaaatgagtgagaaatgttccctcttttctatgtggaatggtttttgaataattggtattaattcttcattgaatgtgtggtagaatttattggtgaagccatctggaccttggtttttcttgtgaatattttttggttactaattcaatatctttacttgatataggcttattcagattatctctttcttcttgattcggttttcttcttgagtagtttatgtctttctataaatgtgcctaatttgttggtatataattgttcatagtattcctttataatcttttttttatttctgtaaggtcagtagtaatggcttctctttatttctgattctagtaatttgagtcttttttttttaagtttctttctttttttaaatttttagtggagaaagaactttatttttttgtttggtttttgggtttttttagagacaggatctcactctgtcaccaggctagagtgcagtgatgcaatcacggctcactgcagcctcaacctccctgggctcaggtgatcctcccacctcagcctcccaagtagctgggactacaggcgtgcgccaccacatccggctaatttttctactttttgtagagacagagttttgccatgttgcccaggctggtctggagctcctgggctcaaggaatctaccagctttggcctcaaaatgctgggattataggcttgagccactgcacctggccaagaacttttcttttttataatttcatcttttattttagatgtgggggtacatatgcagatttgttacatgggtgcattgcatgatactgaggtttagggtatgacaggtcccgtcagccaggcagtaaggatagtactcaataggtggtttttcagcccttgtttaatggctgaaaaatccaacatccgattactctcagacattttttctccttgtgtccaaatgtataggttatacttttctgtttattggcatgccttgtaatttttcattggaaagtaaatttttagatcatatattgtagcatttctgggtacagctccccctccttttgggggctttttatttgcttgtttgcttaatgagtggctcaattattttagggaaacatatcccactacctccccagaccccaacagtattgtgcctctgatgttgctgttcagggaggtacagttttaggtgtgcccacaattaccctgggatgacacttgctttggtagggctgccttcctctctttccgtgaacatagtgactgtaaactccagtagatgctggctccttgcttgattatttgcaacagtgccttagggcataaattgctctataaactaatccaatcaaattctggctcctttgtagggattgcatacgagagcagtgctggatatttattctgactacagaagggctcgtcccagctgtcatattccctagttttctcctgcaaactaactagcctactgttcagcctgtatcttaaatctcctcccatttctctctcactataaccaccactgttctttaatggttccccaacctttttggcaccagggaccagttttgtggaaggcagtttttccacagaccggatcacccagcttgtgatgggtttatgtggatggtttcaggattaaagtgttccacctcagatcatgaggcattagattctcataaggagcatgcagcctagatccctcacatgtgcatttcacaatagggttcacactgctgtgagaatctaatgccgcagctgatctgccaggagggggagctcagggggtaatgcttatgcttcctggctcaccacttacctcctgctctgcagccgggttcctaacaggccttggatgggtattggtctgtagcccggaggttggggacccctgctttagagcacccttaggcttcagcttctccaagctctgttgcaggtgaagtcagttcctttgaaaagaaatgaggagctccctgttttatggcctacttgtcttttccgccctcctttccccctcccccgacaatatccctgagccaggactagagctgaaattggggacaatggcagttttctctctgagtgacatcctctgccctaggagctgagttttcagtggacttgtggggaagagatgaggaatagcctcaggccctcttgagtaacctcctggtgtagaaccatccccctcatgagccagagaaagagtcatcggggcccagcattttcaacacactgtgcccaaggtgagcccctgttccatgaatggggctgactggaggaagggatcccccacctcacaattgcatttgtccaggatataactgcagccacagggagctggggacaaaatgagaaactctgatgtcctggtcctcctgggagggaagcttctgactcggagttgggggaaaagagggccctgtgcttttggctgtagccgtctggcgtggactttgccttgctaagctgggagtgggaagaggggaaggagttttggcttaaacactgcagactctctttttcaccaaatttttgcagattttcttgaatagatgtttcttcatttgctatttttcccttaggtcaattttcagaggctttaactggttaatattttataacttttagtttcactagggagcaggtcagcagaactttcatgctgtcatgccagaagtccatctcagcaattacttttgagttgaacttttatcagaaaaatagctttgtagctgaggaggggcaaggagatttaaaagactgtatctcctttgtcacagctgtttcatgtcattttgtaattcagtcttaaagcctgtgtctagtagtgatttttgctgttgagtgtgataatacataaacaactttggaatttgcccgcaacattggtaacacatttcactgacatactctttaataattgtttattacctattatttctttttacctaggaagtatcaaaactccgctgtcagcttgctaaaaaaaaacaaagtgagacaaaacttcaagaggaattgaataaagttctaggtatcaaacactttgatccttcaaaggcttttcatcatgaaagtaaagaaaattttgccctgaagaccccattaaaagaaggtaagacatgaataaatgtataaaagtgtcctcttcctttggatttgcttttatagcatttagcaagtcatccattttatgaactgtgaaaatttgttgacaccttctgataaaagcagttcttactgagattgttgtgtacaatgactgttttcttcctccttctacgctttcttttctgtatacctggattctgcctgttcttcaaggcaaatctcaaatcttccttgaagctttgcatgactattttgtccctgtccacacaccccaaattactccctctataatacccttagcattttaacctaaatgtctcttaggtccttaatcattttctgatttgtagttttagagaagtaaatttcttatttcttgactgtgaatgtttgtctttcacgataaattaaagttggttgaaatgataaatctaaaaattatcttacagaatatattgcttcatctgccttaaagaagatacaaggcctgtttttagtttataatgatggataaattcgttttaatctagattactaatccttcttttcaataattcttctaggcaatacaaactgttaccgagctcctatggagtgtcaagaatcatggaagtaaacatctgagaaacctgttgaagattatttcattcgtcttgttgttattgatgttgctgttattatatttgacatgggtattttataatgttgtatttaattttaactgccaatccttaaatatgtgaaaggaacattttttaccaaagtgtcttttgacattttattttttcttgcaaatacctcctccctaatgctcacctttatcacctcattctgaaccctttcgctggctttccagcttagaatgcatctcatcaacttaaaagtcagtatcatattattatcctcctgttctgaaaccttagtttcaagagtctaaaccccagattcttcagcttgatcctggaggtcttttctagtctgagcttctttagctaggctaaaacaccttggcttgttattgcctctactttgattctgataatgctcacttggtcctacctattatccttctacttgtccagttcaaataagaaataaggacaagcctaacttcatagaaacctctctatttttaatcagttgtttaataatttacaggttcttaggctccatcctgtttgtatgaaattataatctgtggattggcctttaagcctgcattcttaacaaactcttcagttaattcttagatacactaaaaatctgagaaactctacatgtaactatttcttcagagtttgtcatatactgcttgtcatctgcatgtctactcagcatttgattaacatttgtgtaatatgaaataaaattacacagtaagtcatttaaccaattaatt

SEQ ID NO: 373 - DNA, 7445 bp, Homo sapiens
  source 1..7445: mol_type = other DNA
ttcctcgttagggcaggcgcggccccttcggctccgagctgaccctgatcagggccgagttgtctcggcggcgctgccgaggcctccacccaggacagtccccctccccgggcctctctcctcttgcctacgagtcccctctcctcgtaggcctctcggatctgatatcgtggggtgaggtgagcaggcccggggagggtggttaccgctgaggagctgcagtctctgtcaaggtgagtgggactgcgcgggagttgaccgccaggtgcgggtggggagctgggttgggggcgcggggcgaggagtaggtctggcccgcgcccttttccacactaaactctaccgctgttgtgagcacaagcccaggctagtccgaggctggaggggcggagccggatccggcctcctgaggtgcctttcgtgtctgccgacccagtcccagggactagcctggggaggaagaatggaacccctgcagttagaggttcctcacatgactagctctgaagacctcctgccttcctgtctttagttggtgtgggagggaccttccatgtatccagggcttagcttgtgcccgggacatggttgtgttatgcacacttaaatcaatggaattcccaggttcatctttcagactaggttagcaacaacccaccgcacccccccgccccaatacgtgctcctaatgtcaccttttaagtttcctttcctaacaacaataaaagttaagtaatattgagtattgtgtgccaagcactgtgctatactctttaagtggtgaatcatcttgttcagtcttcacattcagcgacagatattgttaccctcattttataaatctagaaagaagctcaagctcattattattgttcagtgttttttaagcgtctactgtatgtgctaagctctttacgtgatttcattttaactcacaaatctgtgaggtaggtcataaaccttatccctactttatcaatgtggaactaagtacaattaagtaacttgaacagttcattttgttaatatgtggcagaatacttaactaccatctgcttttcactttcggtatcctgtcttacggtgtttattcgtggttatctattgacagtgaataacttgaacaagtatttcttgaagatttgcattttatttttctaaaaagcatggttccgaccgggcgcggtggctcacgcctgtaatcccggcactttggaaggccgaggcgggcagatcacaaggccaggagaccgagaccatcctggccaacatggtgaaaccccgtctctactaaaaatataaaaattagctgggcgcggtggcgcatgcctgtaatcccagctcctcgggaggctgaggcaggagaatcgcttgaaccagggagtcggaggttgcagtgagccaagatcgtgccactgtactccagcctggcaacagagcgagactccttctcaaaaaaaaaaaaaaaaagcatggttccttccctctaggaactcaatttaggatgtgaccaacttgtagaagggaaataaataacagatggcactttgcaatgacttagatgcactagccgcattgggggatgggaggcttataaatcatttcttggcccagtgcaaagatggccaaggaaagcaggaaggactactcttacactccttgctggtctttttttctatatatagatgatagaggtactgacaacaactgactctcagaaactgctacaccagctgaatgccctgttggaacaggagtctagatgtcagccaaaggtctgtggtttgagactaattgagtctgcacacgataatggcctcagaatgactgcaagactaagggactttgaagtaaaagatcttcttagtctaactcagttctttggctttgacacagagacattttctctagctgtgaatttactggacagattcctgtctaaaatgaaggtatgtttgaagctacatttttgtaattttgctcagtgtgttttggagatggaattgttaccttttggctggtattcataaacttgaccttttttttttcagcacgtagccaaaacattaattttgtctactacagcattaatatttcttatcataatcaagagtagtacatcaggtattagacttaaattctgaaatgaaaaatagtctaatatcaagtaacaaattgcagtttcctagtaagaaaattggctgtttttaaaaaacccttcttgataggttggatttgtccatttatttactatttttagatataaacaaatttattagtggcagaaatttattagaggctacattgtggctaagaattaagatatatttgttaatcactacccatatataaaattgtaaatgttttagccttagacctagtcaagacttgcttatgcttggcatttccagcttcagtgtacatgcagtagggaggagagtgtgtctgaaggaggagcaactattttcctatactagataaacaagactgtcactttcagagcttaactgttacaaatgcatctgcctttcctgtacacccatggtcactggaggaaaataagatgatgtgacaattggaaggaaactcatattttagtcctcggtatctaacacagtgcatcataaaaaaggacttcaatatttgttgaagattcaagaaatttgcttcaacagactaattaagctctttagacatttcacatgtagtcattacctttgaatctgtaaatgttgcacaaatgaataatatacagctattcctcaggtataattcagtcttatgtgagaataagatcgttgctcttatgtacaagtcataataagaaaaataactacattatgcctttaaagaggcataagtgtactgctgaagagtttacaagaagagagagagcacagagatattaatactggtaaaagcttagtttcatgtgagctggaagtaaactggataaagttttgactgtgtctcatacggcagacattcagaaaattaaatgataaagattagtagtggatagaactcttagaggcagagtaaacagtatatgccatagtattttaaaactgttttatatgtgttcccacaaagacaagagcctggaaaaaatacaacatcctgcaaagaaatggcttattttgtaaataagccataaagtatttcagtcctcatatatctttgactagttaacttatttgatcaaactagaacaatgtttacttatagttctacagtgattaataaaaacacactttttctatgctgagccaaacattatactgaaactcagtccagttactcaaaaattggttctaagtggggtccatagtgttgacaggctatagtttaggtatgagtggattgtgttaagtccatcacagctgagaaataaacctcaaatatacattttcaaaatgttgggtcggagttctagattatcctttatgttttaattgaaataaggtagagtcatgggcttactggttttgtttttgattttttaggtacagcccaagcaccttgggtgtgttggactgagctgcttttatttggctgtaaaatcaatagaagaggaaaggaatgtcccattggcaactgacttgatccgaataagtcaatataggtttacggtttcagacttgatgagaatggaaaagattgtattggagaaggtgtgttggaaagtcaaagctactactgcctttcaatttctgcaactgtattattcactccttcaagagaacttgccacttgaaaggtaagtgacctttgttttgaacaagagacatttggaaatcagaatggtattgtatggatattgcataaaatcagtatcctcatagaattctaataaaaataagtaaaatgacagctgtggctccttgaactttaatgtccatcataagtgagaaaatgttccattgtcaatagcttcgttaaagctaattcttgggattaaagtacattttgactttatagaacctagtaggaaagcatctaacacaaatttatggaaaaaaaggaccttcagtggatgttgaaatatttattaaaactaaaagaaaataaatcttgtatttgtggcatagtactattcattttaattttttggcccaaatcatctaaaactcccatatggtgcctttagaagttagtatctctgatggaaggggaattcctttcaatagttcatttgctatgttaagtgtgcataagctttactttaaaaattgacttcaatgtttttctaaaaacatcttttgactagatgtagtattacctaataaaagtaataccattttctttttaaaggagaaatagcattaattttgaaagactagaagctcaactgaaggcatgtcattgcaggatcatattttctaaagcaaaggtaaatattttataaagattatgcctattgatatgatctgtttttatatttggcatttactttaaatttatctcttttagccttctgtgttggcattgtctatcattgcattagagatccaagcacagaagtgtgtagagttaacagaaggaatagaatgtcttcagaaacattccaaggtatgtgaaggacatagcctaaatcctattaacagctgtaaaagaaactaaaccccttctatctcctgaagtaaaatgagatgtcatatgtttatttgaaacttaagtagctatcctcaaatgtttttaatgagcaaagacacatgttcataggattgcatttattaatgtagttaaataaggtgggacttacttggagtaataattttttaaaatttatgtatgtacagataaatggcagagatctgaccttctggcaagagcttgtatccaaatgtttaactgaatattcatcaaataagtgttccaaaccaaatgttcagaagttgaaatggattgtttctgggcgtactgcacggcaattgaagcatagctactacagaataactcaccttccaacaattcctgaaatggtcccttaactggtaaatttggtccgttattattctccagatagagaacattttccaatgccataattttcaactaaagaagagtaattatcttcaaaataaacaaaatggagttggaatagtaaagggggagatgacatcactgatctagtcagctaatatttgaaggcctttactatatacaaggtacaacatcttaggagtaaggaattatccaacctctgatacatacgttagccatttcattaaattttcagcttagagaacagcatcctccttgtagcactaaaatcatgcttttttttaattgcacatgatcttgctgtatgtatctgactgatttaaaattacataagctgagcaggacaacagcaccaaaagtctgaaccaagtatgaactaatttgagactgttagcttataagcaaaatcaatatgaacttggatattgtacttaaaagaaaaaaaagtaggccggatgcagtggctcacgcctgtaatcccagcactttgggaggccaaggcgggcggatcacgaggtcaggagatcgagaccatcctggccaacatggtgaaaccccgtctctgctaaaaaatacaaaaaaatttagccagtcgcggtggcgggcgcctgtagtcccagctactcgggaggctgaggcaggagaatggcgggaacccgggaggcggagtttgcagtgagctgagatcgcgccactacactccagcctgggcgacagagcaagactccgccacaaaaaaaaaaaaaaaaagaaaaaaagtaggatatgatagatggtctctacattgggtatctggaaactgccagagtgtgtcaacactatactaacctatcattgctatagcagctggactactgcaaagtagttatatgcataaaaaatgtaaacttgctttctgcatatgtgatatacattcttgccatataaatttcctaactcagtgatgatttattctactcaaaactaaatgttaacatttaatacatctacatgtgattatgaatattagatatgaacatttcaattttcttagtagtatttaggcagactggcttctgttaagttggattttgtttgttttctttatttaaataggattattacagcaccaaaaaacttctctgaagcctttctccacaaccttgttctatggattccataatgttacaatggatttaagctatgaagcctcaaaacatcacgagataagcatgatggtctcagacttgggaaaactgcctaatattatgctgtagtggaattatgtttagatttgaattcatctgtgaagcattcaaatcaaagctaaaagcctaaatgtgaaatgctaatgacaagcctgagaaggtaaactgtgaatcttcatttctatcattgatctaactttagatattggatcaatatatttaggtggtattgaaaatgctattggaggagtcacactaatactatcaactatcagtcttcccacagcttcaatcactgtcattattctaatcctactcctacttaaattttaagttatgaggtttatgtcaaaagcaacatttcacaaatgtacttttaaggcataataagggttaacattctaggcagtataaacacaccccataatgcaagtaataggtaatctagagatgtggactttattgctatatgggaattacatttaaatttgagggcattttatataaagaaaaatacagacctataaagtttggcatattcattaagttatcttttaatatttttttctagaaaacaggtgacatttgtatctacgataaaaatttttatacagaacctactgcctcaaactgaatcccatcaagaaaactagtttctattgtattagtaactcaaaataaattatcacttcgaaaacttgctttcccacactaaggtaagttcagactagattgaacactccagaattttttactacagactgtttttaagttagaagtgatggcaattttataaatagagaatatacttccactgatgcccttactgtgccaaaacaaaaatcttaagaaaagcaagtagacaccttcataactatgaatgaagctgctgaagtagtgtttaggatcctccatggcagttagtgaatgtaagaagtacagtgttaaagtgttgtaaacagttactcagtgcaatgtatagcctgagtctatccatgatggctatatccaatttgacatcacgttatggatcagtacacaatgaaaaaccaaagaaccacagtatatcttattcttaacttttgtaaaccatgttttatgggtaactttttagttttcccaaaaggctgataaatttcaatattttgaatacatcattgttaattttgagttggcagaggtaaactaaccaactaccattatgttttagtactaagggatatacctttcaataaagttaatgaaattcaa

SEQ ID NO: 374 - DNA, 32742 bp, Homo sapiens
  source 1..32742: mol_type = other DNA
ccgcttccgtccacttggcgagtgagacgctgatgggaggatggacgtactggtgtctgagtgctccgcgcggctgctgcagcaggtttggacgcaggagaccggcgggaaggcctgaaagagatggagcaggctctgactcctgcccaagcggcttcgggggcgggacagctaggcgaggaccatcctggtcctctcagagtggagcggcacggtccctgtgggaacaggaagggttgagagaggaagcacccatcatttcaaagcccgtgtgactgtgattttcagcggaatggagggtccccaccctctcccaggcctcccccaaaccagcgtcttcggtgggctggagcctggcatgttcagaacagttctctccctacaatccacctcctcttctgcatacacacgcgatttaggggatgcggggagatagacaaggggggaatacattcagagctctgggtcttggtttgcagctcagccgcagttcttcccgggttactgagcgagaggattcctaataagcccatggggtgattcattatcagaccagcggagcttgctctgtgccctcagcattcgtcgggaaggagcagccacaccatataaaagtgaaagcggccgggcgcggtggctcatgcctgtaatcccagcactttgggaggccgaggtgggcggatcacgatgtcaggagatcgagaccatcctggctaacacagtgaaactccgtctctactgaaaatacaaaaaaacttaaccggctgtgttggggggggtccctgtattcctagctactcgggaggctgaggcaggagaatggcgtgaacccgggaggcggagcttgcagtgagcagagagcacaccactgcaccacagcctgggcgacagagtgagactccgtccccctacaaaaaaaaaaagtgaaagcggaacagttccattaccttttatgcccaggtggggagggatggtaggaagatagttcacagtactctgtcctgttacggctgtatacttaatcagcagtcacaaagtacaagttagtcaagtaaattggcaagctctttacatttctgagccatttatttatcggtatgtatttatctttgcctcacttggttgtgataatcatgaaggtaatttctgaaaagtgtttttagctcagctcctggaacataatgtatgctcatttttggcaatttggttttggctgtagctatctcccagtaagtattctgaaatttcaggtgaggaactccccctgagttttgcagtttaagttggaagctttatttctttctgaattgacatgtctttagttttagatgttaaactacaaagcctggtctggtctagtctaggacctaagacactggaaacaggaagaaatgggaaaattgtttagtcccagaaagggtgaaaggcagacccttgagctattttgaatgtgacaaaggacatttgggttttttaagagtcccaggtcataggatttgggaataaaagcaggttggtcaacctgaaacttaactactcttgctaaatcagagtgtttatcgagccaaagaaaagaactagggatatgagacatgaggcatatcccattatatacttactccgattcctgtctcccaaaacacatgtatgtgtggttaatatattctttttctttttctttttttttgaaacagagtctcgctctgtcaagcagactggagtgcagtggcacgatctcgactcaccgcaacctcagcctctgggattcaggcaattctcctgcctcagcctcccaagtagctaggattacaggcatgcgccaccatgcctagctaatttttgtatttttagtagagacagcgtttcgctatgtttgccatgctggtcttgaactcttggcctcaagtcatccacctgcctaggcctcccaaagtgctgggattacaggcgtgagccaccatgcctggccaatattttcttattaaggataatatgctaacgtcagcaaaaatctcagaggagaaagaaacacagctcatcaaagggaacattaatgattcccatggtctatgccacgccttggtagagaggggaaatgtggaagtaagtttatggactgaaaaaagtgctttttttcccacaggaagaagagattaaatctctgactgctgaaattgaccggttgaaaaactgtggctgtttaggagcttctccaaatttggagcagttacaagaagaaaatttaaaattaaagtatcgactgaatattcttcgaaaggtgagtactttgggttccagttttattctccagtttgaatcattatagcttttttaaagcctttgttaccaaagattctggaagtatatcctatggaatttggaaaagaagcatagaaaccctattcttttccctgcattagacaacttaggactgaggtagttggtgcaaatagtgacaagttggtgttgtcctgtccttcaggactctttgaaatgtttcatcctgctaactgtttggctaacttaaagtaggatttaggtagggttgaggcatttctttttaaaaatttatttattattttttgagacagggtgtctgtcactcaggccagagtgtggtggcatcatcacggctcagtacagcctcaaccttcaggctcaagcagtcatcccaccacagcctcctgagtggctgggactacaggcgtgtgccaccacatccagctaattttttttttttaatagagatggggtcttgctgtgttggccaggctggcctcggaattcctggcttcaagcaaccctccctgtcttggcctcccaaagtgttggaattacaagtataacctactgcacccagcaaggttgaggcatttctttcaacagtttatgcccatgccttttttaaaaaaacatgtttgatttttaaatcattgcctctatcataaaggaaatatttgaaaatacacctgcatattttctctgccctaagttggttattttacagttttatatcttacataatcatttggggttttttccacctggtatttcaaaacactttttttccccatgaagcttgtgctatgtttatttaatggtctcatgatttaacagtgttttaccaattttgttttaaaaaaatgaacttgctgcagttttttggcctgcctttcgtatttggtgatgacatatcccagagtgttgacctcattcccataattattctcctgtgtgtatatattactgtcagacaaactctgcaggcattacatccttttcccaaagctgattgatccatttactcaccttagactctatcttccccactcccatgacatctctcatattatctttttttttttttttttttgagacggagtctcactcttgttgctcaggctggattgcaatggcacaatctcagctcacaataacctccacctcccaggttcaagcaattctcctgcctcagcctccccagtagctgggattacaggcatgcaccaccacacctggttaattttgtatttttagtagagacgaggtttctccatgttggtcaggctggtctggaactcctgacctcaggtgatctgcctgtctcgccttcccaaagtgctgggattacaggcgtgagccaccgtgcccggtgtccatatttcctatttgtgatctgctatgctcgagtctcatattacctatatgtgatctgctgtgcttgtctttgagtcttctagaatcacaaaattccttttccatagaatcttcccaaaagaatctcacctttctcgttatgtcattcattctacacttatatatgtttaattctctgttatatttattttaattcaaaagtattattaaatgtctaatatgtgctagagactataagggaaaagatacaaaaggaagtacagtattttgtcgaactcctcgcctcaagtaatcctcccacctcagcctcccaagtagctgggatggaagtacagcatattttactacacatttttctgtaatgcagattagctcttatatagctaggagaatgctctcactgtattgtgggaggcatattggttctttgacaaatactttgccctactgaatgagcagctgaacacaaggtacacagcagaactaaaaaccacagagtaataaagtactgtgtgtgatggccattcaccctgtcgtttttccctggttcactttggccacatgctctgacttgaaagcatcacatatgaaactggtagagacaacttgttgaattgattataatcagatagtaattttcatagtgccaaaactaagcacagtagatttcgtgtgtgtaggtacacacacatacatatgtacatggtggtactcctatcctttaaaaataaaaaattgaggttgggcgcagtggctcacacctgtaatctcagctgtttgggaggccgaggcaggtgaattacctggagtcaggagttcgagaccagcccagccaacatggcaaaaccctgtctctactaaaaatacaaaaattagccagggatggtggcatgggcctgtaatcccagctacttgggaggctgaggcatgagaatcacttaaacccaggaggcagaggttgcagtgagccaaaatcgtgccactgcactccagcctgggcaacagagcaagacccggtcccaaaaaaataaatacataaaaataaacaaaaaattgacatttattatagcaggttttgggtataagatcataatctaggccaagtgtggtggctcatgcctgtaatctcaatgctttgggaggccaaggcaggaggatgtcttgaacccaggagttcaaggttacagtgagctgtcatgccactgcactttagcctcagcagagtgcacagtgagatcttgtctgttacccccaacaaagaagagaaaaggatcatatccaagtaaatttggcatttgctgttggaaatctttagattgggaaaaatgtatcttccttgttttaagtatgttaccacagagaggagtcaattattgattagctacaaacttgaaatcaggttttttagtgaatttaagaatataatttcttcatatgatagagagggctgatgaggggagcataaaacttggactgtccattccaatagacctgagtttgaatctggccttttccacttattctgtcttgtctttgacaagtgacttatctgtagcccacatagaaatagtgataatagtaacaagctcgattttattatgtagatggaataagataatgcatataaataaagcatttggttcaaatctttgcatactcaagtattaacttttgttattgtcattattttatactgttgacattttgatgaatataaatttgtgatgaacataaaattgtgatgaacatgttgatgaacataaaattgacaaacataaaggtgtataggcagcatgtttatcttctattaaaagcatatgtgtcattcacctttttttttttttttttttttttgctaaactgctgtatggcaagtacagtgctagatgccagggacagggaagagagccatgaattaagcactttgtgtgcatccagcagtctagtggtagagacagatagttttgtgagggtatgataagtgcagtaatagagataattatatgccatcttaaatgactatattccatgggaaaacaggaggtagtaggtctcataacagtaaaacaaaactactggcttttctggtatattaatattacctgctttgctcccttttatttcatgccttgaagaggtcaacattttgatggacatcatgtatttttttgtttgttttttgtccattgagttttcacttccaatatttgatgtgaaataaattattttctcagagatttggagaagctgagaaaaggattccatcagctcttttaactccctcctcccagtttctgttctgctaaaacaaatgcaaaaagtaagacctcagggcatttcccatggatgtcttagatgccgtgggatggacttgtcctgctgcatgtcttagcaaatcccagattgagggcatcacaccataagtacgttttcccttttggttcttaagatatttggaggtttatactcaaaatatttggagacatcttgtatgatgatggttttacgtacattattgacatgtttccattcttttcctacagagtcttcaggcagaaaggaacaaaccaactaaaaatatgattaacattattagccgcctacaagaggtctttggtcatgcaattaaggctgcatatccagatttggaaaatcctcctctgctagtgacaccaagtcagcaggccaagtttggggactatcagtgtaatagtgctatgggtatttctcaggtgatgtattgtcatgactcttggctgtttgatttttttaagtattattatcatcattgccatttacagaaataatactattacaagttgtatccttagtgaaaaggacatttgccacagtttgaaaaacttgagaaaggagttgggggggtatatgttttaacttttttaggcacaatttttaaggtttggttaaattttatatgtattctcaatatttaagggcaatcattggtactcttttgtttaggtatttccctcctgctgtgtccaggattgctgtgtggtggtgatgagtgctgggaggtgaaaaattaaaataagccatttaccagtcagcatcccaattaaatatttgatgtaactgtgatctttgagccaggcttatatattcattttcaagcagaggagttccccattttaaatagaggcattgtctgatgtgtttatggttaactgcatctggcttgggtctttctgttttcctttctttgctgaattggaaggggttactctgaagagtccaggtcttacagtgtggtttatttctcaagtgtgaatattgcacaccttcatggcttgaaaattagaaatgtaaatatgctggaaccagacttcataactgtagactttgttatgtcatcattaaaaagttcgaggtgttgtaatcccagctactagggaggctgaggcaggagaattgcttgaacccaggggcggaggttacagtgagccgagatcacaccactgcactccagcctgggcaacagagcgagactccatctcaaaaaaaaaaaaaaaaaaaaatagttccaggtatttgtgtgtaacgtatttggaaatagagatcatgtagtgtgggcactttctatgcctcttggcactattgatactttaatctgtcattcataatgtgattggacttctctgcttctgccttttgatggttcttaacgtaaaatgcatctcgtgccttgtcaggtgtgcatttgcgagtaacttgctgaaatctgttgtgtaatgaatcattttatattgtgttgtagatgctcaaaaccaaggaacagaaagttaatccaagagaaattgctgaaaacattaccaaacacctcccagacaatgaatgtattgaaaaagttgaaattgctggtcctggtatgacataatgttatccttcttaatagttgtattgaacatgagtcctttttgaagttaaaaaagaacacacattttaattacagggttaaactttgtatactgaacaagatggtgaaagcactgtggattgtgatataggaaattgaagttttaatctagactcagctaccacttttagctgccttatcttgaatgagttactttgcctctctgtgattcagtttttcatcagcaaaatgaggatagataatggcagataagtcttcggcacaagggccttctgttttctgttaagaggcgaacagattgtttgctgaaagtgaaagggccctgagttaagtaggaaggtttcaggagagtggtgaaggcttgaagtagacggtgagacaggagcttacaagacagcttaagtcaaggccacaactggtattggaatccggaagaattttgccagagccaggtcagtgtctggagcaaatccttaggagcgagtgattattcaagataagacagtatctgatattttttctcttctatccattaggttttattaatgtccacttaagaaaggattttgtatcagaacaattgaccagtcttctagtgaatggagttcaactacctgctctgggagagaataaaaaggtatatgtacactcttctattaatatattagtatcttagaactgcgtggaaccaagcatggtggtatgtgcctatagtctcagctacttgggaggctgaagcaggaggattgcttgagcctagaagttcaaggctgaggtgtgctgtgatcgcacctgtgaatagctactgcacttcaacctgggcagtatcatgagacttcatctctaaaaaagaaaaagaaaaacgaactgcatggaaagtgctgaaaccgggaatggatttcacttttatactgaaatttaatcattcacatttgagattatgaacatttatgaagtagcctttcccctgggtctagcatgttgtgtgattttttttttttttcacttaattccacaaggcatttgaggtagccaattgatacacagatatcactgaaatagaatggataatttgtatacatgaatttgattctttttcagttaaaaatatacaagcagatccatcataaaatcaaacatggttgaattacggcccaaattaatgtttaagtctgagtttgttattaaatgtgttattaatgaatgcattggaacaaaatgtttatgctcctcttaaaaaaatctttctctctttatgtttatgcccctcttaacagcctttctctttttgtctaccccaggttatagttgacttttcctcccctaatatagctaaagagatgcatgtaggccacctgaggtcaactatcataggagagagtataagccgcctctttgaatttgcagggtatgacgtgctcaggtatgtgctcttgccttgcgtactattctctttccttattttcttgtttggaaaattctatagaacatggaatatctcactcaagaaagaacattcgactaaatcagtggttcatcagcttagttcttctttacaaccacccagtaagcttttaaaatatgtcctgagcctttcctctgaaccttttttactattttatttttttagactcttagtggaaccaaggacaaaactccttcattctacacatgtttcttgaggacctcttgtatgcaatgggtttatatcctagcagggagagaagtagtaaagaaacaggttgttttgggccttgtaagctgtgagaggcaattgagattttattctaagtgtactgggaagctattagagagttttagtttgtgaagcagggtgatcaaattaaagattagcctgggtaccatggctcacacctataattccagcactttggtaggccaaggtgggaggatcactagaggccaggagttctaggccagcttgggcaacatagcaagaacctgtctctattttttatatttttaaagaaataaaaatttttaaataatacaaattaaagattactctggttacttactgtgaagaagctagacaaagaagggagactataacagtaagtgttaggccaggcacggtggctcacgtctgtaaacccagcactttgggaggccaaggaaggatggatcacgaggtcaggagtttgagaccagcctggcaacatggtgaaaccctgtctctactaaaaatacaaaaattagctgggtgtggtggtgcacacctgtaatcccacctacttgggaagctgaggcaggagaattgcttgaacctgggaggcagagatagcagtgagctgagatcgtgccactgcactccagcctgggcaacagagcaagactctctgtcaaaaaaaaaaaaaaaacagtaagtcaagaggctatcataatccacttgaaagatgatctggtggtttggattagataaaagcagagagggagagaagtgggttggatcaacatttttttttggagacagagtcttgctctgttgcccaggctggagtgcagtggcgcaatcctggctcactgcaagctctacctcctgggttcacgccattctcctgcctcatcctcccgagtagctgggactacaggcgcccaccaccacacccggctaattttttgtatttttagtagagacggggtttcaccatgttggccaggcgggtctcgaactcctaacctcaagtgatccgcctgcctcagcctcccatagtgctgggattacaggcgtgagccattgcacccggcctcaacatatattttcaagaattttgttcattgatatttgggaaccattggtctaaattatattaagataatggttaaaatgttaaattttcataaaattgtgggaataaccaacattggcccagctgtcattgtctcaattagctacaaaataaacagattatagtccactgacagaaaacacattcattcagcaaattctggatgcctgccttgtgcagcctctagtacttgagtatgcagagctgaatgtaacagacatagttttcatctcttgtggagtttgcagaccagttgaagaaacaaccaagtaaacagatattactaaatggtgatgtactggcatgtaaatattagtggttcctaatggaatatagttcctctaatttaacttaaccatctttattatttaaaaaatgattatatattctctgattggtgttaggttaaatcatgtaggagactgggggacccagtttggcatgctcatcgctcacctgcaagacaaatttccagattatctaacagtttcacctcctattggggatcttcaggtcttttataaggtttgataccatttcttttatattatgtgtgtgtttaccattaatcataattatccattttccttaggaaacttaaaatggtttttaaagctactatggagttaagtgaaagttgctaacagccttagtaatacatgtctctgtataaatgacattctcttgaacttaaactacttttttttttgtaatttataaagacgtttaattacctcacagttctgcaggctgtacaagcatggcgctagcatctgctcagtttctggggaggactcagggagttttatttatggtggaaggcaaaatgggaacagactaattgataaacatataaaatttgttcatctacactggcaagccctttcgtttagtttacctatctgaaaaactgaattcttttttattctgacattcattgcatttggttgtgtgccttagaaacagccatcccctacccccagattcattacatttggtcgtgtatgtagaaccgctactagataccctacatttggttgtatgcatagaaacagccatcccccacctgttaatatgtcatctttgctttgtttattggcgtatgttaaaaatcaaattctaggtcaggtgcggtggctcgtgtccgtaatcccagcacttggagaggctgaggcaagccgattgcttgagttcaggagttggagaccagcctgagcaacaaagtgagatcccatctctacaaaaaatacaaaaataactagccaggcatggtggttcacacttgtagttacagctacctgggagactgaggagggataatcgcttgagcacaggaggtcaaggctgcagtgtgccatgatcatgccactgcgctccagcctgggtgacagagcaagaccttatcttaaaagataaaattatattaaaaaaaagtaaaaaaaaatgaattataccacattgaatttagaggtttattaatcaatgcattataggacttaaaattttttgatgcttaattttatgtattttgatatgattaaatgtatgtaaaaacaattttaaagacaaattttcacatcatccataattttaaaatgcctattgtgatcaactttctttgaatccttgacttaatctgtatatcaacatgtattaatcatttatgattttaatatagtttttgtattatatttaatattgcaaacttttgtgttactttatgactgcacattttgttggatcagtgtaccaatgtttacattaatcctttattaggatttttttctattttagaggtgttgttattcagtaaatagctttgtacacttggatttttttccctctttaaaaattatttcctggctgggttcagtggctcacacttgtaatcccaacattttgagaggccaaggtgggcaaaatgcttgagcctaggagtttgagaccagtctgggcaacatggcaaaacctcatctccacaaaaaatacaaaagttagccaggcatgttggtgtacatctgtagtctcagctacttgggaggctaaggtggatgtgagtatcacttgagaccagggagaccaaggctgcagtgagctgtgatcacaccattgcactatacagcctgggcaacagagtgagaccctatctcaaaaaaaaaattatttcttcaaaaattaaaaattaaaaatgttttttaaaaatttccttatgggctgggtgcagtggctcatgcctgtaatcctagcactttgggaggctgaggcaggcagattgcttgagtccaggagttcaagaccagcctggacaacatggagagaccctgtctctacataaaatacaaaaaattagccgggcacactcctgtagttccagctacttgggaggcggaggtgggaggatcacccaagcctggcaaggtcaaggctgcattgagctgtgatcttactactgtattccaacctcagtgacagagtgagaccctgtcttaaaaaaataaacataaaaaaaattccctatggtggaaggatcataaagatcataatttcctctcggatattttgattaataaatttattttaatgtgagttgcatgttttctgtttgtttaaattcttaggcattttctttatgatggagaatgtttcaagaataggattcctgtattaaaaagtaaacatttgtggggattttgtttttgtttgcttcattttacttttggtaaatgttttctgttgaaaataagctaaatgtttactgatatgagactggaaaagtaatgttataaacatcttttggagttctgtacttcgaatataatgaagcagatctattaatgcaagaaattgtttgtataaataaattgttaaaatttacaaaccacagtaaaaaaaaaagccatttccaatttttcataaaacatatatgtgtatttgcaaagaaatatctagatttgttcattaaatgttaacaccagttaattcaaggtgagattaattatttttaagtaagtgttgctttcaaaatagaaataaaacaatgaaagcaactttcgttttagttaaaaaataataataataagttggccaggcacggtggctcacacctgtaatcccagcactttgggaggcccaggtgggcagatcacttgaggtcaggaattcgggaccagcctggccaacatggtgaaatcctgtctctactaataatacaaaaattaggcgggtgtgatggcttgtgcctgtaatcccagctacttggaggctgaagcatgagaatcacttgaacccgggacacggaggttgcagtgagccgaaatcatgccactccagccactccagtccactccagcctgggagacagagtgagactctgtctcaaaaaaaaaaaaaaaaaaaaaacgaaaaaaaaattcattcaggaccacatccaaaatggagattggaacacagaaaattcagtcctacctgttagctattctgtactaacccttgaacacaaaagtattagctgaagtagacttttgtgaattggaaaagtgtaaagaaaactgtggtgagatttttgtattttttaagagaaatgatttcaaagttctttggcatgttcatttgtaacagtattctcaactattgagggagagcacttgttctcgtgtttgtactttctcactgtgtttgtgtgtgtagaaatgtgtaagttctttttctagaaatacaggattagatctttttacacaccttactttttaaaatatatatatatacaggaatctaagaagaggtttgatactgaggaggaatttaagaagcgagcatatcagtgtgtagttctgctccagggtaaaaacccagatattacaaaagcttggaagcttatctgtgatgtctcccgccaaggtgagtttctgggctttgttccttcgtccagcaaatactatgtatatcatttcctggagtcttcattttgatttgactttgagtgatattttaaccttctaaggacaggcaaatagattttttcttaaatgtatttctgaaacaaccaataaattttgaacctgccataagacaggcaggttcaaatcttaactttcttagaagtcagcaaaaattaattagaaaataaagtggaaaataaaaagaaatcttattcacagtagcaacaaaacctataaaacacttaggaatgaatttattcagaaatgtgtaggaccaaaatgatgagaagtgtacaatgagatgtaatagaatgtttggatagagtgccagacccagttccctagttctccaaatttatttatgattttaaggcgatttcaagttttctaacttgacataatagttttaaagatttctttgaagagtaaatgggtaaagaacaaccagtagatctttgaaaaagacgattaatgatgactggcttgcagcactaggtaataaaatgttttataattacagtaagtaatactgtgtcattgatgtattgctacatagacaggtaagtggtttaaatcaggaaaaaccagaagaaaattcagtaaatattgatcactagataggaagagcttttttttcttctcatttacattttttaagaattaatttttttaaaagttatacaagaaggacatgttccttatataaaaaagtaaatgttgggaggccgaggcgggtggatcacctgagatcaggagttcgagaccagcctggccaacatggtgaaaccccatctctactaaaagtggaaaaattagccgggcgtggtggcacacgcctgtagtcccagctacttgggaggctgaggcaggagaatcgcttgaacccgggaggcggaggttgcagtgagctgagatcacgccactgtactccagcctggctgacagagcgagactccatctcaaaaaataataataaaaagaaagtaaacgtagacaggagaaaaataaaattatctatagtcccacccattgttaatattttgatgtgtaccttaccattttctttccctttttcaaaatgacagcatgtatataatgttctatatcatacattttttatgtaattaatttccttttaatatttgtattaataaatttatttcaatgtaagatgcatgtttcctgtttttaaaaaattcttatgcattttatttggtggcattttattttcttccctagagttaaataaaatctatgatgcattggacgtctctttaatagagagaggggaatccttctatcaagataggatgaatgatattgtaaaggaatttgaagatagaggtaggcactcttcttttaactttttattatggaaattttcaaacataggcaaaagtggatagaatttatagtaatgccagcttcatgtactcatcatccaatttcaacagttatgggtactgaccaaccttattgtatctataccttcttacactgcttccctcatataattccatctataatgactttggtatatgtctctgaaagaacaggaccttctttctgccctaaaaccgcaatatcattataataacaaatatatatatatatatatatatattttttttttttaaaacaatcttgctatgttgcctaggctggtgtggaactcctggcctcaagtgatcctcccacctcggcctcccagagtgctgggattatagacatgaactaccatacccagccaataataatttcttaataccattaaatagagttcaaatttcccaagttgattcatgaattttttttttttttttttttggaaacagagtcttactctgtcgcctaggctggagtgcagtggcgtgatctcggctgactgcaacctccgcctcctgggttcaagcagttctcctgcctcagcctcctacgtagcaggaattacacacatgcaccaccacacccagctaatttttgtatttttaatggagacagggttccaccgtgttggctgggctggtcttgaactcctgacctcaagtgatccacccacctcagcctcccaaagtgttggattcatgattttttttaacagttttttcaaagtatgcatataacatttgtttgatatgtatcttaagttctataaatctgaggtttctccctctttttaaatttcttttattgttgaagaaactgggctatttgtcctaaataatttcccatatggaactatttagcataattccttgtctgtgtttctctaaagaggcttcattagattctgatttatgttttattcctttttttgttgttttcttttagttgcaagaatgcaggcaatgaggcagtgtctggttgtctctgtttttgtcatattaagattgattagtaaattcaagtatcgtcagctggatctgtccataaatttccccatcagacttttccctattggctttatcagctatttatgaccatgactttgatccaccacttcattggaggttggaaaatggtagtgttctgtcattctttctccatttgttacttgggattctcttatgctgaactttgttactaattattttggttatcctcaggtacaattcatataaaacaggtagggtagtagaagtgcttgatttttttatcaattgcagaataataggtttgttccttagcatctcaaagtgagttgtttgattttgatattattgtggtgggcttttaatgtgttttatatttttcagtcagttgtctttataatttttgtagtgctcaaattgttccattttggctaagtaacttcatattttttgttgtggttttgtttttttcaacccctttggtagttagttaattgctttctggtatacaatattccaggcccattttgtacatttcctgcctcagacctgaaatcaaccatatctctatggaagcctgtttccttgaatgggagtagtattttaatcacagtctagggcctagggaccatactttttaagatgataaaattttggctgggtgcagtggctcatgcttgtaatcacagcacttggagaggctgaggcaggaggaccacttgaggccaggagtttgaggtcagtctgcgcaacatagcaggaccctttctctgccaaaaaattaacaaaattaacaaaagaagtagttgggcatggtgatgcatgcctgtagttctagctatgcttgagcccaggcatttgaggttacagtgagctatgctcacaccactgcactacagcctgggaaacagaatgaggccctgtctctgaaaaaaaaaaaaaaaagaataacgagagagagagagaggtcgagcatggcagctcgtgacagtaatctcagcactttgggaggctgaggtgggaggatcacttgagtccaggagtttgaggccagcctgggcaacaatgtgtgagaccctgtctctacaaattaaaaaattagccaggcgtggctgggcgtggtggctcacacctgtaatcctagcactttgggaggccaaggtgagcgaatcacgaggacaggagatcgagaccatcctgaccaacatggtgaaaccccgtgtctactaaaatacaaaaaattagctggtgtggtggcacacacctgtagtcccagctactcgggaggctgaggcagaggagtcgcttgaacccgggaggtggagattgcagtgagccgagatcatgccactgcactccagcctggcgacaaagcaagattctgtctcaaaaaaaaaaaaagaaaaaaaaatgccaggcccggtggctcaggcttgtaatcccagcactttgggaggccgaggcaggcggatcacgaggtcatgagttgagaccatcctggctaacacggtgaaaccccgtctctactaaaaatacaaaaaattagctgggcgtgttggcaggtgcctgtattcccagctactcgggaggctgaggcaggagaatggcgtgaacccgggaggcagagcttgcagtgagccgagatcgcaccactgcactccagcctggatgacagagcgagactccgtctcaaaaaaaaaaaaattagccaggcgtgatcgtgcatgcctgtggtgacagcttcacgagaggctgaggcaggaggattgcttgagcccaggaggtctaagccacagtgaacatgttcacaccactgcatgacagagaaagacctggatgacagagcaagaccctgtctgaaaaaaataaataaatgcaattttttaaatgtttattttatgagaaaataggcacagagaagttagtatcttcccagggtcacatagctaataagcgatacgtctgagattcaaacctagccagtctggcttcaaagcttatgtttttaactgcttattttatactgcctttacattaccaagcctcaattttctaaactgtaagaaagcatagagttatttactgcatagggttattttgaaggttaaatttaaggacttagcatagtacttggcacatagtagcactcttaatagctgctactgttatcatgttcttcctgtaccttcttgcatccaagaattctgtcttttttatcatgagtgtatgaacatggatttaatttttcttcctacttctcattccaaatgccaaatcctgccctgtttgtttccgggaccttgaaacagtgtcaactacttttcagcacgctgttagagatcactataagaattgcagctttctccaagaggaaggttatggctccagcttgaaagcaaagcagattttcatgttctggtcctaccgagctgatgggttccaactaaagagtttgggaggccaggcatggtggctcacacctgtaatcccagtacttggggaggcccagacaggagaatcacttgagcccaggagtttgagaccggcctgggcaacgtagcaagactgtgtatcaaaaaagaaaaaaaaaaaaaaaaaaaaagcagttgggaaccaagtttagtgtttaagtgtggaaaactgccagaacatctgacctgtgctctgatagcaccctgagtatccaggcaaccttgatggttaacattttccaaggtttctaatagatcatggtgaggaaaaaattatgtgctttctttagctctctaataaatatatttcaaaatattcttagaataactaaatatttacatagtagaatgagtaagcattcattttccttcagggttcttttaactttattaatgaagtgttttttaccccctaggatttgtgcaggtggatgatggcagaaagattgtatttgtcccagggtgttccataccattaaccatagtaaaatcagatggaggttatacctatgatacatctgacctggctgctattaaacaaagactatttgaggaaaaagcagatatgattatctatgttgtggacaatggacaagtgagtttgtaaatttgtatgtgttttacattgactgattagaggtaagacagtatggtgaggttggtgacatctgacactggatgactgtaaattttccccaaagactaagattcaggacatcagtatagcatagaagaaagaagagggtttggacccagccaaactggacacttcctagttttccagcttgcctccacaaactggaacctctgaacttcagcaattgttcctatcagtagggttattgtgagacctaaaatgtaattgaagtttttgcatgtgaccctgcccttaattcagttgctttaaaaacgtttgaacatagtagaaaatgtaacagtgttgctcttagtgtttctcatatatagggaataaaagaagaggttttataatagcacttgtctcacaagatttatgagcgatttgaattttacagatctattcctaagcaaaagagccttaagtctttttttttttctttaaagaagactagcaagtaactttccgtttctgttgtagtctgtgcacttccagacaatatttgctgctgctcaaatgattggttggtatgaccctaaagtaactcgagtcttccatgctggatttggtgtggtgctaggggaagacaagtaagtctggaaaatctgaagatggtaatgatatacttgatcccaagaggctacttttcatttgataccatattagaattaagaaagtccacagtttcctttagtccacataagctataatggtgtaaacccagctgagtgattttgtatctatatcatcactgccagggaatgtagccttttaggtagatagtatgtacaaagtttagtgaaaaccagactgtagacctaatagattatatataaggggtttcctctcccacaaatctaaattataaaatctattacagtacctgctcagatttcagacactattcaacaatatagcttatgcatttgataaatgtttttgttttttccttcaaagttgaacataggcaaaaggtataagttattgagattccaattaagttttaagattcactggttttgttatgttctctccaaaaatattgtttattgagaactatgtattttaatattcatactttcagcttttctattttctaatttttttatattctcaatatttataaaataaaaaggtaaatacaaccgtgtttccatacagtattcctcaattcaaaggcacagcatttttcatgttgtaacctcctgtattcactggtgtcttaggatcacttaccaaaaatctgtggcatcttagatttggtaacaaagcctaaatatttccatcctacaaacgtggtcatgcttctaaaaaaccacatgaagtagctcaagatgtttggccagccaatgcgcagaagccctaattgaacatgtaaaaggcagatgagatgtgttaaggtattatcttagatacagattatgtggagctcaaagaccttgttgggaacaacattttctaattgcgtttcttctccgtggatctgcgcttttttgaaatcaaaagacactaggggctaggcaaagtggctctcacgcctgtaattccagcactttaggaagccaatgctggaggattgtgtgagcctaggagtttaagaccaaactgggcaacatggtgaaaccccatatctgccaaaaaaaaaaaaaaaaacttagccaggcatagtggcatgcacctgtaatcccagctaaggattacttgagcatcgacgtggaagttacagtgaggcgagatcatatcactgggctccagcctgggtgacagagtgagactgtgtctcaaaaacaaaaagaataactaagaagacactaagtccttattatagtgtttatggacataaagttttttaaaacaaaccagtaagttgatcattacttaatagtatcttagtttcttaacggttggttttttggacatttagatgatattctgacacttgcttaaaattactagtgctcctattatggcatttaattcacttgtcatataatggctaaaggattcttgataatttttaaaatttttctgcactcagcagcatgtagttatagtatcctatcccacccgccttttttttttttattttttaaattttgggccaggcacagtgtctcacacctgtaatcccagcactttgggaggccgaggcaggtggatcacgaggtgaggatttgagaccagcctggccaacatggtgaaaccccgtctctactaaaagtacaaaaattagttgggcgtggtggtgggcgcctgtagtcccagttactcgggaggctgaggcaggagaatggtgtaaacccgggaggcggagcttgcagtgagctgagattgtgctactgcactccagcgtgggcgacagagcaagactctgtctcaaaaaaaaaaaaaaaaaaaaaaaaattctcacagagggggatgggacttaagaaaaaggtttgttttctttaatgctcacagattctatttttaaatgacattttctgttttaattttttgaatgataatttttttttaatttcatcatcttcctgctattccttgtacatctgtttattgaggatgtgctgtgcatggtgttggttggatgctccacaatgtgtatatgcaggtacacggaacatgagctcctctctgaaagaggctatcatctagagcagagcagtttcctgtggagcttgtgaaaatacacatgcaagccccactgtgggagttactgacttattaggtctaaagggggtattaggcatctgttttttttttaaagctctcggtattcagatacgcatccctcattgtagagccactagtcagaatagaccaacacaaaaacaaaaattcatggcaggcgcaggtagggagtaactgaaaggaacagtaattgcaaagtagattaaggaaggtttcctttagcattttgactggtcttcatgatgagtttcattttatcagagatttgaaagttgaacacttaagaagaagtgtatgggctaaagaaagctatggaaatatataatgtatttgtgggataataaaggagttttaattctgtataagcagaattttacagggcaagtagattcttgcttgggcaagctctggaaataaaactttaacagaaagtagcacattcattttggtactctttgtgttagaaaagcatgcttcattgttatatttgagggattttttaaacacccccccccccccaccaaaaaaaggaaaatgatattatatccttggtgttatgtaaacttttttgtttaatacataaaattcagttttctcaaaatgctttttaacagcgactgcccagggcaatgcttattagtgcttttgccatatccgtagtgattctgattgcagtagatctgaacggggccctagcatcctgaggtttttttctcttttttctttctttcttttttttttttttaaaggaactggcccaggtgcagtgtctccagcctgtaattccaacactttgggaggctgaggtgggaggatcacttgagaccaggagtttgataggagcctgggcaacatagtgagagacaccatctctataaaaattaaaaaattaaccaggtatggtggctcgcacctatagaattagctacttgggagggtaaggtagaagtattacttaagcccaggagttcaaggttacagtgagctgtggtcatactacttcactccagcctgggtgacagagcaagaccctgtctctaaaaataaataaatgagtgaatgaagcaagcaagcaactggctgctcaagcatctttcttaaaccttgccaggcgattctggtatgaatcaaggcttggttaccactgaacaagaggaattagtatacagagaaattcaagtgagattttgtcaaagaatttactgactttctcaacaattctagaaacatatattttgattagtaatttttctaaaaaggtgaaacatctaagccaaacttagtattccaagaaagcaaacaaattaacaaatatcttctttctctgttaggaaacttattaaaggtaaatatgtagagagtgcttttgagggctagagcataggatgctttgagttgagggctagagatgaaagacacttgaaagcacagtgtttcatgtagtactctccttgcttgatgactggcataaggcattgttaccattggcatcaaccctctcttaatagttctcaggggcaatatgtaccttagagatttaaaacatatgttgcagttttgtggtcaggtctctcaaaccttcattttcaaagatttctaagttgaaaagtctgtttcaaaatctgattgggggttttacattttttaggaaaaagtttaaaacacgttcgggtgaaacagtgcgcctcatggatcttctgggagaaggactaaaacgatccatggacaagttgaaggaaaaagaaagagacaaggtaattcaaagccttataggcataatgtgtatcaagcattgtgatttttcatttttgtttttattgagagaactgaggagaagtgtgaggagtcagtcccacctaggacaaggcttatattgctctgactttattgcacagtaagtttattttgtgaattgctgagcatttatttagaaaatatagttcttggcaattaaaaaagaccttggctttttcctcctttgttaatgtagcttagtatccgtgctgcttaacagcagttcccaaagatgggagaatattgcagactgaaggggtttgattcgtcagctcacatcagagtctacatgtgccatgctccttcttgggagcatttgtagagtggtcatagcagtcagttcttgccacccaaggccattgatgaaccttcagagcaggcaacatgatggcctttcatggcacccttagaaaagactatggttcagtttgtgtggaatttggaggaattgaaaagtcaacaagaaaaattttttttttttttttttaagtttagagcagtagaggagaggtcatgcatacctgagactgggtaatttataaaagaggtttaattggctcatggttcttctggctgtaggagcatggcaccaacatcagttggcttctgggaaggcctcagggaacttttattcatgggggaagatgaagggggagcaggcacttcacatggctaaagcaggagcaagagagagagagtagggggagaaggtgccacactcttaaatgaccagatctcacaacaactcactatcaccaagacagcaccaagccataaggaatctgcccccatgatccagctgaatcactggtctaggcacatctggcacagtcagatgaaaagtggtaagttcagtcatctagctgtttgttagtctgcctgatgacaaaaattgctttaactctttttaaccactccagctagtaattttttaagttacttttaattgtgcatagtaaaatgcacagcctaatgaatttttacatatatatgccttagaacaccaatcaagatatatttccatcaccccagagattttcctatcaccataaatcacttttgcttattctggcatttcaaataaatgaaatcacatagtatgtgcccttttccatgtgcatcagtagttcatatgtttttggttttgttttgtttttgagacagagtctcactctgtcgctcaggctggagtgcagtggcaagatcatggctcaccgcatctcgacctcctgggctcaagtgatcattctacctcagcctcccgggtagctgggactataggcacccactgccatacctggctaattattgtattttttgtagagatggagttttgccatgttggaactcctgggctcaagcgatccactcaccttgccgtcccaaagtgctaggattacaggcataagccaccacacccagctgtagttcatttgtttttattgctgcatgatattctgatatatgaaggtgccacattttgtttatccattctcctattgatggacattaggattatttccagttgttggctgttctgaatacaaagctattttgaacattgttgttcaagcccttttagaggtacatgtgctttttctttcggatatatatctaggaatggcattgctgggttgtagggctgacttacgcttaactttattaaaaattgccaaggagaaagtggtgaccgttgtatactcccactactaacatatgagagtttcattgcaccatatgtttacccacattggtgtattagtcagggttctctagagggacagaactaataggatagatacatataaagggatgtttattaagtattaacttacacgataacaaggtcccacaataggctgtctgcaagctgaagagcaaggagagccagtctgagtcccaaaactgaagaacttggagtcagatattcgagggcaggaagcatccagcacgggagaaagatgtaggccgagaagctaggccagtctcttctcttcacgtttttctccctgctttatattcactggcagctgattagatgctgcccacccaattaagggtgggtctgcctttcccagacaactgactgaaatgttaatctcctttggcaacactctcacagacacacccaggatcaatacttcgtatccttcagtccagtcaagttgacatactaaccttgacaattggtttagtcagtgttttttattttagcttttctggtgagtgcatagtgacttattgtggttaaaattttcattcctctgatgaataatgatattgatgatattgactacctttatttttctttcttttctttctttcctttttttttttgagacagagtctcgctctgttgcccaggctggagtgcagtggcacgatctcggctcactgcaagctccgcctcccatgttcacgccattctcctgcctcagcctcctgagtagctgggactacaggcacccaccatcacgccctgctaattttttgtattttttttttttttttttagtagagacgggatttcaccatgttagccaggatggtctcaatctcgtgacctcgtgatctgccctgccaccgtgcccggcctctttctttctttcttaagacagaatctcactctgtcacccaggctggagtacagtggcacaatcttggctcactgcaacctccgtctcccgggttcaagcagttctcctgcctcagcctcccgagtagctgggactacaggcacatgccaacacaccaagctaatttttgtattgtttttagagatgaggtttcaccatgttggccaggcgggtctcaaatccctggactcagcaatctgcctgcctcaggctctcaaagtgctgggattacaggcatgagccactgtgcctggcctgactgccttttcttaggcttattggtcatctagataatcttctcttgtgaagagtctgttaactcttttgcccatttatcattattattattattattttgcattagacaatcagtacttacatttatctatatattttcgccctttcctgcagttttttgattccacctgggattatttttccacaatctgaaggtctttatttttttagcacaggtctgctggggtgacagattctttcagaatttttgtttgtccaaaaatgtctttgttatgccttcagttttgcacaatgtttttattgggtatagaattctagtttggcagctgttttctttcagcatttttagagatgacattccacagaactggagaggaccagtggggctgagggaggaaataaataaaaattatactccattgtcttccagctaccatagtttcctttgaaaatcagttgtaagtttcattgtttctcctttgaaagtatgtatctttttctcagactttttttagtatttttcttaggctttatttttagtactttgactaagaaatgcctaagtgtggtttggggagtcatttttgtttttaccctttgggggctgccaaacttcctaaatctgtgggttgagttctttcatcaggttaggagaattcttggccctatctcttcaaatgctactacttttccgcattctgttatttttggtactccaagtacatatgttagaactttgtatctcacgtgtttcttatgctctaattcatttttttctttttgctttattttgaatattttctacttcagagaatattttggtattctgtgtttaaggtatttcttgaaatttttcatcttttcttccagttttcttactgttttccttttaattttttgaacatgttaatcatagttttctttaaacattttaaaacggttttagacataaaaaagttgcaagatagtacaaagaattttgtatctttcatttagtatccccagatactaatatctttcatagctatatagtatgattatcaaaatcaggaaattaacattgatacaataccattaactaatctgcagtccttattctggttgtacagttggtctcactaatgacctttttctagtctaagatccagtccaggataacatgttacatttagttatcatgtctccttctctttaatctgggcagttagttccttggtctgtctttgactttcatgacctcaacacttctgaagtctgctggtcagttagtttttttggaatatcacttagttggatttgtctgatattggctcctgttctgttaattctgtttccaggttatacagtcttataagtcttataagctgtactctgtttccaggttatacagtcttacaagaatagatgtagagttcttatcagttcatatcaggaggcacatgatattgataagcttcataattaataataataattttgatctctttggtaaggtgatagtatcagttttctcccctgtaaagttagtattttccccctttgtcattaataagtattttttaagtagcttcatcttaaacaatttcagattttaaagttgctattatcttttttcttttgtttctgttgtcttgattctctcctagccctttctttgtagtccccctccttagtatttagttatttcatcttgctcttttatctttttccccccacaagagataggggtctatgttgtccaggctggtttgaaactcctggcctcaagtgatccttccacctcagactcccaagtagctgcgttacaggcatgagccaattacaggcatgagcattacaggcatggctcatcttgcttttttagaaagatttatttgttgttgggtgctcggcattatgaagagaaaattataaagattatggctgaggttatttccctccagagaccgttatgttttcttctagcccacaggtagcataccagctgattatcttgaccctgtttgtattggccttatgcttctttagggctgaactatttaaattttacctgtatgactagggtgaggtccttactcctgaaatatggccctctggccatacttcaatggcgtgtgtgctaatgcccttccattttgccgctgcagaactgccttgtgtcacacagctgctgaaatcactgctcagctctttaattaccatttgctctttcctgatagattttttggagtcttgccttgtgcatgccagccatatgacatttgaaagaaatgtgttcacagagtctttgactcctctgtggctccttctttttggggattgtgtccttgcttctttggcagccccgtactctaaactcttgtcttctcacctcagcaagaccacttctttctgcttgggttctgtcccctttgtccactatgtagtgatttgaaaaatgcccttggggaaaaagccaagtgatgatggactccttcccaatgttttcattcttctaagaactatagtcccttcaactttgcttgtgttgatgctctctagtgacttcaaccagttgtttcatatgtttaacccagcttttaaatagttgcttttggtagaatggttagtctgctgcaaggtattctgtcatggccagaagcaaaaatccttaattacttacttgtggcctaataatgctttagaatacttgagcaaatattagcaaaacagtgaatgggttcttttatctactcttaatacacccttgatttcaattaattatttaacgctaactttttgtttgtattttttggtgttactctgtttcctataacctcacaatgttcatagtatgaagtggatataaactaataattgatgcttctggtttcatatctactgaatacactggaaaaaggtattcatgctgacattttacattttacaaattcagtttctcatagacacattcttcattgtgcataacgcattttatattttcattattttgtttgtacattggcccatgtccttctgcctcagtgtcagtgtttattaaagtttattggtaaaagaataccattagatgttccctaccccagtcttatgcctatgagacaccagggcagaagcagcagtcagtaagctatgaaatactgttttgtttttcccaaaggtcttaactgcagaggaattgaatgctgctcagacatccgttgcgtatggctgcatcaaatatgctgacctttcccataaccggttgaatgactacatcttctcctttgacaaaatgctagatgacagaggaaatacagctgcttacttgttgtatgccttcactagaatcaggtaattgtgggtaggcattgttttattgtgaatcaaatgaaagcatatttagttactcaaaaatattttctttttttttttttgaaatgagacggggtcttgggctcaaatgatcctcccacctcagcctcctgagtagctgggattactgacataccaccattacacctgacttctaaagtgtttttttttgtttgtttgtttatttttgagacggagtctcactctgttgcccacgctggagtgcagtggcgcgatctcggctcactgcaacctccacctcccgggttcaggtgattctcctgcctcagcctccccagtaggagggattacaggcactcaccaccatgcccagctaaattttgtatttttagtggagacggggtttcaccatgttggccaggcaggtctggaactctggacctcaagtgattcacccgcctcggcctcccaaagtgctcggattacaggcatgagccatcacgctcagcctaaagtgttcttttcagacttatttttctgcctacaagcatctttggaaatacgtcctcttttagtattgcaagttatcccagaatccctaaacctggccttaactgcacttgccgatactcttctagatgctctatgtttaaatacctagaaagtgtcacctgatcccctaaaagaattatatttccatttttagtattatgaaatgctttagatctggctattagttttgcctaatagtatatcgtataataaaatacttcattttataggaacttctttttaatcggtgataatttcgagtggagaatgagtgtgcctaaaaaaagggaacagtggtgattgcctgatgatttttttgttttttttaaggtctattgcacgtctggccaatattgatgaagaaatgctccaaaaagctgctcgagaaaccaagattcttttggatcatgagaaggaatggaaactaggccggtgcattttacggttccctgagattctgcaaaagattttagatgacttatttctccacactctctgtgattatatatatgagctggcaactgctttcacagagttctatgatagctgctactgtgtggagaaagatagacagactggtgagtgtcttttttttttttttttttttttttagtgagagacacggatcttgctctgtcccttgggctggagtacggtggtgaaatcataggtcactgaagcctcaaacttctggcctcaagtgattctcccacttgagcctcccgaatggctggacttacacacgtgtgagccactgcacccagctccaagtgtctcatttagtagccatattagggatggggtgccattaaagcatttgaattgtgtgggagtggttttcagatttattttattcatggaaacttccactttttccctaacagttgcacagtgaaccatatcatatataaaagacaaaatgtgaagtagcactttaaaccagaaatggaactctgcccaatcagtctacttttctacaattaggcacatgagatggaaccttaggactccaaagaaaacaattggaagatgactgagagtaggatttttccaacaaacacaatgtgtttgtgggtcccaggaggaatctttgggtgtttttgataatggaaacttcttggaaaacacttgttatcttttcttaccttaggctgtcttccctctgtcatattacatagttaatgaagtagccagaattaatgtattataaggcaagtaggcatttgttaaagtcatgcctgaggactgaaactttattagggaaaaaaatcaccactgtgataatgaggtttatagttatttcagaccgtgaggactaggaaaattttttaaaagaaaggtaaaatttactgttctcatcattgcagaccttatatctcttaatagttaaaaacacatttcttaacagaaatgcctttattttttaaattgtttgtcttcatagtttaaggtaaagaagattctagttaaaacccaaaaacatctgtgggttggactatgcacttctaactaaaatttgcaagtaacatagattctttaataatgattttcaaaaaggaaaacaagttaattaacaacttttttctatcttttcaggaaaaatattgaaggtgaacatgtggcgtatgctgctatgtgaagcagtagctgctgtcatggccaaggggtttgatatcctgggaataaaacctgtccaaaggatgtaatccttcatag

SEQ ID NO: 375 - DNA, 23180 bp, Homo sapiens
  source 1..23180: mol_type = other DNA
gaaaggagtggggttgaaaagcgcttgcgcaggacggctacggtacgggggtgggagggcttcggagcacgcgcgcggaggcgggacttgggaagcgctcgcgagatcttcagggtctatatataagcgcggggagcctgcgtcctttccctggtgtgattccgtcctgcgcggttgttctctggagcagcgttcttttatctccgtccgccttctctcctacctaagtgcgtgccgccacccgatggaagattcgatggacatggacatgagccccctgaggccccagaactatcttttcggtaactgctggggggagctggagcgaggccgagcggggcctggtggcggtgagggtgggggtgaggggcgggaatccggctgcaaccgggtctggtggagaccgccagaccgacgggaggcctgagcgggtgggaagagctgcctgagccctggacctggagggattggagccgcggggggagccggtggcgtgaagggggaggagacgagcggcctgaagcgtctggggcgtgagcggtccgaggcccggggcctgaggtaaagtggaaccggccgcctggaagttcggcctttgccggggatacgtggcggagctccaggcgtggtttattttctaacggcggtggttcataggcttctgatgccaggccccgggttggtggtcctggaggctgggttcaccgggaagcatgggcctgcttgttggagcgggtagatgcacagcctggcgttattctggcctcagagcctggagctgccggacgtagacttacctcgcgtgcttcggccagttactgggggtggggaggcgcggcgcggcgtgaggaggccgcaaccgctgggagcacgtggttgccacgtggttgggggagggaggggggtgtgggcgctacatccgggactcaccggcgtgttgccactcgtgagccagggatgctgtggctctgttgaagtgggaaatgttaagaggctggtagcactagggttctggaggtctttgttcagtgcttacagcatgtactgtgatggcagctctcatttttttgagccccttttctgtctcactgcggtaggtggagctagccccactttgcagatgaggatactggtgcccagagataaactcacttaacgaaggttgtacttagtaaaggcaataagagactaaatctaaaccaagacgcttgactccgtagctgctgcttcgtgaatattaatgaggcttcgttttagggggacgtcctcgcatgccgccatttgtgcggcattgaccaaactgcttttctaaatacaagaaacacgtagagtgttcggtttgagtcagatcaagacctaagactattcgcagaattttgggagcaccacccccctcgacttgcggtagtcctgccccaaaaaggagagtcccacttgggtttttgatctcagtaggattaattgcagaagcctaatctttgtactattcagactttgaagtaaatgcaaatcctaccgtgaattttatcttgttcattatccgtgctgagatttgttaattaaacgtctgttcacatttaagcatgtatatgtattggtaacggttagatgatagttaaatggaatcatttaaaatttttattctgacagtgttttgaagaattttgcccattcatggagtgagagtagacatatgtattcaaaacattaaggctttaattcctagttattttggatagctgagaattctggtaaatttatatcagtactttttgataactatcggaaagaaccctccttgtcttaaacataatttctgaatatagtttgaggcgtatgtcactttctgttgctttaaagagtggagtgttgatccctgtagcaaacttcggttcttttacttttgtcatttttcttttgtaatagtaagctattcatgtttgtaaccgttctcatttcgaaattgccatttgggaatttaggtaggtaaatcagctgttttaaatagtgggaaacttaacattggacattacatttggtttcagataattgcttcaggttgagatttactaaaccattgagcttgtttatgcagaataacagtacctatcagcgtagttagagatgaaatatggtatgatgagagaatggaattatagtcttttatgggtgtctgtagaggtttctgttcaagaaatctaggaattgatcattctgctttgccctctggtagctaaaatagtgaaaaactagttcaaaagttagacctgacctttttggttacccacacttaagtttcagtgttatttttctccttgttagagttgcttttttcttcatttacaggttgtgaactaaaggccgacaaagattatcactttaaggtggataatgatgaaaatgagcaccagttatctttaagaacggtacttaaactttcaaaataaactacttaaccctacttgatttcagccttttagtttctattcatgtggcttgagactttttttcctttgctgactgcttataaaatactatttcttacacctgggtattgtgtgtacctcactgtctgtacatctttgaagaacttggcatctataccactcatttggtaaccatgtaaattccagtcacactgttcaacttgccttattttcttcagttgaattacaaagcccttgtaaaaggcatcgataatctttcatgtctaccagagactagccttctgctcaacttagaagttgctcaataaatatgttaggtggtctatattgtgtgtatgcatatttatgcatttcttaaattttctgaatatgagaaactgatttgccaagatcacaaaacctgaggacaacattgcacaaatttgttttccagggtaatagtgagaggtttatacttgttttttaaaaaaatcacagtcatgtgcctcattgcaactgctgggtcaacagatggatcgcatatacaatggtggtcccataagattattataccttatttttaatatacctttcctgtttttttttttctttggaggcagtctcgctctgtcacccaggctggagtgcagtggtgtaatctcggctcactgcaacctctgatttccgagttcaagtaattccctgcctcaccctcccgagtagctgggattacaggcatgtgccaccacacctggctaatttttgtgtttttagtagagacgaggttgttaccatgttgtccaggctggtctcaaactcctgacctcatgatctgcccgcctcagcctccctaagtgttgggattacaggcatgagccaccaagcccggccctttcctatgcttagatgcacaaatactgtgtttcggttgcttacagtattcagtacagtaacactgtacaggtttgtagcctaggtgtgtgtagtaggctataccatctaggtttgtataagcacattcttatgattgtacaaagatgaaattgtctaacaacacatttctcagaacctagccctgtggttaagtgacgcatggctgcatataacatttagtgggggggtgtaaaataggtggaactcaaaagttgaagtagtattttttttttgttcacaggtcagtttaggggctggtgcaaaggatgagttgcacattgttgaagcagaggcaatgaattacgaaggcagtccaattaaagtaacactggcaactttgaaaatgtctgtacagccaacggtaagggcacttacatactttggatgttgtgtcaaggtttaattctgttttaaggtaggtttggtgtcatttagttgtgccaaggagatagaaagtggttctttatcttctgtcactggagttcgatggtcaactcttgaacatgggggcttctgctgctacttttatcagaggtggaaaaacaggttcactggtttgttgatttggcttatgtgtttgcctgtaatgtttattgttcattttcttcacatgtttagtgatgaaaaatttctcccttctaggtttcccttgggggctttgaaataacaccaccagtggtcttaaggttgaagtgtggttcagggccagtgcatattagtggacagcacttagtaggtatgttatttttatatattatactacttagtttgtcctctttagtgcagttgcttggttcccagtttggacttaaagcatgggtatagtactactgtctttttaataggttccaatgtgagtctagaaattggagaggacaaataaatttttggggcgggggggagaggaaatcttgctgtcacccaggctagagtacagtggcacgatcttggctcactggaacctctccgggattcaagcgatcctcctgtctcagcctccccagtagctggggccacagacgtgcaccaccaagtccagttgcgtttcatagttatagtagagaaggggtttcgtgatgttggccaggccgatcttgaactcctggccttaacgtgatctgcacgccctggcctctcaaagtgctagtattacacgtgtcagccactgtgcctggcctaaaaattattttttaataaagacagtctcattataacggctggagtgcagtgatgtgatcatagcttgctatatcctcgaactgctactgggttcacctcagcctctggaatagctagaactacaggcacactccacgcctggctaattttttttgtatatgtgcagatggggtctcagtatgttgcccagattggactcttggcctcaagtggtccgccttggcctccccaaagtgagattacaggcatgagccaccctccccaggcttcttgcatttaaaacctggcagtgaacattaggcctcaaaatacttttgttaaaaagttccttttcccatgtgctctttttttttttttttttaaatagaatagaagtctcagtttttagagtatttactatcagtgttctttttttttctgacttcttgctgcttgagttttataatgtctaataaattgtattttagctgtggaggaagatgcagagtcagaagatgaagaggaggaggatgtgaaactcttaagtatatctggaaagcggtctgcccctggaggtggtagcaaggttccacaggtagagatggcaattttattataggttttgtattatagcttttagtttggtgatagaacagctcttgttcatgagtacgtatcttttcttttaaaagaaaaaagtaaaacttgctgctgatgaagatgatgacgatgatgatgaagaggatgatgatgaagagtaagtatgattttagaaacttgatatacttccggaatcttgacaaaaaaaggaatttgacatagttatatgcatgagggttttataaaagtcatttacaaaaagccatcctatgtaatagtttataataaaagggcaggtggtcatctgttgtcagtttaagttaaatgagctgagttgaaaggatattgggtctgtgagcctttacaatgctgtgacttgtgactcttcagaagggtagactatagtgtttgtgaagtttgattatgtccctttgttctgaagatttagtggatgtgttatacccatcaagcctggtatgttttatggtgagcagttaatgagattgggttgaaagaaaatatgattaaatagctctatattcattttacaagttgttactcaaggtttgttattccctaaaaggattttgtcttatggttttatgtagatatttattgacaaaaataagattctaaaagggatattaagattttcttgggatttaaaatatggttggaaacaatatttgatgactttatattaaactagatcaaactattgttacaaacagttaatacgcacactggtataaagtactgtttataattggtcttatgtgtgccagtaccagtaatgcattgaatactttgatttggctctcagctttgtccttcagttctgaggttggtccatatgcatttattgaaaacaaatataagaacatgcactttaaaagagaacctgcatgaaagatcaaattgggagtttaggttttaagctggtggttcttcaaaatctttgagcatgacgatgaaggcagaaaacaggaaaaaggccgaaagagccgaaagcttaaaaattcaaagtatgaccaggcgcagtggttcacacccgtaatcctaacacccagccaagatgagaggatctcttgaggccagcccggtcaaaatagcaagacccaatctcaaaagaaaaataaaaattcaaagtacttgcatgtcaaacttataaatgaacgcaaacttaaaggtagtatttgactgttgctgtttttgttttctttttttttttttttttttttgagatggagtctccagttgctcaggctggagtgcggtggcgccatctcggctcaccacaacctctgcctcctgggttcaagcgattgtcctgcctcagcctcccgggtagctgggactgcaggctcggggcaccatgccctgctaatttttgtatttagtagagacagggtttcagtatgttggtccggctggtcttgaactcctaacctcgtgatctacctgcctcggtctcccaaagtgctgggattgcagatgtgaaccactgcgcccagccaaatttttgtatttttaatagacatggggtttcaccacgttggctaggctattctcaaactcctaacctcgggcgatctggtcacctcatcctcccaaagtgctgggattacaggcatgagccaccgtgcccggccactttttttcttgagatggtgttttaccatgctactcagactggacttgaatctctgggcacaagctatcctcccctctcagactatgaagcaggtggggttacaggagcataaccaagcccagcttgtttggttatcacttttaagaatatttctcgttagtaagaattgaaatacattccaagagaagaatgggaaacaggctaaaaacacaaattagaaatagggatggtatggttcggattggtttagtctgattttgagttacctttgtacaagtttataaaataagtgtttaatagcattcaccgaggctcggggacaagcaatcccttccagaaaggctttggagtaggacctgattgtagtattgaccctgttggggctttggaagatttccttttttaaaaattgatataattaggccaggcatggtggctcacgcctgtaatcccagcactttgggaggctgaggtgggtggatcacttgaggtcaggagttcaagaccagcctggccaacatggtgaaacccggtatctactaaaaatacaaaaattagctgggtatcgtggtgcctgcctattggtcccagttacttaggaggttgagtcaggagaattgcttgaacctgggaggtggaggttgcagcaagccaagaatgcgccaccgtgttccatcctgggcaacagagggagactcccatctcagaaaaatgggtataaattcatgatgtaaccacaatgtaattttgtttgtctttaagttgggcattgataggaatgaaaagtgtagatatcaaggtccaaatcagtacctggttttttttgtgggattttttttttttcggcaagtctcgctcttgtgccccaggctggtgtgcaatggtatgatctctgctcgctgcaacctctgccttccaggttcaagtgattctcctgcctcggcctccagagtagcttggattacaggcacttgccaccacgcctggctaagttttgtatttttagtagagacggggtttcaccatgttggccaagctggtctcgaactccaaagtgctgggattacaggcgtgagccaccatgcaccgccgcaagttttcatataagttgaagaaagtgtactaaggtctgcatagtagtaaaggatgccttgagggaaacaaatattaatagaaacttcagtggtgagatggcaagggcccagcatagatagatggcaatgaaaatgcaaagaggtgcatgaaggttcgttatagttacttagaaatctaaccttttgaacacagatcaaaggggaatttggttcctttttgaggatggaatgggtatatggtgtgggctcagatgactcttgatttaagcaagaaaggctatgtaatgtgcatagtgctgatgtatactatacatagatgtatgtaatacgttgatagtatgtggcccttaaatgtcttttttaatttttggggaatttcttaagtaaagctgaatttttttttttttttttggagacagtctctgttgccccggctgaagtgcattgttggctaggctggagtgcagtggtgcaatcatggctcactgtaacttctgcctcccgggttcaagtgattctcctgcctcagcctcccaagtagctgggattacaggcatgtgccagcatgccaggctaattttttgtatttttaatagagatggggtttcgccatgttggtcaggctagtcttgaactcctgacctcaggtgatctgcccaccccagcctcccagagtgctgagattacaggtgtgagccaccacaccctgccagtaaagctgttttgatagtagttttgatagctattttgatagtagtttaatagacttgttttaacaaataagaaaaaatgtttaaaaaaagcattctcatcttgtttctagcacaggggaggcacctgcagggattgggttctaatgccagaaacttgtactgacaaaatcactgttaaaaagccacttgaagggctatttgtgacagctttttaagttatgatactttttctaaatacagcaaatatttcttcggtattggaaagataggtgtttcttacatgaagttgctgtattgggatttagagaccagtacgttcagttgttgaattaaacgtgaaccccttggtatttgctaatagagacttctgcctgacttgccctccagtgactcgatttgattactcccctccattgtttacctattaacagttcacacctgtaatcccagcactttgggtggtcgatgcgggcagatcacctgaggtcaggagttgaagaccagcctggccaatatggtgaaaccccgtctctgctaacatacagctgggtgtgatggtgggcgcttgcaatcccagctgctggggaggctgaggcaggagaattgcttgaacccgggaggcggaggttgcagtgagccgagatcgcaccattgcattccagattgggcaacaagagtaaaactcaaaaaaaaatagtgtgcagttcagtggttttagtatgcatagttgtgtagccatcaccataatcaattttagaacatttcatcacctcaatgagaaatcgtactctataggtattacccctcatgctcttcagctctagtcaaccacgaatgaactttgtctataggtttcctgtccctcatattttgcacgaatggacttctgtgactgttttcttagcacagtgttttcaagtttcatccatgttatagcattatcagtactccatttatttatatggttgaatacattgtatgggtatgtttggttattcatcagttggtgagcatttgagttgcttctacttgttgactgctatgaacgcttgtagacatgtcattttacttggatgtacacctaaagcagagtggctcacccattgtattcccactagcagtgtatggggcttctgatttcactccaacctactgatttcactacaccctcacttgccattatctgactctaatcctggtggtatgaagtgctgattgtgggtttgattgcgtctccctgtggactaataatgagcatcttttcatgtattcattggccatatatctttggagaaatgtttttgcccacttaaatccatttacttctctttgtctttactaagttgtaagaattcttttttcttttttctttttgatatgatttttgtatttttagtagagaaggggttttgccatgttggccaggctgttcttaaactcctgtcttcagtgatccacctccctctgcctcccaaactgctgagattacagctgtgagccactgtgcctggcaagaattcttttttttttttttttgacaagtctctgttgcccaggcttgagtgcagtgatgtgatcttggctcactgcaacctcctcctcccttgttcaagcaattcttctgcctctcccaagtagttgggattacaggcaccccccccaccacgcccggctaattttctgtattttaaatagagaccgggtttcgccatgttggccaggctggtcttgaactcctgaggtcaggcccgcctcggcctcccacaagtgctgggattacaggcgtgagccactgcactgggcccaagaattctttatgtattctgcaaacaagtcccttatcagacacaagatttacagattatcttccaccattccgtgaattgttacttaactttcatgatggtggcctttgaacaagtttttaatttttatgacgtccgatttcttttgttgcttgtgcctttggtgtcaatcctaagaaatcattgctaaattcaaagttgtgaaaatttgcccccttaattctgagttttgtcctttatatttagggctttgttccattttgagtaaacttatgtgtatggtgtgaatggaggggtctaaatatagactttggatgtagattagcagttgccccaacatgatttgttcaaaaactattttttccccattgaatgatcttggcaacctttaaaagagtcacttatggctgggtgtggtggctcacacctgtaatcccggcactttgagaggctgaggcaggcggatcatgaccaggagattgagactatcctggccaatttggtgaaaccctgtctctactaaaaatacaaattttagctgggcatggtagcgtgtgcctgtagtcccagctactcaggaggctgaggctggagaattcgcttgaacctgggaggcagaggttgcagtgatctgagattgcaccactgcactccagcctggcgacagagcgagactccgcctcaaaaaacaaaaaaatcactgtttctggactgttctgttgatgtgtctatccttaacatgtaagaacagtacaacactgttcctctgtggtttttatttatttatttttttgaaatgagtctcactgtcacccaggctgtagcacagtggcgtgatcttggctcactgcaacctccgcctcctggttcctcctgcttcagcttcctgagtagctgggattacaggcgcccgccaccatgcccggctaatttttgtatttttagtagagactgggtttccccattagccaggctggtctcaaactcctgacctcaggtgatctggccgtctcggcctcctaaaaagtgccgggattacaagcgtgagccacggtgccttggcccctttgtaggtcttatagctgattttttgaaatcaagtgtgagttttctagctttcttcctttccagattgcatttggcctctttgggtcccttaagtgtcttttttgtttttgttttttgagatagggtcttgctctgtcacccaggctggagtgcagtggcagaattacacagttacagttcactgtctcaagcagatcctcctgccttagcttttcaaatagctaggactacaggcgcacaccaccacgcctgctaattaaaaattttttttgtagagagggttctcattatgttgcctaggctggtcttgaactaaaacgatcctcccacctcagcctcccaaagtgttaggattataggtgtgagacactgtgccagttcttgggtttgtttataaattttaggatctgtttctacagagaaaccagcttggggagtcttctaacgattgtatttaacctgtatattcggggagtgtttccatcttggcaatatctgaacatggaatgtttctatttaggtctttaatttttttttttaacacaaattcactctgagtgtacagtttaatagaactatacattacttaaatatacatacattatacagtggtatagtgtgtatttatgcaaaactactcattgagcaacttcatttcccagcccctagcgatcacaattataccttctatttctttgagtttgactacttttagatacttaatgaatagaatcatacagtgtttgttcttttgtggctggcttatttcactttgttcaaggttcagtcatgtagcatgcaagaggattttcattgtgtgtacatatacattttcatttagtcatttaacacttgggttgctttcacctcttggctgttgtgaacaatgcttcgataaacatgggtgcacaaataatcacttcaaggtcctgctttcaattcttgtgtctactcccaaattttgaaagtgcttaatgtcttgacatttcatttgtagtgatgatgatgatgattttgatgatgaggaagctgaagaaaaagcgccagtgaagaaagtgagtagatacaatgctacaaggttgttaaactaacaatagaaatggtgattttttagtgctatttgcttgttttgtagttaagggaagctggtgtgggagatcatctcatactgaaaattagtcctgaggaggattacagaaaacttaagagtggggaatggtctgttttctttatccatgtggccctccacccagtttgttagtcttgtgtaaccttttgtccaagtggttgctgctttttccttccttttttttttttttttgagacggagtctcaatgtcacccgggctggagtacagtggcgcgatctcagctcactgcaacttctgcctcccgggttgaagcgattctcctgcctcagcctcctgagtagctggaattacagactcatgccaccacacccagctaatttttgcatttttagtagaccaccatgtcggccaggctggtctcgaactcctgacctcgtgatccacctgcctcggcctcccaaagtcctgggattacaggcatgagccaccacgccaagcctgtggttgctgcttgtcttacatggcttggacagctttgtttgcactgttgttggggtcagggacagtgattaagataaatttctaattgcagtctatacgagatactccagccaaaaatgcacaaaagtcaaatcagaatggaaaagactcaaaaccatcatcaacaccaagatcaaaagtaagtggctacatttacacgtgggtctcattgatctagttggggaaaaagattctactgtggaagaatctagtgtgtctgaaatttgataggcctttatagaacccctgtaattgctgtttaaaagttaaaatcagcttgctgcagccaggctcagtggctcactcctgtaatcccagcactttgggagggaggccaaggtgggtgggatcacctgaggtcaggagtttgagactagcccggccaacatcgtgaaaccctgtctttactaaaaacacaaaaattagccaggcatggtggtatgtgcctgtaattccacctactcaggaggtggagacaggagaattgcttgaacctgggaggtggagtgcagtgagattgcaccactgcactccagcttgggcaaaagagcgagactccgcctccaaaaaaaaaaatcagcttgttgtgtgttgtaggtacacacacacacacaaacatactaaatgtaaggtggtggggcggggggagccaatagacttttttgaaagagatggaccctcactttgtcactcagtctgggttagagttgcgtgatctcggcttactgcaaccttcacttcccgggttcaagcgattctcctgcctcagcttcccaagtagctgggactacatgcgcgtgccaccaggcccagcgtatttttgtatttttgagtagagatggggtttcactctatatgttggccaggctggtctcaaacccctgactgcaggtgatccgccctcctgggcctctcaaagtgtgtgagccaccacgcctggcctgaattttttgtgattgtgaagtcaatagttgtttcctgtaaggaatctttgttgaaaggtatgtctgcatagagtagaagttctcaaccttggctgcatgttagcttgaagtagaacatttgggcctagacagggtgtattgatctcattcctgaccctacccacttccctgcagaaaatggaatttaaaggaaaaaaagtttaaaggaaccccagtacttgtgctctacttatggagattgtcataaaaatggtctggggtgggcgccaggcatcagactacagtgactttcttgctttattcttagggattttctgatttccttttttttttttttttaacctgatgaaatagtttatttacaatttaaacgaataaatttcatattctacaacacatataatctattgactaaatgtaactaatgatgaacctccatacaaacaaccccactaaaaagtgggcaaaggacataaacagacacttttcaaaagacatacaagtggccaaaaagcatatgaaaaacagctcaatatcactgattagagaaatgcaaatcgaaaccacaatgagataccatctcacaccagtcagaatagctattattaaaaactcaaaaaacaacagctgctggcaaggttgcagaaaaaagggaatgcttacacactcttggtgggagtgtaaattagttcaaccattgtggaaagcagagtggcgattcctcaaagagctaaaaacagaactaccatttgacccagcaatcccattacattcccaaaggaatataaatcattctaccataaagatacatgcacacaaatattcactgcagcactattcacaatagcaaagacatggaatcaacctaatacctgatatggtctggctttgtgtccccacccacatctcatctcaaattgtaatccccacgtgttggaagaggggcctggtgggaggtaattggatcatggggtagatttccctcttgctgttctgttgatagtgaattctcatgagatctggttgtttgaaagtgtgtagcacctccccctttgtgctctctctcttctgctgccatgtaagatgtgccttgcttcccctttgccttctgccatgattgtaaatttcctgtggcctcctagccatgcttcctatacagcctacagcactgtaagtcaattaaacctcttttcttcataaattacccaatctcaggtagttcttttttttttttttcattttatttatttatttatttattttttatttttattttttttttaatttatttttttattgataattcttgggtgtttctcacagagggggatttggcagggtcatgggacaatagtggagggaaggtcagcagataaacaagtgaacaaaggtctctggttttcctaggcagaggaccctgcggccttccgcagtgtttgtgtacctgattacttgagattagggattggtgatgactcttaacgagcatgctgccttcaagcatctgtttaacaaagcacatcttgcaccgcccttaatccatttaaccctgagtggacacagcacatgtttcagagagcacagggttgggggtaaggtcacagatcaacaggatcccaaggcagaggaatttttcttagtgcagaacaaaatgaaaagtctcccatgtctacttctttctacacagacacggcaaccatccgatttctcaatcttttccccacctttcctgcctttctattccacaaagctgccatcgtcatcctggcccgttctcaatgagctgttgggcacacctcccagacggggtggtggccgggcagaggggctcctcacttcccagtaggggcggctgggcagaggcgcccctcacctcccggacggggcggctggccgggcaggggggctgaccccccccacctccctcccggacggggcggctggccaggcggggggctgacccccccacctccctcccggacagggcggccggccgggcggggggctgacccccccacctccctcccggacggggcggctggccgggcagaggggctcctcacttcccagtaggggcggccgggcagaggcgcccctcacctcccagacggggcggctggccgggcggagggctgacccccccacctccctcccggacggggcggccggccaggcggggggcttacccccccacctccctcccggacggggcggctggccgggtgggggggctgacccccccatctcccggacggggtggctggccgggctgaggggctcctcacttcccagtaggggcggccgggcagaggcaaccctcacctcccggacggggcggctggccgggcggggggctgacccccccacctccctcccggacggcacggctggccaggtggggggctgacccccccacctccctcccggatggcacggctggccggtcgggggggctgaccccccacctccctcccagatagggcggctggccgggcggggggttgacccccccccacctccctcccggacggggtggctgctgggcggagatgctcctcacttcccagatggggtggctgccgggcggagaggctcctcacttctcagacggggcagctgccgggcggaggggctcctcacttctcagacggggtggttgccaggcagagggtctcctcacttctcagacggggcggccaggcagagacgctcctcacctcccagacggggtctcggccgggcagaggcgctcctcacatcccagatggggcggcggggcagaggcgctccccacatctcagacgatgggcggccgggcagagacgctcctcacttcctagatgtgatggcggctgggaagaggcgctcctcacttcctagatgggatggcggccgggcggagacgctcctcactttccagactgggcagccaggcagaggggctcctcacattccagacgatgggcggccaggcagagacactcctcacttcccagacggggtggcggccgggcagaggctgcaatctcggcactttgggaggccaaggcaggcggctgggaggtgtaggttgtagtgagccgagatcacgccactgcactccagcctgggcaccattgagcactgagtgaacgagactctgtctgccctgatttccttttttgaactgacttagtactgtgcataaaagcaaactcccaagttactctttttttttttatttaaagagatgggtggcctactcttgcccaggttgaagtacagtggtatgatcatagctcactacagcctccagctgctgggcttaagcaatcctcctgccttagcctcctgagtagctgggattacaggcatgcaccaccatgcctagctaatcatcttattccttccttaaaggaaagattttaagaacaaaattatatggcgtgaatttattgatgataattccagttgtataattagctttataagggagttttgtgagaatatttgaggaaatccagatagaatgggttttaattaggaattgtatttattcttatgaccttttggaaattcatttctttttcagggacaagaatccttcaagaaacaggaaaaaactcctaaaacaccaaaaggacctagttctgtagaagacattaaagcaaaaatgcaagcaagtatagaaaaagtgagtaaagttatcttaaaaaaactttgtctcccccctcaaattgcacgtgtctggtttgcatagacttgaatgtttcttgtttttttgtttgttttggtttaatatacttgcctggttcgtggtatgaattttttcaaaaatttcttataaaacatttataatcgtgtctgtggtgatttttgcatatgcaaaattaaatatgccttattttccattatgcaaggaacgtagtgcactggttgcaagataacattctgaccttccatgttaaaatagatcagtgaaaaccctttgcctattctggttgtaagatatgctagagaaccaacagagggcgtatgagacttcattaaaattacaaacagctggaaaagtagatgctggctgttgcttggtattatagttaatattcatgattgaccctagtcagaagtgattttcagcagattgagacatttctctttgccctttacaccaagttgtcaccagttaatacatgtagtaatagctagatttcgtgaatgactaataggcttaaatctagtttccttttgtcttaaataatggaaatgtgggaagagggttaggtctctcatctgcttgactgggggatttgagtaggatatggaataaatggtttaaatgccttggaagcacatttgagagaagctttaattctatgaataatacttttagactccaactattgagagcaaatgtggggtggtgaaaaattgccaactcatttccccatgtttttcttgtaatctatagatttttcgtggcttcagtagattccttgtacagtgataagtccactggaaaaagaattttagaactggaacatatttcttttagtcacactgtaaaccctttagccttcctggttatcactgatttttgtcccttggatacaatgctaaaatgacatcttttagatgcccctcccctccattttaatatggtcctatctccttggtttaattgcaggcgcattgaacagtcctgggcactacatgtaaattaagcccaaagatggggagaaaggaaaaggagagacaaatatagtccatactgagtgtcatcaacaatccagactgaagtcttctattttaatctcaatccccttttctgatttgccacccatgcctcttcaggctggaaacaatctcttggttccctaaagcactttcttctgactgctgtgattcagtgaaccttgccctttgctttctattacttgtgcatttgcctcacctgacaatgttttaaatcgcctttgtatctccttagctgctcaataaatatttgaatgcatcaattaagaatgtatgtgacaataattttgaaatggaaattgtgaggtttattttactaggttattggaggcagttaagtttcttaatgctatacctgattctgccaaagtcccttggacatttgaaaaccttttcaatcttttaaaaatgcataaaagatacttagagggaaaggtattaattaaatttagtaaaaacaaatatattcaatgctttaaattccaaagtagtgataaatacaaacatttcaagatatttgcaatagtaatgttttgaaattttggttacaaagtcacaggtcttgccaatactgttgtagtttcttgcctatatccgtaatttgaaggaaatggtgagagtgattagagaagtgtaattactgtaattttttcccctattgtagtttcttgcctgtatccataatttgaaggaaatggtaagagtgattagtgaaatgtaattactgtaattttttccccattcaactttatatatctttaactgatgaccagatcattgttgttctgaaccagtttgtggtcagcaagtgttttgtggggttttgtttgtttgtttttaaagaacagtttgggtcacttgacatggttctccaaagggatgttatgggttgtatttggttctgggtgataaccgacttgttagataatttagataagcaaccgagttgccatgtttgtttgtcgaatctcaagtgtagcttatattttatgttcctagagaggttgtcagggaagatttgaccctttggcaaatctgtttgaatagagatactagccatgctgcccaatagggctttctggccctgaaaaagatacggagtattcttggaaagttgaagggaaaaagaataaactgatccatgtagtagcatgcagattattgaggaattttctaaaggtatctctctcggtgtatttctctacttacctgtaataatgcttttgtcttaatagggtggttctcttcccaaagtggaagccaaattcatcaattatgtgaagaattgcttccggatgactgaccaagaggtaactggattttctggggacatgattaaatccaagtttttttgtgatttattatgattctgcctttaccctttttaagtgttggctctttttaaaaagttcctaaccacagataatatttcatttaatgaaatacctgaaaactcatgtatttaatgaaatgcatgaagaatacagttggcagtctgagatgataactttagtatatttttcccagatttcctatagttggtaaattatttcttggttattgaattcagttttacttttttggtactatgttggttaaggaaattgctgtggttttccttgctgttccatttgactgcttggggcagtctggtcttggcttttttgggagttggtagagatcttttttttttttttcctagatcttatgggaaatacattatgccaaaatcatcctaacatgaaatctggaagcaagacactaaattgtggctactaccagatacataagcttgagttagctgttagattttacagttagtacatgtgaaagtcttagtcaacataaagattatgcatttatttttgctcttatttacagttgactcataagtgtaaggacaatgtaaaagtggttaaatagggatgttaggtatcgtgtggagaacggatgctgcatttaatggtctttaggtttcctgtggtcagcttttttcaaaaaattaggaaaatttggcaattagctggttttttttctgccatagtattttgcacttcaattatttaattgcacttcaatttttagttttcgggttcgtaaaaccctgataatggttaattttgagtttagctttgtgaaagttgtagtgatgggctataagatgatcaggttcagtctttggttgctgttctgttttttctctacatttgaatcctaaagtttaaagtgtgagttttgggagtttatttggaatactaaacattgattaatcataaattattttgaaactccgcgttatgcaactgtttatttaatattgaaaatagtggaaagtcagacataaataaccagcatgtactaacagctaagcagcataagagatgcattcttcaactactgccaaggaaagtgatgataaatttaatgattaagttgcagtagtcttctgtactttataacaaaggcttgtagctacaaagtcttgtagctattaaattactgaaccagcacttctacaagaagtattttctttttataaaaagtatttttggccaggttggtcttgaactcctggcctcaagcagtcctcccatcttttcctcccaaagtgctaggattacaggcacgagccaccttgcccagcctaccagaagtatttttttgctctagaattgaaagtgttctcaagtgtcagaatgaaatttctggaataaatagtaaatgtttaataacttgaacttgaattgctgttacagagattatcaaaactaaatgcttcctgtttttgacatagagatgcatgatgcaagcaacgacaatgtatatttgtttgaacctgatgataagatctctggctgggcgtggtagttcatgcctataatcccagcactttgggaggcaacatggcaaaactctgtctctactaaaaatactaaatttagctgggcatggtggcatgtacctgtaatcccacctactcaagaggcggaggcaggaggatcgcttgaacctgggaggcagaggttgcagtgagcgccactgcactccagtctgggtggcagagtgagagtctatctcagaaagaaagatttctatgatatttaatattggcattcggtattcagttaccttgtacctgagaacccattggctgtgaaacagtgacagctgagagaatcctgagtcatctcatttctagttcttggtgaacttctggacttttcttcagaaccaccttgccatgttggccaggctggtcttgaactcctgacctctcaggtgatccaacaccttggcctcttaaagtgctgggattacaggcatgagccaccatgcctggccagctgttttttttgttggtttgttttttgttttggtacccatctgtagtgtgatcttggctcactgcaacctctgcctcttgggctcaggcagtcctcccacctcagcctcctgagtagctgggcctcctgtagttgcacaccaccaagcctggctaatttttgcatttttagtagacagggtttcaccatgttgcccaggctggtctcaaattcctgagctgaagtgatctgcccgcctcagtctcccaaagtgtagggattacaggcgtgagccaccatgcctagcctcagcatatagttttttctaaatgtacacatgcccaggcacacatgcacaggcaattcagaataagtttctggtgtttatgtaactttatttgccaaatctggccaactctaaagctgatctcgggagatgaagttggaagtaacattggccatatgggtctctgttctttctgttgatttccttaagtaaataatgctaaactattaaataattattagtatattgttcacatttttatgactgattaaagtgtttggaattaaattacatctgagtataaattttcttggagtcatatctttatctagagttaactctctggtggtagaatgaaaaatagatgttgaactatgcaaagagacatttaatttattgatgtctatgaagtgttgtggttccttaaccacatttctttttttttttttccaggctattcaagatctctggcagtggaggaagtctctttaagaaaatagtttaaacaatttgttaaaaaattttccgtcttatttcatttctgtaacagttgatatctggctgtcctttttataatgcagagtgagaactttccctaccgtgtttgataaatgttgtccaggttctattgccaagaatgtgttgtccaaaatgcctgtttagtttttaaagatggaactccaccctttgcttggttttaagtatgtatggaatgttatgataggacatagtagtagcggtggtcagacatggaaatggtggggagacaaaaatatacatgtgaaataaaactcagtattttaataaagta

SEQ ID NO: 376 - DNA, 32709 bp, Homo sapiens
  source 1..32709: mol_type = other DNA
gggccgggcttcgtgcggtggggctcgctcgcgcggcagcggtggccgaggcctcttggttctgcggcacgtgacggtcgggccgcctccgcctctctctttactgcggcgcggggcaaggtgtgcgggcgggaaggggcacgggcacccccgcggtccccgggaggctagaggtgagaggggagacctgagcgcgtcctcgggcctgtgaggacctcggggggctgggagcgcctctgcggctgaggggtcgggcgtggccggcgactgaggggtcgggctggctcttgagggcccaggccctggccgacgcgcccgccgtgagcgaggaggcccgaatccgggcgtctttggttgggttgcgggcccaggccgcgccgccggggtcgggaggcgtggcaggtggcccgacagccttctttgacctctgggaaagctgacttattcctatggctttgcttctagggctttcttaggcctctttgccggctgcctgggcagccgcgaggtgggctggagtaactgggtaaaagtatagggtggaatcgggcctactaggtacccctagtagtagggaagggtggtattagaccgagagggaatgtttacaactagcgttacagtttaatatttgaaaatccaaagcggagactggaccctagttccctgaagagaaaggggaatgtaccagaaggagaacacgcagtggttgagaaacttagcagttacagcacctattctggaggcgagtaatccagttggagagggacagggcgttaaaagcaggaaagcccccgaaagctcatctaagtgcatctctttccacaccggaggcctggaggtatgaaatgactggcccaaggtcatgcgattagtgtactgatggtgctgggattatagttcagggatagaccgtgcagtggttaacgctaaggccctggctcgagtctttgattggtcattggttgctctgtgaacttcggcagttttcttaccctttgtgcccccgttcttgtcaagtaatggatataataatacccgatggatttgtgaggattaaattaagatatgtatacaataagacagggaagtccgacatttagtaactgctcgatgatcattgcggtacgttattataatctgaatgcctttggaccaatacactgccatcctagtgaactggttcagtcctgtttcgcaggacctgaggtcacagttatggtgatagaagaaaccgggcattgtgtattaccgctgggcatgacacaagtgattgctggttgagggaagttaaactgagcttaatattaaaagattgagaggacaagattaaccatagttaagtctttttacctctgatttaggaaatggaagattttgcttaattttttaataagtagatttttttaagggggaagaattttattgatctttaaaatcattctgtatctcagtcttttcccaacattgtttgagggtcatgaatagaagcaactgccatatggatcaactgttgtacatttggtataattatacttagagcagaggtaaaggactatgtgggagttctcctgtgcatcagccagggtgcacacacaagccaggtaactggatcatgagaatgctcgagtgaactgtgtgtgggggtcagtgttgcacaacagaaattttctgacttatctgcaaatggctgtcagcattccccgacaccttactatccttactccccagttcatttagcgcattatcttctcagggccacaagggataagtgttttgacagaagtcgttgctgccgttttggcaatcacactattgcatccttttagttagagttctctttgccctggaagacagcttaaggggatgaagtggcagttggtgagcatgaattgcaggctcatgaaacttgaattgtgtgcccagtgtggtaaccttttttttttttttttagacggagtctcgctctgtcactcaggctggagtgcagtggcgcgatctcggctcactgcaagctccgcctcccgggttcacgccattctcctgcctcagcctcccttgtagctgggactacaggtgcccgccaccacgcccggctaattttgtttttgtatttttagtagagacggggtttcaccgtgttagccaggatggtctcaatctcctgacctcgtgatccgcccacctcggcctcccaaaatgctgggattacaggcgtgagccactgcgcccggcccagtgtggtagcttttgtcccactttggtttccgtaacttcaaaataggaatgagaagtctcctgggttcctcacctttagggggcaattgggaggggcagataaaatggtgaacatgaaactactttaaaaagtgtaatgaattggctgggcacggtggctctcacgcctgtagttcgagcactttgggaggctgaggtgggcggattacttgaggccaggagttggtaaccagcctcgccaaaatggtgaaaccctgtctctactaaaaatacagaaaattaacctccagctactcgggaggctgaggcaggagaatcactaaacctggaaggcggaggttgcagtgagcggagatggttccattgcactccagcctgggtgacagagtgagactccatctcaggaaaaacaaaaaaaaaagtgtaatgaactgtgcaaatagaatacgccgtttataataactcctaggaaataataaaagtacctaaacagttaaaacctatacagcttttggtaaaacttttcaggaaagtcctggttgaattctttgttactccaacagatgtactttttttttttttttttttttttttttgagacggagtctccctctcaggctggagtacagtggtgtgatcttggctcactgcaacctccgcctcctgggttcaagcaattctcctgcctcagcctcccaagtagctgggactacaggtgcccaccaccacacccggcccggttttttgtattttagtagagacggggtttcaccgggttgtccaggctggttgcgaactcctgagctcaggcagtccgcccacctcggcctcccaaagtgctgggattacaggtgtgagccaccgcgctcagccttacttatttttttagagacagggtcttgctcttcatcaggctggagtgcagtggcgtggttattgctcactgcagtctcaaactcctgctgttattggttcaagtgatcttcctgcctcagtctcctgagtagctggatccacaggcggatgacgctacactcagctaatttttttttttttcctaatttttcatagatacttcgctttgttgcccaggctggtctcgaactcctgagctcaagcgatcatcctgcttcctccaactcccagagttctgggattacacgcgcgagccacgatgccaaccaggagaccagaaattaagctcagctttctttctctcccttcttccctccctccctccctcctttccttccttccttcttttttaaaactttgtggtatctgtttgtgaattgcttattttacttaccatattgtcttcaaagttcatccatgttatagccggtgatgggatttccttcctttttgagattgaatagtattccattgtatgcctatgccacatatggtttaatcattcatccattgatggacacttgggttgcttctgactgttggctgttgtgagtagtactgctatgaacacgggtctgcaaatatctctgaaactctgccttctttttctgtttgtttgtttgtttgtttaaggcagtcttactctgttgcccaggcttgaatgcagtggtgccattacagctcactttattttttatttttttgagacagtctcactcttgttggccaggctgcagtgcagtggcgtgatttcaactcacactgcaaactccacttcccgggttcaagctattctcctgcctcagcctcctgagtaactgggattacaggcatctgccaccacacccagctaattttgtgtttttagtagagacagggtttctccgtggtggtcaggctggtcttgaactcccgaactcaggtgatccacctgcctcggcctcccaaagtgctgtgattacaggtgtgagccaccacgcccagcctgcccagctaatttttgtatttttagtagagacagggttttgccatgttggccaggctggtctcgaattcctgacctcagatgatctgcctgccttggactcccaatgtgctgggattattggcgtgagccaccgcgcctggtggagtggtggagtcttttttttttttttgaggtggagtctctgtggcccaggctggagtgcagtggcgccatctcgggtcactgcatcctccgcctcccaggttcaagcgattctcctccctcagcctcctgagtagctgcggctacaggtgtgcgccaccacactcggctaattttttgtattttagtagaaacggagtttcatcatgtttccctggctggtctcctgagctcaggcagtctaccagcctcccaacgtgctaggattacaggcgtgagccaccccaccctgcccaacgactcacttagcttcaacctgtcagactcaggcttctcctaccttagccttcttagtatctgggacaacaggtgtgtgctaccatacctggctaaatttttctttttttgattttttgtagagacaggataatttttttttttttttgtatagacagggtcaggctatgtttatgttggccaggctgggaaataaggtcttaatagaggaagttgaagattcctgggggaatagcatgtagagcagctatagagggagagggtgctgattactagctaaaagacttagaaatttttgcaaacatggactcatgatagtttttgggtgatgagtcttcttgtaggatagcttgaaagaggaggaggaaactagaggccctggtaatataaggtaacattaagtatcctgatgtcagtaatggagaagagtgaaagactatgattgattgggtgactgtgtgggcagaggatgtgaggagaaaaggacatcttgtgtgtgtgtgcgcacacatttttagttgtgtatcttctacttgttttctcccccaccttgtacctgtactttctcaagcccaaaaatgaaaatttacctgctaccaaccacatcatcttgtgcatctgtgtagctcagtttttatttctttagatctgtggtcctccgtggaaagagagccactaccccaagacacatctaatataatacacagggcgcttacgtggttagaaaagaagagataagccgggtgcggtggctcactcctgtaatcccagcactttggaaggccgaggcgggcagatcacgacgtcaagagattgagactatcctggccaacacggtgaaaccctgtctctattaaaaataacaaaaattagctggatgtggtggtgcacacctgtcatcccacctacttgggaggctgaggtaggagaatcacttgaacccaggaggcggaggttgcagtgagccaagatagtgccaatgcatcccagcctggcgatagagcaagactcatctcaggaaaaaaaaaaaaaaggagcttgttttggccaggtgcagtggctcacgcctgtaatcccagcactttgggaggctgaggcaggtggatcacctgaggtcaggagttcgagaccagcctggccaacatggcgaaaccctgtctatactaaaagtacaaaaattagccgggcatggtggtgggtgcctgtaatcacagctactcaagaggctgaggtgggagaattacttgaacctgggaggcggcggttgcagtgagctgagatggtgccactgcactccagcctgggcgacagagggagaatccatcacaaaataaataaataaaatatataaattttaaaaagtagcttgttcttagtttaatattctttttgagttctaaaacgctaatttgaaaacatgtctattgatgatatttgagcaaccgtatccatattaagccttaatatgagaggaattatcttctgtgttaatttttttttttgagacgaactcttgctctgtcacgcaggctagagtgtagtggcgtgctcactgcaacctccacctcctgggttcaagcagttctcctgactcagcctcccaagtagctgagactacaggcgcccgctatcgctcccagctaatttttgtatttttagtagagaagagtttcgccatgttggccaggctggttgtgaactcctgacctagtgagccacctgcctcggcctcccaaagtgctgggattacaggcgtgagccacggcgcccggccatctctgttatttcattgtaatgttttaacgggtaccccctgtaaattagtgtatgaaagggcttttgtctgttgtaaagcactttacaaatgcaaaagtttgttggaaattgtatttgaatgccccacatctgtgtaaccaatcctctctatatgaggatgttgtgtatgtttcagttttattttgaaattttccagaaatggaatcttttaactgattttagggaaaccctttaatctctctaggctgcctttctttatctatgaaatgaaatagtaagttctttttagctctgcgatttaaaagctttaattttaaatgagagagtggttagtgatcttcatgaagtttgataggtggcaatacatttaactgattttgctctttatgtgtagatcatggaagggaagtggttgctgtgtatgttactggtgcttggaactgctattgttgaggctcatgatggacatgatgatgatgtgattgatattgaggatgaccttgacgatgtcattgaagaggtagaagactcaaaaccagataccactgctcctccttcatctcccaaggtttgaaatggtctttgaatctattccttttacgtcttgagatgataaaattatgaagatacccgggtgcagggaaatgtagtctcaactactcaggaggcctaggacaggagtgtgagtccagccttggcaacacagggagatatcatctctaataaaatataaaagaaaaacatggtgaagataaatttggaacgttttcaaagggaaagcaaaattcgtgaaaatacttattgatctctctggcagcctttgtcttgctagaggccaattatatgggttgaatttgaaggccagctatgaaatttttgtgacagttgaaagcaaaccaggagaatagattctagataaaaaggcatgttgctgaaaatttaaatttttaattcatttatgtatttaacacaggttacttacaaagctccagttccaacaggggaagtatattttgctgattcttttgacagaggaactctgtcagggtaagtgttttccagagaaatatatgttagaggcagacatgtaaataagatgggatagtagattcctttttggatagcatcttttatagtgaaatgtctaactttattttattttatttatttattttttgagacagaatttcgctcttttgcctgggctggagtgcaatggcgtgataccggctcattgccacctccgtctcctgggttcaagtgattctcctgcctcagcttcccaagtagctgggattataggcatgcgccaccatgctggctaatttgtgtgtgtgtgttgttatttttttagtagagatggggttttgacatgttggccaggctggtcttgaactcctgacctcaggtggtccacttgccttagcctcccaaattgttggcattacaggcatgagccaccgcacctggcctgaaatttctagctttaatatcttcagtgttaacatccatgcaggaaaatagtcttttggaatttgtggtttttacttccacttctttccctcccccactctaccctatattttgttctttgattgaggaaaaaaattttctcttgatgttaaaacatcagtggaattatctcataggtttggtactttttcatataggtttgtgagttgaagataatgtattatcattagttgtgtgacagatttaaaggttggaagtagagtggttaaataggctaagagcagaataggtcctactttaatgagtatttacataattttccctcacaagtcaactgtcattttaagactgattttgggatttgttatttacaggtggattttatccaaagccaagaaagacgataccgatgatgaaattgccaaatatgatggtgagaatcccatttggtttagatataatagcagatagaggtttgacatgttgtctccatggcatttcctaagactagtttaaaaggacatagtaggctttaagatttttccagccaggtgcggtggctcacgcctgtaatcccagcactttcggaagccaaggcgggcagatcacgaggtcaggagatcgagaccatcctggctaacacagtgaaaccccgtctctactgaaaatacaaaaaattagctgggcgtggcagcgtgcatctgtagtcccagctgctggggaggctgaggcaggagaatggtgtgaacccgggaggccaagcttgcagtgagccgagaacgcgccactgcactccagcctgggtgacagagcgagactccgtctcaaaaaaaaaaaaaaaaaaaagatttttccatggaagttttgccacctttgtgtgttgcctaattttttttttttttttttttttatttaaggttcaggggtgcatgtgtagccttatatttaataggattagatctgtttaatcacctgtgctactgaatgttggaaatttctagacagtagtataatacactacagttttaaaaagccatatctgaataatatttgccaaataaagtgtgtttatttattatttatttacttttttgagacggagtctcattcttgccacccaggcttctggaatagagtggcgtgatcttggctcaccgcaacctctgtttcttgggttcaagcgattctcctgcctcagcctaccgagtagttgggattacaggtgcccatcaccacgcccggctaatttttgtgtttttattagagatggggtttcaccatgttggccaggctggtctcgaactcctgaccttgagtgatccgcctgccctcagcctccctaagtgctgggattataggtgtgagcgaccacggctgccccagtataatatatttatgcaactaggaggtgttttttttggcatttaaaggaccttcagaggtagagttaagcagtggaacttttttgtgttgtcttgtaggaaagtgggaggtagaggaaatgaaggagtcaaagcttccaggtgataaaggacttgtgttgatgtctcgggccaagcatcatgccatctctgctaaactgaacaagcccttcctgtttgacaccaagcctctcattgttcagtaagtgaaatgcttgttggataaaagctttctgcaaagggtaatcttagaagacattatgtaacttttactctatgttaaaaaattatgagattatataagtggtggtagggatttttgggtgaatttaaacaccttgtaattaatagtttttcctggctaatgcattattttgaaagaaactggttacttattttcctgactctaaataacttgtagattttgcagaacaaatttaccggaaatctgcattaatagtttttgtaattaattaattacaaaactagtaattaatagtttttcctgcctaatgcattattttgaaagaaactggttactcattttcctgactctaaataacttgtagattttgcagaacaaatttactggaaatctgcattaatgttcaatttaattttatttatttttgtggcatttgataactattcaaaaacaatagaagatggaatcctttgtaagggtaaacatttgacctatgataaaacgtgactaagatgagggagagaggaaatacattaagagagtttcgatctttcaaaatgccatacagttttctgcttttctctctgatattaggtatgaggttaatttccaaaatggaatagaatgtggtggtgcctatgtgaaactgctttctaaaacaccagaactcaacctggtatgtaattcccatttctggaatgtggctggacacccactattaccttgtaagaattttgtaattgggccgggtgcagtggctcacgcctgtaatcctagctcccagcactttgggaagccaaggcaggcggatcacgaggtcaggagattgagactatctggctaacatggtgaaaccccatctctactaaaaatacaaaaaattagccaggcgtggtggcaggcgcctgtagtcccagccacttgggaggctgaggcaggagaatggcatgaacctgggaggcggaacttgcagtgagccgagattgcgccactgcactccagcctgggcgacagagcgagactccatctcaaaaaaaaaaaaaagagaattttgtaataattgtgaaaataaaggcttcctcccctgctgtttaactcttttgatgagttgggaaaattgactttgacgctaacgtgctttttatttgaagtgtaaattacaaagttgttaccaactgtttttatctgaatttctggttttgcttctgtgtaagttttagttttggcaagcttatttctttgttttatgaggaagcaataactgtctagatgtgtgcattacttttttttagacacttaaacgttattttaaatttactgatgattgctggttattcctttttactaaacaaacttgtagttagcttttcctttaactgtcactaatatatttggaattttataagaggaattatcatacacttttgaaacgttgcttttgaacactttgagtacagtgacttcaaataatccttttttgtttttgaaggatcagttccatgacaagaccccttatacgattatgtttggtccagataaatgtggagaggactataaactgcacttcatcttccgacacaaaaaccccaaaacgggtatctatgaagaaaaacatgctaagaggccagatgcagatctgaagacctattttactgataagaaaacacatctttacacactaagtaagaaaaagcattagtttgggggcttatggtattacatatatatcatccatttaatttaaagattgtatatctggccgggcactgtggctcacgcctgtaatcccagcactttgggaggccgagatgggcagatcacctgagatcaggaattcgagaacagtctggccaaaatgttgaaacttcacctctactaaaaatacaaatattagctaggcatggtggtgcacgcctgtaaccgaagctagttgggaggctgaggcaggagaattgcttgaacctgggagggagccaagatcattgtgccacagcattccagcctgggcgaaagtgagactcaatctcaaaaaaaaaaaaaaaggctgggcgcggtggctcacacctgtaatcccagcactttgggaggccgaggcgggtggatcacaaggtcaggagatcgagaccatcctggctaacatggtgaaaccccgtctctactaaaaatacaaaaatattagccgggcgtggtggtgggcacctgtagtcgcagctacttgggaggctgaggcaggagaatggcacgaacccgggaggcagagcttgcagtgagccgagatcgcgccactgcactccagcctaggagacagagcaagactccatctcaaaaaaaaaaaaaaaagattgtatatctggagagtaccccagcctccaaacaagaagaatctcagcctggtatggttgctcatgcgtgtaatcccagcactttgggaggctgaggcgggcggatcacttgagatcaggcattcgagactagcatggccaacatggtaaaaccccgtctctactaaaaatacaaaaattagctgggcgtggtgttgagtagctggtgtaatcctagctactcgggaggctgaggcagcagaattacgttaacccaggaggcagaggttgcagttgagtcaagattgtatcactgcactccagcctgggtggcagaggaagattctgtaccccctccacgaaagaaaagaatctcttcactttagtatcttagttgggaaatgaccttaatttgtcagcattaaaagaagcttcttggccacgtatggtggcccacacctgtaatcctaacacttcgggaggctgaatcggatggattgcttgagtccaggagttccaaaccagcctgacaacatagtcagaccctgtctctacaaaatcttaagaattaactgagtatagtggcatgtgcctgtagtttcagctactcaggaggctgaggtatgaggattgcttgagcccaggaagtcgagactgtagtgagccatgatcttgccactgcactgtagcctgggtgacaaagtgagatgctgtctcaaaaaacaaaacaaaaaacccaaaaaacttcttttccacaggaactgaggttcgagataattttaagaatagaataggtgtttttggccaggcatggtggctcgtgcctataatcccagcactttgggtggccgaggtgggcggatcacctgaggtcaggagtttaagaccagcctggccaacatggtgaagccccatctctactaaaaatacaaaaattagccgggcatggtggagggtgcctgtaatcccagctactcaggaggctgaggcaggagaattgcttgaaccctggaagcggaggttgcagtgagccagattgtgacactgcactccagcctgggcgacaggaagactctgtctcaaaaaaaaaaaaaaaaaaattggtattttttgctggacatggtggctcatgcctgtaatcccagcacgatgggaggctgaggcgagcagatcacttgaggtcaggtgttcaagaccagcctggccaacatggtgaaacgtcatctctactgaaaatacaaaaattagccgggtggggtggtgggcgcctataatctcagatactcaggaggctgaggcaggagaatcacttgaacccgggaggcggaggtcacggtgagccaaggtcatgccattgcactccagcctgggcaacacagtgagactccgtcccccactccaaaaaaaaaggtgttttttttttttttttctacaaagagctttgctgatctaatttcttccttttttttgttgttgttgttgagaaatgttgaataatagaataagttatatttataattatacataaatccaataaaaatagtttttcagaagtatcttgtagttgaacttatttggatgctccaatacctggacaattgacaattgagttgaatcattttgatacagggttttttttggtttgtttgtttattgaagcttttcctgctagtttgagatcataaataggcatgcctctttctgaagaatataataaccttttttttttttgagatggagtttcactcttgttccccaggctggagtgcaattgtgtgatcttggctcaccacaacctctgcctcttgcattcaagcgattctcctgccttggcctcccaagtagctgggattacaggcatgtgccaccacgcctggctaatttttttttttttttttttagtagagatgggttttctccatgttggtcaggctggtctcaaactcccgacgtcaggtgatctgcccgcctcagcctcccaaactgctgggttataggcgtgagccaccgcgcctggactacctttttaatttttttgaggcggagtattgctctgtcacccaggtgggcgtgcagtggcgtgatcttggcctactgtgacgtctgcctcccgggttcaagcgattctcttgccacagcctcctgagtagctgggattacaggcttgtgccaccatgcccagctaatttttcttttttttattattattatttttttttttttccagctaatttttctgtttttagtagagaccgggtttcaccatgttggccaggctggtctcgaactcctgacctcaagtgatctgcccgcctcagctcctgaaagtgctgggattacaggtgtgagtcactgtacccagcctagaatataacaacctttttttcttttttttgtgacggagtcttgctttgtcatccaggctggagtgcagtggcgccatcttggctcactgcagcctccgcttcccaggttccagtgattctcccgtctcagcctccccagtagctgggattacaggcacacaccaccatgtccaactaatttttgtatttttagtagagccttgttggccaggctgatctcaaactcttggccatctgttgatccgcccacctcggcctcccaaagtgctaggattacaggcgtgagccactgagcccagcttaacctttttttgttatttccaaaagtaatacatatttaaggtatagaaattcagaagccataagtaagcaaaaagaaaacacttaaagcgagggagaggggttgaagacaagttggttaattggtacagaaataaggtagaaggaataaattctaatatttgatagtacagtagggaaattatagttagaacaatttatggtgtatttcagaagagctggaagagaattgtactgttcccaatacaaagaaaaagtaaatggagccaggtgcagtggctcaggcctataatccctgcgcttttgggaggctgaggtgggaggatcacttgaggccaggagttctagaccagcccgggcagcatagtgagaccttgttcctacaaaaaaataattattcaggcttggtagcatgtacctctagtcccaggtgctcgggaggctgtggtataaaaggatcccttgagtccaggattcgagattgcagtgagctatgattgggccactgcactccagcgtgggtcacagaatgagactctgtctctataaaatagaaagaaaaggtaaatgtttaaggttacagatatttcaattactgtgatttgtttgttttgttttgttttgttttgttctttttgtttttttgagatgggagtctctctctgttgcccaggctggagtgcagtggcctgatctcagctcactgcaacttctgcctcccgggttcaagcgattctcctgcctcagcctcctgaatagttgggactataggcatgcgccaccatgcccggccaatttttttgtatgtttagtagagttggggtttcaccatgttggtcaggctggtctcgaactcccaacctcaaatgatgggcctgcctcagcctcccagagtgctgggattataggcatgagccactgggcccgtccaatgactgtgatttggtcattacacattatatacatgtatcaaaatatcacacgtaccccgaaaatatgtacaagtacgatatgtcaataaaaacatacacaaagaagtcacttaaaattatcttaaacatcagcattgtgatatatatttgtcaatatgtgtatatacacatatacaactttacatgctatatctaacttttttatttttttatttatttttatttttttttttgagacggagtctcgctctgtctcccagactggagtgcagtggtgcgatctccgctcagtgcaaactccgcctcccgggttcacgccattctcctgcctcagcctcccgagtagctgggactacaggtgcccaccaccacgctgggctaattttttgtatttttggtagagacggggtttcaccgtgttagccaggatggtctcgatctcctgacctcgtgattcgcccgtctcggcctcccaaagtgctgggattacaggcgtgagccactgcgcccggcccttttttatttgagacagaaacactgcaatctccacctcccaggttcaagcgattcttgtgccttagcctcccaagtagttgggtttacaggtgtgcaccaacatgcccacctagtttttgtatttttagtagagacagggtttcaccatgttggccaggctggtctcgaactcctggcctcaagtgatccacctgcgttagcctcccaaagtgctgggattacaggcatgagccaccacacccgtttcttaacaacaaaagagtgtgaagttcttcctcacagaaatattcattttcattatcactgacacagcagcataggattccttgtttggatgtgctgtaactcagtctcctgtgtattagatatctaggtgtggaatctgggctttaatatacatcacacttaagatgcttttatggggcccatgtggctgggcacggtggctcacacctgtagtcttaacaccttgggaggctgaggttgggcagattgcctgagctcaggagtttgagaccagcctgggcaacattgcaaaaccccatctctacttaaaatacaaaaaattagctgggcatggtggcacggggccgtctgtagttccagctactgcggaggctgaggcaggagaatcgcttgaacctgggaggcgggcgttgcagttagccgagatcacaccactgcactccagcctgggagacaaagcgagactctgtctcaaaaaaataaaataaaattttaaaaaatgcttttatggatttaaaattgttttttcattctccatgggagttaaaaagtagaaagtagaatcatgagtggacatgcgttttaataaattggaggtttgtgtaatttcagtaacgtaataataccagctctattaaaaatgaagaaatggaccttttgtactgggaagtagttgtaagtccacgtatttgtcttctcactggtgtatatgtgtaagcccaataattgtgttagtttatgtagtttcttgttttttttgttttttttttttagtgtctataagtcaagtctttggtgttaaagattttaactatcatttgctgtaattcttagaaagccgagggactaatcatttatgtttcgtgcataaggaaatgggcgttagcttccccaagaccccaggagccaggcattgttcttaccccaaagcctcaggtcagacttctgctgcttcacgttagaagtcatgatcttttgtattatggtaaagggagcttggaaaattaagtacttttaattccatttaatgtttctttcagtcttgaatccagataatagttttgaaatactggttgaccaatctgtggtgaatagtggaaatctgctcaatgacatgactcctcctgtaaatccttcacgtgaaattgaggacccagaagaccggaagcccgaggattgggatgaaagaccaaaaatcccagatccagaagctgtcaagccagatgactggtgagtcttggggaactgtcttcaagtgtaagggagcatttcatatattccatgtggcttgaacaacgaaatgttggttgagtaagctctgataatttcagtaatccatgatgcagtctaatctgtagggaaaatatagagtactatagctggaaaggggccatagtgtaatcatctggattgactcaccattttacaagccacagaatgccacacttgataagagtttgtctgtggtgacactgttggtttgtggcagaatctcaggtcctttaacctggctactccagggcttctgtgaactcacatttaaagccaaagttctgaaatgctaaattttaatttgaaaaataacctttttcctatttaaacaacagtcaattctctgctgtgggttgggtggtagaatacaaagccacaaggacaccaccatctgcctacacagagcttgaagtccagttgtgaggcatgatgttggcatgtggtatcgtaagggttcatgagaaggtgccacaggagaccagagcaccaggtgtacctaaactaggcatggtttcttggagcaaggcaaatcagattgagacttggcagtgaggtgagaattaaggagttggtgaatatgggaaggggtgtttctgattgaagaatgtcgtatgcagaagtagaggagcagcaatgagcttgacatgcgagggagaaattacatggccttttatgtagggtgcacattgaagagtgaggagaaatgaagatagctggggctgtattcttgtatatggctgtctttgaacttgcaacttcacacagtgactccagaaatgtcagaaagtgaacaaagaaattcttaccctttgtaaaatatcctcctatgcttagcaattacattctagattatctttttcctccttgaaaggtaagatacatataactgaacttttgtactgcactagtataaatgccaagtttacttgtatatttggtgtatattagatttggacttagccttgttcagtattatattccttaactagctttatcacctaagaaggcccctgtacccattaagcggccactccctgtttcctcccccaactcccagcaaccactaacctgctttctgcctctctacatttgtccactttgtatatttcatataaaatggaatcatacagtatgtggctttctctgtccagtttctttcatttagcacagtgttttccaggtttatctgtgttgaagcatgtatcagtactgcattcctttttatgattgaataaattctactgttttgataatgccacattttatttatccatcctttggtggacatttaggttgtttgctcctttttgtctgtgattatgaataatgctgctatgaatgttcatgtactggtttttacataaatatgttttttcttttcttgcttttttttttttgagatggagtgtagctctgtcgcccaggctggagtgcagtggcgccatcacggctcactgcaacctctgtctcccgagttcaagtgattctcccgccctagcctcccaagtagctgggatcacaagcgcatgccaccacacccagctaatttttgtatttttagtagacacggggttttaccatgttggtcaggctgatctcgatctcctgacctcaggtgatctacccgcctcagcctcccaaagtgctgggattgcaggcgtgagccaccacacctggcctcttttctttagacatgatctctgtgttgcccaggtgggagtacagtggtacggtcacggctcactgcagcttccactttctggggtcaagcgatcctctcccgccttagcttctcaagtagctgggactgcaggtatgcacgcctggctaatttttatgggttttttgtttgtttgttgagacagagtctcgttttgtcacccaggctggagtgcagtggcacgatctcgtctcattgcaacctctgcctcccgggttcaaacgattctcgtgcctcagcatcccaagtagctgggactacaagcgtgcaccactgcactcgtgcctcaccctccaagtagctgggactacaagcgcgcactactacaaaaaattcttgtatttttagtagagatgggatttcaccatgttggccaggatggtctcaaaattctgatgtcaagtgatctaccagcctcagcctcccaaagtgctgggattacaggcgtgtgccaccgtgcctggctgtgcatgttttttctttttttttgagacggagcttcgctcttgtcgcccaggctggagtgtagtggcgtgatcttggctcaccacaacctctgcctcccggtttcaagtgattctcctgcctcagcctcctgagtagctgggattacaggcatgtgccaccacgcccagctaattttgtatttttagtagagatggggtttctccatgttggtcaggctggtctcaaactcccgacctcaggtgatctgcccaccttggcctcccaaagtgctaggattacaggcatgagccactacacctggcttaatttttgtattttttggtagagacagggtgtcgtcatattggtcaggccggtcttgaactcctgtcctcaggtgatccacccgccttggcctcccaaagtgctgggattacaggtgtgagccaccgcacctggccttgtgtatttttttttttttactagagactgggtttcaccttgttgcccaggctggtgtggcctcaagtgatcctcctgccttggcctcccaaagtgctgagattacaggcatgagccactctgtctagctatagatatatattttcatttctcttgggtatatatacctaaaagtggaattgctgggtcatgtggtaactaactttttgagaaactgccaaactgttttccaaatgagcagtaccattttactttcccaccagcagtgtatgagggtttcagtttctctgcgttctttccagcatttgtttttatgagtcttttttattagagccaacttggtactaagtggtatcgttttgatttgccatttccctgatggctaatgatgttaagcatcttttcgtgtgcttattgtatgttcatattgtatatttttacattcgtatgtcttctttggagaaatgtctattaaaatcatttgcccatttttaaattgggttgtctttatattattgagttgtaaagagttattttactaggcccttagcagatatatgatttacaagtattttctaagaggaattattttaaattttgagattaaaaacaaatttttttagaatactctgttctgatccacaaagtggtactatactgtgaccagtgttgtcataactggctttttcttttgtatttaagggatgaagatgcccctgctaagattccagatgaagaggccacaaaacccgaaggctggttagatgatgagcctgagtacgtacctgatccagacgcagagaaacctgaggattggtaagaacttcagttaactttttttaattacctggtttttttgtttgtttttttttttgagatggagtctcactctgtctcccaggctggagttcagtggcgcagtttcggctcactgcaactttcacctcctgggttcaagtgattctcctccatcagccttgcgagtagctgggattacaggtgtgtgccaccacacccggcaaatttttgtattttttgtatttttagtagagacggactttcaccgtgttggccaggctggtctcaaagtcctgacctcaagtgatctgtctgccttggcctcccaaagtgctgggattacaggcgtgagccaccacacccagcataagttacctgtttttattgaagtcaatcttaatacttaaatatagccaagttccctaatttcagggtagaatttgacaattttaattatattttcttcttttttaaaaaataaatttttcctgaaaaactgttattactggaaatacaggagaagctggtctgggatactgtgaaaacatttcagcaggatcttggcagccctgggccagccagctgttcatagtcctgcatcacagaacctgtttataatttgttgtttgtacctccgtagggatgaagacatggatggagaatgggaggctcctcagattgccaaccctagatgtgagtcagctcctggatgtggtgtctggcagcgacctgtgattgacaaccccaattataaaggcaaatggaagcctcctatgattgacaatcccagttaccaggtttgtgcctcttgatggttgagttgctttcattaatctgtttgtattcagatagaagttttatctagagtaaggctgccaggttggtcattatattcaagctgttgaattaaaagcagaaagtagacttcctaagttgaaagagagcttaatgggttaggtattgcaaagataaacctagaaactggagtgaataactttctttaactttatttatttatttatttatttatttatttttgagatggagtttcgctcttctacccaggctggagggcagtggtgtgatgtcgcctcactgcaacctctgccttccggtttcaagcgattctcttgcctcagactcccgagtagctgggattacaggtgcctgccaccacgcctggctaatttttatatttttagcagagatggtgtttcaccatgttggccaggctggtctcgaactcctgacctcgcgatccgcccacctcaacctcctaaagtgctgggattacaggcgtgagccactgcatctggtcaactttctttttttgagactgagtctcactctagtggccaggctggagtgcaatggctcagtctcggcacactgccacctccacctcctgggttcaagcaattctcctgactcagcctcccgagtagctgggagcacaggtgtgctcacaggtgtgctcacctcacctggctgattttttgtatttttagtagagacggggcttcgccatgttggccaggctggtctcgaactcctgacctcaggtgatccacctgccttcgcctttcgaagtcctggggtttcaggcgggagccactgtgcccagccaagaataactttcatagttgctttgtaactatatttaaaaacaaaagagaaatggaaaactgttgatttgggtaccctgctcttgggtgctagggttgcttcagccataggatccacagctgagtctggacaatctgtgatgtggtgggtagaggactgtggtttgagtcagcatcttgactacatcaagtcagctcactgcttggcctcaatgcttgcaactataaaaagactgaggcccaaaagagatggtaaggatacaagtagtaaggttgtgaggctttaggcctcatgcaaaaatgtacaccctcagacctttgttccttttatctttctagccaagtaaaattatttataatctctacaaagagtggcaattaaaattatttataatcattaatttctactttatttatatacaaatactaatatatgtatatacatatacagaaacaggagaagctggtctgatactgtgaaaacatttcagcaggatcttggcatagtatatgtatatatacatatactaatatatgtttttctgtttgtaaattttttatttttttcctcatagtcgttaaagatgttatgtgaatgtatttttaattgtgtagtcaaacaataagataaaagttttactttaaaaaagttgccctttaggctgggcgtagtggctcacgcctataatcccagcacttgagaggctgaggtgggtggatcacctgaggtcagccattcgagaccagcctggccaacatagtgaaacaccatctctactaaaagcacaaaaattggcctggtatggtggcacacacctgtagtcccagctgcttaggcacgaggctgaggcacaaggatcacttgaacacaggaggcagaagttacagtgaaaaagaagttgccctttagttgttctcctgttggtggccatttaggtggattgtcacttttgctttcagagtcactgctgctgtaataatccttgtacatgtctgggtgtatgttgtgagtatttctctaggtagttatctagaagtgaattgctggttgatgatcatgtgcgttttattttaaatcaccactgaagaagtacgtactgacttatgctcccactctcattagcagttgctaagagtggaggctgttgaatgggccaggaacttgaggggttggtttggaccaaggtcatgggtgacagtagaaattggaagtagttggaatcctgcagtcttagaggcagagtgcgtaaaataatctgtagcatttgttatttattttcctgttgcttatttcaagtttcatgaagttggcatttctctccattgttcatgcaaaatttctcttacggtagattcaccataaacttttgttgatcattatctgaaatgattttctgaaacatttttttttctagggaatctggaaacccaggaaaataccaaatccagatttctttgaagatctggaacctttcagaatgactccttttagtgctattggtttggagctgtggtccatgacctctgacattttttttgacaactttatcatttgtgctgatcgaagaatagttgatgattgggccaatgatggatggggcctgaagaaagctgctgatggggctgctgaggttcgtgtttgctgcttgtgcatttgtgtctgttattgtaaggagctgttattttgtgaaagtctgtgttaaggttttttttcttcatttggcaatattggcataaaaagtataaccatatgcctgcaaaagacacaatattgggttttggggcatgatttcattagtctaatgtagtggctttagagtctgtttgtgttcagggttttttttttattatttgtctgggtatatatttcgaaatttgtcatttaggctatattttaatacactcttatatgttgaatctcggtttacactacatacagaattttcaaacaactggtcatgtggccgatttaagaattggagagccagggatactgagataagaaattcactggatcctgaggttaagggagccttttgcaggtgatgtagaagccagcttttgcacctatgagagtgaaatcatcttgattataaggagagcaagaggatggaggctttctctaatttcttttttacattttatgagcattttctctgaaaaagaaggtcctgcgtagtgccatgccataactgaactgcagaaaaacagcacggcctatgtttggtgtcaaaagctggaactttcaatcagccctgtcttgtttttcagccaggcgttgtggggcagatgatcgaggcagctgaagagcgcccgtggctgtgggtagtctatattctaactgtagcccttcctgtgttcctggttatcctcttctgctgttctggaaaggtaggaagtttttttttttagaatcaattttagagacatcactctagtgattattaaaaataactaagatatgttgcctgaggttttctttgtagtggctcagtaatgaccaagccatgtttggtgttgacttcagaaaccttacttactgttcctcagtggccgtttattgtgcccagatgggagcaggatttatagccccttggttgctattattatttatcctaatctgttactctccatagtgttcggcagcaactttctaaaaaaaaacaataaacttagataccaaactagccacttgggcaataatcagctttgcctgctggcatagctatttctattctttgtaattcagtctttgattcctcattatccattctgccttcaccttccccactctcaaaacagtatgttggggtaccacagccttattgttagtttttcttgtttagcctttttttttttgcatgctatcataaaaaaagaaagtcttattttggactctacttctgctaaatgaggattatgcttcatctggcattcatagcactttgtaactggatcccaagttccttttccagcctcagcctctgccactattctgtgtatcggtgcctcagtcaccttgacttttttgacctttattttcctgcctggcccttttgtttttattgttctaccttgaaacacacaagcacatgtgcatacacacacgtacatacacgctcttcagggtaggaattacatcctattcgtttctgtatatctatccctgtatacagcctggaacagaactttgcctgtaggcattcaggaattatataacataatacatgaacatgtaaacaaaattgtactttggggaacatttcagaaacagaccagtggtatggagtataagaaaactgatgcacctcaaccggatgtgaaggaagaggaagaagagaaggaagaggaaaaggacaagggagatgaggaggaggaaggagaagagaaacttggtaagaaacagagtccagaaaatctgctttaagccaagaccctacgatgttgttaaacctttacagtcaagttaaggattgtttttagccaggcgtggtggctcaagcctgtaatcctagcactttgggaggttgaagcaggaaaatcacttgagcccaggagtttaaggctgtagtcagccaggatagtgccactgcactccagctgagcaacagagtgagaccctgtctctctctctctctcttttttattttttaagacaaggtcccactctgtcactcaggttggagtacagtggcacagtcacagttcactgcagccttgaccttataggttcaagtgatcctcctacctcagcacccctccaagtagctgggaccacaggcatgcgctaccatgctcagctgtttgtttgtttgtttgtttattgatttatttatttgatatggtctggccctgttgcccaggctggagtgcagtggtgtgatctcggttcactgcagcctttgcctcccagattcaagcgattctcccacctgggcctcccaaagtgttgggattacaggcgtgagccaccagacccagcgagatcctgtctcttaaaaaaaaattgttggccaggtgcggtggctcacgcctgtaattccagcactttggggggccgaagcaggcagatcacgaggtcaggaggtcgagaccatcctggctaacatggtgaaaccccatctctactaaaaatacaaaaattagccgggcatggtggcaggtgcctgtagtcccagctactcaggaggctgaggcaggagaatggcgtgaacctgggaaggcagagcttacagtgagccgagattgggccactgcactccagcctgggtgacagagcaagactctgtctcaaaaaaaaaaaaaaaaaaaaaattgttggccaggcatggtggctcacgcctgtaatcccagcactttgggaggccgaggtgggtggatcacgaggtcaagagatcaagaccatcctggccaacacagtgaagccccgtctctacttaaaataaaaaagttagccaggcatggtggcgggcgcctgtagtcccacctattcgggaggctgaagcaggagaatcacttgaacccggaaggcagaggttgcagtgagccgagattgcgccactgcactccagcctggcgacagagcgagactgagtctcaaaaaaaaaaaaaaattgttggccgagcaaggtggctcacgcctataatcccagcactttgggaggccaaggtgggtggatcacctgaggtcaggagttcgagatcagcctcgccaacatggtgaaaccccgtttcactaaaaatacaaaaattagccaggcgtggtggtgggcacctgtaatcccggctactccggaggctgaggtaggagatccacttgaacctggaggcagaggttgcagtgagccgagatcatgccattgcactccaacctgggtgacaagcaaagtcgatctcaaaaaaaatagtggccgggcgcgatggctcacgcctgtaatcccagcactttgggaggccaccgaggagatcatgaggtcaggagatcgagaccatcctggctaacacggtgaaaccccgtctctactaaaaataaaaaaagttagccgggcatggtggcaggcgcctgtagtcccagctattcagaacactgaggcaggagaatggcgtgaacccgggaggcggagtttgcagtgagccgagatcgcgccactgcactccagcctgggcgacagagcaagactctgtctccaaaaaaaaaaaaaaaaattgtagatctagagatgtgttctaatgctaatatataatcaccaaaaataataaggttttgctcagttgtttaacttctgtcttagaagagaaacagaaaagtgatgctgaagaagatggtggcactgtcagtcaagaggaggaagacagaaaacctaaagcagaggtaaaggaaaggggtcacacattttgttttaccaagctgaaggtacatttatgtaaagggaatattttaatagggtagtttacagtggcttatggcagtaaaaattctgttaaagccaattttgttgaagtgggattctttgtgatacaggtcagtgttttgtttgataattttaagctacatattaatctcagaagtatctttttagctgaaaatcattttctgaaataagcagaaggttatagggggaaaataaaatgcttgctaagaaggaaacttcgggtcattaacagtctatttgcctctcctcactgtgccctgaaaagtatttcttatacaaatcactgtgttctaaactttttgtccccgttgtccatagatgggttcattcattcatttaactgacatttgttgagtgcccattttgtgccaggcattgtcagtgagtaagacagacaaagatactctgcctttagggagcttaaattctacttgggggaaacaggcaatgagcagtaaacattttaaggaagtaaacaacacagcgtattaggaagtaagaaacgatgaataattaaaacaggaaaagatactaaaagtgctagaggtaggcgggtcaccatgttaaaaccttactcgaaagatgacatcgaaccaaacacttgaaagaggtagagaacttttccatggggatgtaagtgggaagagcattccaggcacagagaacagccagtattgaggcctaaagtggttgtctacaaggccagtatggtgagtggacagagagagtggagaaaagaagggtggagaaggctccaggttagacaggctgttgtgtggacttggctttccctcctagtgaagcgggcagccatcacaggctactggacacaggtgtcacaggatgatgactgtgtctgctgtgtttcctatataccagggagaatcagggcgaccagttaggaggtccctgtaatcatctaggaaagatacggtggccccacaaagggtgacaggagaggaacagagggtatgagaactagttggagatctggatcttggttttgtggtagattggatatatagagtatgagagaaagggaacagtcactgtctgtatgtaccattgcttactaaagtcctttacccagcacctctgtgtctaaatctggtctctcccggaaagctctcctcaggttttactttcagctacaactctgccttcctattaataaagatcattgctatctgtatcttttgtatattttccatggatatgttctgtcttaactagaatgcaattcttaaaagtagagaccatgtttcccccaaactccctcacacgttaaaaagttgctggtgcatttaaaaaaagggaatattttcatagggtaatttacaatcttagcaacttgtgatagagtacagagcagcagccttggagtcagtctacttggatagccttccatcttcatgaatccttggtttcttatcctcagaatggggctagtgtgccataggccagtagattgtttgggattaagcaagattaagaaatcacagtgtctgatccttttttaagaaaatgtttatgggttagattgagaaaagtgtatgtttatagaaaacaataaagactaaactgaattagagtaggcataattccaccacctctgagacaaccattcttcttggtgcattttcttctcatcattttcctcatttttttcctcaaataagttaccctcagtctggctgatcttgaaaatatggtgaacttttattattttttaaatgtgctaattataatgaatttcttttcaatcaataggaggatgaaattttgaacagatcaccaagaaacagaaagccacgaagagagtgaaacaatcttaagagcttgatctgtgatttcttctccctcctcccctgcaagagtggtcctaggagaggacctggcacaccttaggttgacattcagaaaacttcaagacatcaccatcagcaggctccagttgaacactagtctgtgtaactttaaacatctagcagtaaatacttgcagttgtgatataaaggaccctgtttctgtagaaaagaaaacatttaacataatggttgtgaaatgtaacatgaagcaaactaacttttttttttttaacatctttgtttttaaaatagaatgatagaactttgccagtctttaagatcttggcttaatttaatgtattaatctgtttgtgcaaacataataccaccatttaaaaatgttagggagatgagttgcagtttttataatagattttttttaaagtttggtattgtaaaacattcacacctctgtccctcaaaattgataattacgtttaaagtgcagtcatttgtggttagaatcttgttttgtttgcttccattattgagttcctcctaaggaaattgaggagagggactgaatagaagcccaaattcatataaaagttgcgtttaagttgtattaaaaatagatatataagaaaaaattctttcacttgatgtttgttagaccagaaagtgtgtgtgttctgtagctcagttcccagacagctttttaggtagtggaggaggtggcttcatgtggcacttgggcatttatattccacttgggagggtcaggctgtggccttctggagcaggtggcttgttaaggaatgctagcagggcatggcacgtgagctccggaatagatgtcttcatcacttcttccactgtgtgttgacactgttttccttacctatttcctcagatccccagctttctcctctgctatgcattttcttcacagtgcagcttgcagtccgttgctgaaaatgattataagccctgcataatgttaagctttattgtgattacgtgtatgtttcttctttcttttaagcagacccatacctttccagggtcaaagtacagaatagaatacattgatacaaagtacagaaaaatactttgatttttatccatttcttttactctgtgtaaagacttgagaagtctaattcacaggcaaaccaatacagaattgactgcagttgaacagactagaagtatttgtgggaggagtgacatgaagcatgagttatctgattttttttgtagctgctatatattttaagccttcatttgcaattcatgtaacagttgtgtcataaattacacaataaagcagtcctgttcaaatttttttttaacgtggcttgtagaatttttaaaaaagtgatcttaggtttgttttttcatgcgggatgcagatgggtgctatcagagcctctcccacaccactatagtgtaataatgttattattactctacactgaaacgtattcagagttagatattattttagcttcagttgttctttagaggctttcaaatgtaccgatgatactgtttcttgcactgaatatataaacactccacagtgtttatattgggaagatattgggaaggaaatatatttgtaaaagatgaaggctgtatctatttttttttctttttaaagtttgttcacttaaattcttttgaggatgggatgtatttttcttgctgttcagtgctttttccttttcatctgttgttctgtggtcacagtgaccttagctacatagcagactttcccaaatgtattgattacaaataaacagttgttacttagcaagacctgaaaatatgtctgcaggtttctccttgaagcaaatgtgtgggatcattgcatttccagaaatctgcctccttcaccctccgttgacagtatatgtcatgcctcactttcttctagctgagctttaaatcattagagcttaaattgtcagatcgttcattgcctttccagggttatttagtaaagtttgttgaaaacaaaaacgccttttcttggttcttttttcagttattttgaaggtccagcatcctgattaaatgtctgacacattaatgaatgaccagcagcagctttcagctcttaaaaagacacttatattttgattttacatgctggttacctgttccattgttgtcaaatgcccactctccatcagatgtgttcctccattttcttatccacaaagtactcctcacttttcaatttgtcatgttactaaatggtgttacattaaagccctgtgttaagtgtctgcttttgactgaatttcttcatagtaaccttcagtgtgtgtgtgtgactatgttcaattagtgggttgatcttcgtataattggccactatgtgagagttcactactaggcagaaactattatggacagtgaaataatgacttttatctcaccacgtgagtttgatgcagtcttttctgtctagcccttgcctcttcctgcccatgtgattgcggtgcagtagtttctgttgtataatagtgtggacagcagctcagaaaaggagggaatgctactgataatttgtagataatattctttaagacttaggggaaccattgaactttgaaatttttattagaaaattatttgttcagaatcagactccattattttacatatacttaaatactttaggggtatttttgaaagttagcccagttttttatgtgctattaaatttttagattacatactaaagaaaagtatgtacacagaatgtagtgctcctagttactattttttctattaagaaatagtttagttctggtgtaaaatttgtttgaatgctaaaaaaaaaaaagcaggactgcattatggcacttttgccttggtggcccactttctccatttaaaacattaggatttgtatttttctgctgcgtttgtatgaagacatatttgattgttgttttctcttgattttaaaataaaacctcatgagccctagtaa

SEQ ID NO: 377 - DNA, 28208 bp, Homo sapiens
  source 1..28208: mol_type = other DNA
ggtggtggatctgtcggtcccgttttcccgtcgcacgtggtggccactgttggcttctgaatggtttgcaaggcggatatccacgccaaggcctttggatcggccgtgggtacatccgtctgagccgttcctttccatcgcagagcggcggcctccggcggcgctctccagtcatggactaccggcggcttctcatgagccgggtggtccccgggcaattcgacgacgcggactcctctgacaggtaggcggccgtacagtgccctggctctgggtacggctctctccttgaccgcccccttggggtgtggactcttgtttgcggtttagagggagactagtggttcatcactcagcgtctctcttgacaaccctttgcctgtttctgcatcccagctgggtttttctcccagttcacgcggcagagttaagtgaaagctacttgtcaagggagtctgcggttctcaggtcggttagcgtcactgggaggcagagttggggatagcgattaggaaacatgggtttttgcgttttaaccacatttagcgttcaacaaatacttactaagcacttaatatgtaccacgttctgtcctgggcgccggaggtaacaagaagaaccaacttcctgctgtcatggaactttaccttctacgtgaaagagagggcacaccatttaaaaaccaaataatgatgtagactatgcaaatcgtttgatataccaagtggtgactgaatgggtagggaaaggttaagtccagatttgaatgacaaggagctaatcctggcaagagcagagggaacagcatttcacacagaagggacagcaagagcaaaggccccgaggccagagtgcctagagcacagtggaggtagttgagaagattggtagggtgatagagaagtaagaaggggggccagatcatggagacctttacaagtgatggtgaaaagttcagatattaatgtgggtcttatggaaagccataggagggattttagcagaagaatgacattatttgcttggtgatttaaaggaatcattctttctaggtagatgatgttcatggagggtgggagtggaacagagagaccagttcaaaaataataaggtaatcagattcaaagatggtggggactagagcccagatcctaaagatatgtcttggaggtagaagtggcagcgtttggtggtagactggacgtggagtctggggaaagagggatgaaggataactcctgcctaaaagcaaaatgaaacatattggagttattttggaattccaagaaaacagcttgtactttatgtttacagtaaggattcatcacatgcggattttgttaattattggggatgttttcaataaatatatgtatgttgaatgctttctgtgagtcagatctagtcttaggtggtagggaggcattggtaaataccatcctgaatgacacagagcttgcaccctagcaggggaaaccgatattattaaataattagactatttgtattcgaattgggtaagtagtacaaaggagaagtgggggaaaaatagggaagacttccttgagcaagtgatagtgagctgatacttgatggatgagtaggggttagccagagaaagaggaagggcattccagttttatggttacggagaagtgtacaaaaagctttagagaagaaaagcagcagaagaaacacagccagcatagctagtgggtagttaatggtaatgagagggcactaatttaccatccaccccagggtattgtaaggatacaccagtgattttccattggggaagatgttgccatcccgacttctacccaggggacttttggcaatttctggagacgtttttgtatgtcacagctgggggtggtggtacattagtggcatctggtaagtagaggccagagatatgctgctaaaaatcctacagtgcagaagacagtcccccacaacgaagaattatctggcaaagttacaactttaacatgccactctaggcaattatatatcaatctgtggagcatatgtatgaagtcctggtaagtagcaagtgtttgatgattgtctgttttcttcctccacatgtccacggggaaccctcagagccatggctaattaataaattgggattgataatctgaatttacttaaactcgtctgtttttcagctggtatctcatattatcagctgcttttttatggtttctgtccttttctgtacatgagaggtaaaaactgagtcctctgttgaatttggcctgcagacatgttttgtttggtatgcacaattatttgtaaaaattgactatgccagtgaagggatagattttacacagaaatccagacttacagcttcacttgaaaaattaagatctggtaacactaggcctgaattctaatatggcaaaaaaaaaaaaaaaaaaagcccttactggttgtgctccctttaccttggacctcttctcccagtttgccagtccccacttctattgtgcagcctacttctctcatttgtagtgcctggtccctgtattcaccatttcttcccatcatgaacagggatgatttggatttctttgtggaacacaaatcttgatgtaacttcttttattgcaaagtgttatcgagttcaaagtaagactgccttagacttattcccaaattttttgtcagaaagcttttttttttttttaattacaattttttttagagacagggttgcccaagctggagtacagtggcacgatcatgactcactgcagccgtgaactcctgggctcaagcaatcctatggcctcagcctcccgagtagctgggatcaaaggtgtgaaccgctgcaccagccttttttccccctttcttttttcttgttttacagaaagattttcctagagattttctaaagcagctctgcgaatgattttcctagagtcaagtctggtatactggtctgagttgtttattcagcagagaagataacaatataatttctaactttaacaaggcagaagcagatttaacttgatgtgcttcttgaatagtaggctttgggcatggagaatgagcaaacaactgcaacagaactggaaaacaggagaacatggttttaaggagatggagcttatcggaaggtgtattttatataaatatataatcttttagatttatcaatattttaatatcttacatcataaatatgtgagatcagttagggtatgtggaaatattgttatgaaataataaaacattgttatttctagtgaaaacagagacttgaagacagtcaaagagaaggatgacattctgtttgaagaccttcaagacaatgtgaatgagaatggtgaaggtgaaatagaagatgaggaggaggagggttatgacgatgatgatgatgactgggactgggatgaaggagttggaaaactcgccaagggttatgtctggaatggaggaagcaacccacaggtattttataaaggatcctgcacatctttatgtagtctgcttatgtctacttttttaaaaggctgttttgtgattctgaaattgaataactaaaagattttcttcatgttatattgtcctgtagcctcagcctttactgattttcacttttcatcctttctgtatttctgataatttcctgggtgtggattctttccagaatctgtaaatttaaaaagagttataaagattgtgagcttaaaatcttcatgggaaagggcatggattggcagtttactacaaatagttaagaaacatggtaaaaaagttcagcctcattggtaattaaagaaatgcagattaaatttgtagagatgccgttttttcacctgtgaaactgttaaagacaaaacatatcattgatggtcaagtaaataggtgcacttacttgtaggataagctggtatgtgataaaaactttaaaagcttcaaaatactttgacttagcgattctgtgagtgtgccaagacttagttacaagaatgatcctccaggattgtttatggtagaggaacattggaagcaaccttgaacgggattaaacctgctatgggactgattcgcacaatgaggcattatacagccataaaagatgttgtaatggaagactgtattaatgagataggaatatgtttgtgattatttaccatgtacaaaaaaaagttaccaaaccacgtacagctgctgctcatactggaagtaccaagtgtgttaggagtttgtaaggccataggattaacatggtacatcttcctggagcataaaggttaatccagcagtcttcctttgaccattaaaatggctatatcggctgggcgcagtggctcctgcctctaatcccagcactttgggaggccgagctgggcggatcacctgagatcaggagtttgagaccagcctggccaacatggcgaaaccctgtctctactaaaaacacaaaaattagccgggcgtggtggtgggtgcctgtaatcccagctactcgggaggctgaggctggagaatcgcctgaacccaggaggcggaggttgcagtgagccaagatcacaccactgcactccagcctgggcaacagagcgagactctgtctgtaaaaaacaacaacaataaaatggctatatcatggaccagaatgtgtgcattttaaaataaccacattgtgagtgacgacaaattttgcatttttatatcgtcttgttctggtgactccttcactgattcataatgaggctttgagcaatttcattattgaagtttgcgcatagcaccagcgtaagtgctgagcctcgtacttaatatttccctctcttgagacattgggcccaaaatgaaattctgaaccagcttaatgctggtcttagctctttattatatactttgggggtaaatgaacattctcaaattttaagtctataaaccagtcaaattagaaaactacacttaattttaatctgttacttataataagaggaatcatagagaagttaaaaaaacggattatgcagactcttttagtcagtaattttaaccttctgtttcaaatgctctttaaaaaattttttgagccaatttgattgactcttacctttccttaagatactcctctaagtattgatgctttaatagctaagtatgaactaaggaaatgtgatgatgaatcttaggtttgtttttacagctagtgccttagactctggaattcccttctaggcaaatcgacagacctccgacagcagttcagccaaaatgtctactccagcagacaaggtcttacggaaatttgagaataaaattaatttaggtgagtttacaaaatacatcactgggctaagaggacatttttcaaaaaccatggagtgttgtataattttattagatcaagaaatgaaggctggccgtggtggctcacgcctgtaatcccggcactttgggaggctgaagtgggtggatcacctgaggtcaggagtttgagaccagcctgaccaacatagtgaaaccctatctctactaaaaatacaaaattagctgggcgtggtggcacatgcctgtaatcccagctacttgggaggctgaggcaggagaatcccttgaacctgggaggtggaggttgtgatgagccgagattgtgccgttgcactccaacctggacaataagggcaaaattccatctcaaaaaaaaaaaaaaagaaaaaaggaatgaatgtattcaagtgttactaactcaataatgtttagagaaaataaaaatcgtaatttaaaaacataactttaggaaaagacttaagcttatgctattttggttgttttcccacttgccataggaatgtaatgttacaaaaacccatttaagtattgtctgttcggttttaggttttttttttttttgagacagggtctcactctgtcacccaggctagagtgcagtggcacgatcttggctcactccaaccctgatttctggggttcagacgatcctcccaccttagcctcccaagtagctaggaccacaggtgcacaccaccacacccggccaatttttattttctgtagagacggggtttctccatgttgaccaggctggttttgaactcctgagctcaagtgatctgtccgcctcagcctcccaaaatgttgggattacaggtgtgagccactgcgcctggcctgttttagattttgtaatagggttatctcatagtaggatgttgaaaatactagagtattgaatatagttacatacggtttcactagaggttttttgtgtaggtgttaattatttagtgacctgttcgatgccaggcatcagaatgttaatttgaatcatcatctcatagaaaatgtaagagggatggagggaaggaaggaaggccatctttctattcttgtggatcttcactctaaacctaacacagtgtttctcatataagctgtcaatacatgctaaattaatataagtattttagggccttctttgcctatcatagacttataacttgaagtgaaacaagtttttagaattaaacttgaaattcaggcagttttattagtcatgtggagtactagcaagtgtctgaaatttattatgcaaattattatctttgaagaatttctgcatctagaattctgtggctcaaatattatagctgtagtgatgaaagtgacacttacgaaggaaacgcagtttagtgcctacttttaaaaacattacattgttttcattactaaactgtattctatttacaataaaacatttagaaagtgtagaagagaaggaagaggggagaaataccctgttcagcaactctgttaatgtcttttcgtcttacatattgtttacattgtgggtttcttgtattttagataagctaaatgttactgattccgtcataaataaagtcaccgaaaagtctagacaaaaggaagcagatatgtaagtaatattttaataatatgcatgggtgataaggactaatctagattaagcagcaccttgatcataattcttttacagaggatgttcatttgtatacttaaaccaatcattattttggtgtgtgtgtgtgtgtgtgtgtgtgtgttttccttagcttaaattaggataacctatgcctttgtgaattaaaaatattaatgaatcttggctgggtgtggtggctcatgcctgtaatcccatcacttcagaaggccgagctgtggggatcacttgaggccaggagtttgagaccagcctggccaacatggtgaaaccatgtctgtacaaaaaatacaaaaattagccagacatggtggtgcacgcctgtaatcccagctactcaggaggctgaggtgtgagaatctcttgaacctgggaggtggaggttgcagtgagccaagatcgtgccactgcactccagcctgggccacagagcgagactccatctcaaaaataaatacataaaataaaaattaatgaattttaagaaatacatggtaaaagtgtaatctcatgaaatttacaaatgtgttcttatgaggggaacagtgtttgtagatttcagtttaaactaaaatgtgcaaaaatgttcccttaaaatttattaagaattattctttcccatgaagtatttttaaaaatttaagggaagactatgaactaatgatataactgagaactgtttctgtttacacttctgttctcaaagccaattgtttaagatctgaataacttctcttatatgctaataactctaaagtattatcactatattatagaaaacgacactaagatcatacaactaactgtgagaattgaacgtaaaagccagctttcttccaatttattgctatgtccaagaggtatcagctttttgagatacaccatagttatttgttatttcactggtatctgtttgaatctttgtgtttaaacctttattagtttaggttagtgtgctaggtggagtcactcagtgtataagcagaagcaaatcagagtctgcatttgaatactgtcttgaaacgattttaaaaaacaaaactgccaggtgcagtggctcacgcctgtaatcccagcactttgggaggcagaggcgggcggatcacaaggtcaggagatcgagaccatcttggctaacaaggtgaaatcctgtctctactaaaaatacaaaaaaattagccgggcttggcggcgggcgcctgtagtcccagctactcgggaggctgaggcaggagaatggcgtgaacccgggaggcagagcttgcagtgagccgagatcgtgccactgcactccagcctgggcgacagagcgagactccatctcaaaacaaacaaacaaaaacaaaaacaaaaaaacttgtatcttcttagaaaatgcctctaaacagaaagccttgtaaatgactaactctatgtggaggctggggcaggaggaatacttgagcccaggagtctatgcctagcctgggcaacatagtaagatgctgtctctttaaaaaaaaaaaagaagacaagactttaattgtgtgctaacagaatcattaaagatgtgaaggacagtacaaatatactcaatgttttctctttttcagcatagttcactttaccctggcggctctttgatgcttctgaaataggaatagatttttctttttactgtatacatactccttttgccaaaatacagaattgaattttggtattcaggggaaatgaagaaagtttcactgagtaatgaaaaatctacaatcatatcataaaatctgttatttagagaaactacctacttaggaattttcatgaaattatctacatttagaagattttggcttctcactgaattttgaatgtgtcaactatacgtttttgtttttggttaggtatcgcatcaaagataaggcagacagagcaactgtagaacaggtacaatttaaatgtgttgcaaactcttctttttaattagcatttcttctctctttgaattgtagtttgcttttatcctttttgcttaatgctaatgttacctaaaattactcctatataaaattattcctttttatagtttcgagtttagagacctacatcttgcttttataggactattggatgaattagagtcatggtccttcagtggccttgcagagccaccatgcgatgctttcccttcttggagagattatcagaccagcaatcttttagaaaaggtccgtaggaattttgtgagctttcccagaagataggtagggtatctgccacaaagcaggaagtgtgggtgtaaaagagagaggggcagataatgtcttcaaatttccagttaggaatcctttgtttagaaattatgcttgttttattctttctattcaagaatggggaaaaattggcccctaattttcccacattccgaagaatgtgattggatattagccttggcccagatttttgatgtgaagaaagtgataaaaagagtcagaacatttgcctctgccacctaccactcctttccaccaccccctcccatatacacaagcacatgttctgaattccaccattagacagaagccgggtctgtggtctgtgtcttcattgtcccctagtttattttgtgatttatttctgtaattgaaaacaaagtatggttcacctcggaaaaatgagatagccttaagtttcaaagaccctaaataactttagggttatttttggcaggaaattctttttctctttcaaaattaattttgaatgatagagtacatagctggagtcttcagctgtctatataaaatatatgcttgtgtgtaaatttatcatttctctttccctgttttgttcttaagccatctggtttgttacttcttcctatgcccctgacttgtctaactgccaacttcgcagaagcacagttctgtacctagaggcccatactcagccagctgacttcccctctttgcttacctgtgcagtagagaagaaatggaaactagtgccttttcattcttctctagttgcaatggtcgtgatttggtttttagtcctatagtcttcccaggtggttttgtttatattaaccttaggtttgtggtgtgaccccagccacttcattgaaggtggaccctaaagtatagttgagtttggctagtttataataccgtctcaccccatgggggctagagggcctgcctgagccacaaggagttattggttggtatccttagaaattgcatacaaatatttggctgctttagtttcagagataaacaagaacagcctttaaattcactgccttctgtttgttagagaagactttgaaatccattttactcaagattgattattctggcttgaaggaaatgcttaccgtgatttactaatctataatggcaggggtctgcagactcttgaaagggccaactaataaatatgtgtgagcattgtggctcacatatagtttctgttgattttttttcaaagcaatcatttaaaagtgtaaaacccattcttaacttgcaagctaaggaaaaacaagctgtggtctgatttggtccatgggccggagagtgctgacccctgatttacagctgcctgtccacgacggtagccactgggcacttgagatgtggccagtctgaattgagatgtgctttaaatgcaaaagacaccggagtttggagacttagtgtcaaaaacaaggattatctcactgatgactttttatattgatacaggttgaaatgatagcgttttagatattttgagttaaataaaatatattaagataatttcacctgattctgtttactttcagtgtagtgactagaacaatgtaatactatttatgtagtttgcattatacttctattagctaatagcctagagttctgtttctcttgaacttggttgcctttgatttccatgactggatgaacttgctagttggttttgcctttggttcctttggcctttacctgacattttactgattaacaattagagtgaataaaagcaccaaatagtgactctcatttagtcaaccaggatagcgtcgtacagttaagctctgctgtttattgattgtcacaggttttaatgaggaaaatttggtaccgtcttttggaactttttaatttttgcatttctttttaggtgttggatcccagaacaagaatgattttattcaagatgttgactagaggaatcataacagagataaatggctgcattagcacaggaaaagaagtgagctcttctttggatgattggatatttaattttcttatttcagataccagatgaaactggcacttagaactacattatgcctttaagaagaaagaaaaacaaagccatacacattaatattcatggttagagaggaagttgtacatataactacgcccttttcactaccgctgctgcattggatcattgagtctaactagttgtgcccagtagtgagtgagatggtcagattattacaggcctgagttctaataaaataaattactcatggggccaggggtttatggttatgtttctatgagtcagcaagtctttcttatttttttctttacctacgggtatactgccttctgtttgttagagaagactctgaaatccttttgactcaaaattgactactccagcttgaaggaaactcttactgtgatttactcagctataatggcaggggtctgcaggctcttgaaagggccagctaataaatatatgtgagtgttgtggctcaatatagtttctgtttttgttttttttttaaagcaattatttaaaagtgtaaaacccattctgctggaagcaattctcagtaaaattcaacttataaatcactggatttttaaattttttttaaacagagtctttttttttttttttttttgagacagtctcccaggctagagtgtggtggcatgttctcagctcactgcaacctctgcctctcgggtacaagcaattttcctgcctcaccctcccgaatagctgggactacaggcgtgcaccaccacactcagctaatttttgtatttgtagtagaggcagggttttgccatgttgaccaggctggtctcaaatttttggcctgaagtgattcacccgccttggcctcccaaagtgctgctattacaggcatgagcctccacgccttgcctaaatcactggatttaagaatgtctttaattattttgcatatacttgagatataaaaaagtttgaaaccacttctcccctatatttaaattggattttactgtacagtcttgcattgcttaatgaagggaatactttctgagaaatgcatcattaggcaaatttgtcattatgcgaagaacattatagagcatactcatacaaacctagatagtatagcctactgcactctcaggctatacggtagttccgaatctgtacaacaggtttctgtactgaatactgtaacaattgtaagacaatggtaaatatttatctatctaaacatagaaaaagtacagtaaaaatacctgttatagtcttacggaatcacctcatatatgcggtctgtcacctgtcagtaactaaaacgttatgtggcacgtgactgtatttgtatattggagctatgtttactgtccttttgatgtaatgttttacattttaattcacatattcaaaagacagtggtattccttatgcatgttatttcagttcacttgacttttgaggttagaatcaaatagattgaaaaagtggttatttaacataaacttcattttcttttttttttgacttaatataggctaatgtataccatgctagcacagcaaatggagagagcagagcaatcaaaatttataaaacttctattttggtgttcaaagatcgggataaatatgtaagtggagaattcaggtaagttcagatttttccctccagttggtttaatttctatttcctaaaacattaaaataataatggaatgattgaaataataaacatttttcttattcaagatttcgtcatggctattgtaaaggaaaccctaggaaaatggtgaaaacttgggcagaaaaagaaatgaggaacttaatcaggtgactgtctgggatgtgtgtatgtctgtcctatgccctgtacatgaacatcagcccttcctcccagcagatcccagtgtggttctgcccaaatgtagggacttgttagggcctttatttctattaggtctgctgaagtaagcagaagaaacacatgtctggacaaatagagattgtttcctattctgttgttttctattctgagaatccatttcaaaagaatactgccacaattcatatttattccacgaagctagatcatttggaaggccttgtaagccattgaaaatgtttagaatttatactgaggataataaggaactgctaaaggattttaatcaggaaagtgacacaatcagatggttataatgctctgtcatgttttcgtaggtattggagttttcgactaatcttgttaggtcgtgaactctttgtttatcatagtttccttttcttagtccagttttggacactttttttatattctttgtttgcactaacacctttttatcaggtaaaggcctcatctagttgagatcaagtttcctgaaaattatggagttttaaaaaatgtcttataactttttatatggtgtacacaggtgacacattggatagtgtagtattgagcaagtactactcgttttgaaagtcttttgtgttcaacaagctattaggtgtgagtccaactatttttattaagcatttttcaggctattcaacacaaaagatacttgtggacctatctcctctatttcctccattgtaagatgcacatttttttcagtttaacatctctggaattgctttgggtattacaggttatgggatgtaatagttgaattgctagtgttttatcattctcggtggtacataatggtgccacttaaaataatcttagagtttatgaaatattataatacatttgagaggccttggtgctatttcttaacagcaatattaatcttgggacctgcagttgtaatttatttagatgccttttcaacttttcagttgtccttttatttgttataatatcacaggctaaacacagcagagataccatgtccagaaccaataatgctaagaagtcatgttcttgtcatgagtttcatcggtaaagatgacatgtaagtacatggaagggctaataattgcattctcagaactgtatttttaagttctttgagtttatccactatatgaatatttcccatttgaataacttattaatctttcccactatattagtgaataagtgttatcaatgtattctaccttttcaagtctgaaaatgcttcagaatgaggagcaagttagtcctgtgttggagggtggtcttatacagtgtgttgggaaagcatctatttgccggtaccttcttggtttatgtgcattgagacagattgtcccacatacagctcacatgatgagttgtagaagagaagggcatgtaacagtatagtaagaagcaagaaaacttgttcttggtcattttatcttagttcttttcattcaaggcctgcaccactcttgaaaaatgtccagttatcagaatccaaggctcgggagttgtacctgcaggtcattcagtacatgagaagaatgtatcaggatgccagacttgtccatgcagatctcagtgaatttaacatgctgtgagtgtattttgtctcttaagaactgcctgtcagttgtttcgtgtcctttaaaatgataaacaaaatcccaatccaagaagtcacactaacttctgaagttttattgttgacttccaaatggtataagataggattccttttttcagtgaccttagtcaccgaattgactgcttggatcattaacagtgaatggattttggaaattttcccagttccatctgttagtcaagattgcctcatcttatctaccttggtgattttgtgagctacttcccttgcttttaagagtagaatttattttaaacgaaaaacatagtaaagtaataccatcccacagcttctgtgtctctggcccataggtaccacggtggaggcgtgtatatcattgacgtgtctcagtccgtggagcacgaccacccacatgccttggagttcttgagaaaggattgcgccaacgtcaatggtgagtagaaacggcaattttcgaaacagctcattggtctgttttggttttgtactcagttaagctgttggcgtaaaattttctcactaaattgtttggtgcagtgatgcttaaaccatttgctgggagatggtatgtaattttatctccttgtttctctataaggtagttggaataataatatttttcctcataaaagctgtcattaacgtttttccttctgacagatttctttatgaggcacagtgttgctgtcatgactgtgcgggagctctttgaatttgtcacagatccatccattacacatgagaacatggatgcttatctctcaaaggtaagatggggagaggaaggaggaataggaaatagcagtacaggtgcagtatctcttatctcaagtgcttgggaccagaagtgttttggattttggattttttccagttttgaaatatctgccttgtacttaccctagttgagcatccgaaatatcaaaatccaaaatcctcactgctccatttcacatttcatttgagcataatgttggtgctcaaaaagtttcggattttggagtatttcagatttttgatttttagatttgggatgctaaccagtaattgcatttgcttgacacttctgagggacccagattgcatagtgtagtttattcattttgacagcttcctgagaccttttccttcctacttaacagatgaagaatcaaaaatacagcacaacagccaatggtaaagccaggggttttttttttttccttttttttttttttttcttctcctgagtcaacttgatatccaagctttttacttcaattatctggcaagattacatagactgtcaaagtttgtgaaagtttagcaagaaaactgtcagttttttggtcattaattcttttcccttgtttctcaggggcctttctctttttttcttttctttctttttcttttttcttttctttctttctttttttttcttttttgagacaggatcccactctgtcacgcaggctggaacatagtggcgcactcttggttcactgcaacctctgcccctcagggtcaagtgatcctcccagctcagtctccgagtagctaggactacaggcacacgccaccacacctagctaatttttatattttttgtagagacagggtttcatcatgttgcccaggctagtcttgaaatcttggcctcaggtgacccacctgcctcagcctcccaaagtgctgggattacaggtgtgagccacgacgcccggcctcagaggcctttctgaatatagaattttttagaattctggtaaaagacataatataaaatttaatgctttaaccatttgaatgtatggttcagtggcattaagtacattcacattgtggtacaaactatcaccactgtctatctccacacctgttacatcatcccaaactgatattctgtacccattaagtaacaacttcccatcccctggcaatcaccattctactttctgtctttgtgaattcacctactctaggtacctcttataagtggaatcatatagtatttgtctttttgtgtctggcttatttcacttagtatgatgtcttcaagattcatccatgttatagcatgtgacaggatatctttttctttttttgtttgagacagggtctcactctgtcaccaggctagagtgcagtggcgtgatcttggctcactgcaacctctgccttcgggttcaagcaattctaccaccctggcctccctgagtagctgggactacaggtgcgagccactacacccggctaatttgggtattttttggtagagacagggtttcaccatgttggccaggctggtctccaactcctggccttaagtgacccgcctgcatcggcctcccgaagtgctgggattgcagacatgagtcaccacgcctggcctaggatttcttcttttaaggctgaataatggtccagtgtatgtatatactatattttgtttatccattcatctgtggatggacatacgggttgcttataccttctggctattctgaataatgctgctatgaacatggatgtataaatatctcttcaagatgctgctttcagttctttcgaatatacacccagaagtagaattgctggatcaaatgatatttctattttcaagtttctgaggaacccaccatactgtttactgtagtggctgcaccattttacattaccaccaacaatgcacaagggttttaatcgctccacatcctcaccagcacttactaatctccataccctcaccaacacctattattttgttttttgttttgttttgacaatgagagaccccctaatgagtgtgaggtgtatgttattatggttttggtttgtgtttccctgattactagtgacgttgagcatcttttcatgtgcttcttgcccatttatatattttctttggagaaatgtctttttttttttttttaagagacagggtctctctgttacccagtctgaagtacagtggtacaatcctgtctcactacagtctcaaccttctagactcaagcagttctcctgcctcagctgcttcagcctgctgagactataggtgcagaccatgacacccagccaattttttttttctttttcattttgttgggacagggtctcactgtgttttccagtctggtcttagactcctgggcttaagcactccttctgtctcggcctctcaaagttctggggttgcaggcatgagccacagtgtccagccccatgtcttttttttaatcaggtttggttttttttgttgagttgtttgtattttctggatatgtcagatacgtgatttgcaaatgtttattcccattctgtgacttgtcttttcactctgttgattgcaagctttgatgcacagaagttttaaattttgatgtgatccagtttatctatttttatttttgtctctgaatcatagagttttgaacacatggcatgtatgcctctacacaggttttcaggtttgtttgtttttgagatggagtctcgttctgttgcccaggctggagtgcaatggcacaatctcagctcactgtaacctccacctcctggattcaagtgattctcccacctcagcctcctgaatagctgggattatgggcacctgccatcatgcccagctaatttttgtatttttgtagagataaggtttcaccatgttggccatggcaagtctcgaactcctgacctcaggagatccgcctgcctcggcctcccaaagtgctgggattacaggcataagtcgccttgcctggccaggtcttcaggttttatcctgtcctttcctctttttccatttccttgcaataccttcccatttctgcctttgctcaactttgctccgcctggtgaactttaaagctccagttagaaagctctctggaggggtatttcagcagaaattgttttcataggtgtagtctcctacaactataatagaagtagtcacactgtgtcacttattatactaagtccctaattctgtcaccctcaattatgaacttttatggaacaggagttttctctattgccaagtacccaatatctggcccatagtaggcaatcacatctgttaatggaataaataagtgtgtcatttttattcctcaactttttaacttagcactgactttctttttctttttcttttttttttttttaaatggagtttccctcttgttgcccaggctggagtgcagtggggcaatctcggctcactgcaacctttgcttcctgggttcaagcgattctcctgcctcagcctcccgagtagctgggattacaggcatgcgcccccatgcccagctaattttgtatttttagtagagatggggtttctccatgttggtcaggctggccttgaactcctgacctcaggtgatccatccgcctcggcctcccaaagtgctgggatcataggtgtgagccaccgcacccggcctcttttatttatttatttttttgacggagtttcgctcttgtcacccaggctggagtgcagtgtgcaatttcggctcactgcaatctccgcctcccaggttaaagcagttcttctgcctcagcctccccagtagctgggattacaggcacccagtagctgggattacaggagcccaccaccactcccgactaattgtgtgtgtgtgtgtgtgtgtgtgtgtgtgtgtgtgtgtgtgtgtgtgtgtgtgtgtttgagatggagtctggctctctcacccatgctggagtacagtggcacgatctcggctcaccacaacctctgcctcccgggttcaagtgattctcctgcctcagcctccaagtaactgagatttcaggtgcatgttagcatgcctggctaatttttgtgtttttagtagagacgggttttcaccatgttgactaggctggtctggaactcctgatctcatgatccagccgcctcagcctcccaaagtgctgggattacagacgtgagcctcagcctcccaaagtgctgggattacaggcgtgagcctcagcctcccaaagtgctgggattacaggcatgagcctgtaattagactgcacctggcctaatttttgtatttttagtagagacggagtttccccatattgcccaggctggtcacaaactcctgatctcaggtgatctgctggcctcacctcccaaagtgctgggattagaggcgtgagccactgtgcctgggtcagcactgattttcgtgtctaaactcaaaaaaaaaaaaaaaaaaaacctctgctcccactattttttcctttcttctatatagagaagagaacactcagttttacaaaccaaaagaaccctttggaatctttgtcaccctcgtttcagtcattgtttgctcagagagctttcttcagtgcagcagcaataaagccgtatattcaagatttacagccagcctttgcaattcccttcgccgactgctcaggatttaaggaatggttctttcattctttaggtctctgtattcctttagtaaatgctaaagcatttactaaatgcaaaagctaattatttaaatttagtaaaagtagcataacttttgaaaaaggggggctagggatccccctaggctagaagagtttgatttattgttacttttgggttgatggcagcctttttggtgaggtctgtgctggaaagctaacttgtaccattagacctcactaaatgctttcctaagtgtgaggaggtgatacttaaaaagactggaacaattttataccaaaactgggacatggatgtgccttctgcagtttgaatataaaagaaagtcatttttgttttctttccaaggccatggaaatagcatctcaaaggaccaaggaagaacggtctagccaagatcatgtggatgaagaggtaggatttattatctattcacagcctttggaaacacttgtgttttgagggtttttttttttatgttgctagagcataaacttgatttaaatagataagcagctttttcaaatgatggtaatatttccttaagatatattatagtaaatgatttaagtgagccaagttggatagtttacatttcactgtattggtccactcagcaacctgttagcccattgtcctagatggagaaaatttttaaagagcctgttaggatataggcgtcaagaaggaaaagcctgtttttaatttgcaaatgtgagtttttaaatgacttaaatattgattctagaaatgttatagattttaaatattatgctttgataaaaacgagtcagggtgtttttttgtgaaggagccatagtaggcttttaaaaaaaattctcacaactcttaatggttgactatgaggtgccctgtgtttgtcggcagctctccacctttttcactgtagcagctgggtatgtttcgtaaggcatagccaggcagcgcttgccaactgtaattccgcccctttccctcctgctcagaaaagctttttggaacaaaaatgaaggagaagtgttattctaaggataatcttgaatcagctctaatgttttttttcccttccttaaaataaatcatatgcaaaatttagtgttctatcattagtagtgttacttttgggacaccacatcacagatgggataccagtgtgtgcagacagcttagccaagcatcagtgttagggatgaatgaatatatagattcccctgtaacctgatggaggagtatgctgtgtgaatgtgagaagtgtatgaataacagttttgattttgcttttcctctctgttaggtgtttaagcgagcatatattcctagaaccttgaatgaagtgaaaaattatgagagggatatggacataattatgaaattgaaggaagaggacatggccatgaatgcccaacaagataatgtaagtagcttggtttgtatatagcaagcagctcttcaaaagtagtaggggactgtcccaaacctatctgggccttttaagttcccctaatcttgaatattggcttctgagctagtgaaatgactaactctatctgtgttaacttgtgtgcacattgaacgcaaagggaattatttggaatttatgagaggaggtaacacatttgaatgaatccaacaagctgtaattgtagaaacaagattcagatagaagtctaggctattaatggttattatattaggtccattaacatatatttctttaacatacatcattcaggaacaatttctttttggtgaagggtcagatagtaaatattttaggctttgcaagccaagaaacaaaattgaggtgattacgtaggtccttatgtaacaagagagaaaaaaattcaccctcaatttttattcgtgaaattagaaatactttaataatagttgaatacacttttgtgtaatacaagtatactaaagaagagtggaattatttgatgtggggcagataatatttcacttaattggggctcaaagtttgtgtttgctatcttcaaattgattgcaaatgtttatctgtaaaaactaccaggtaggctgggcgcagtggctcacacctgtaatcccagccctttgggaggctaaggtgggcggatcacttgaggtcaggagttcgagaccaacctggccaacatggtgaaaccctgtctctactaaaaatacaaaaattagccaggcatggtggcgtgctcctgtaatccaagctactggggaggctgaggcacgagaatcacttgaacccgggaggcggaggctgcggtgagctgagattgcgccattggactttagcctaggctacagagcggaactctgtctcaaaaaaaaaaaaggcccagtacggaggctcacacctgtaatctcagcactttgggaggccgaggtgggtggatcacctgaagtcaggagttcgagaccagcctggccaacatggtgaaacctcgtctctactaaaaatataaaaattagctgggcatcgtggcagctgtaatccctgctactcaggaggctgaggcaggagaatctcctgaaccccaggtggtggaggttgcagtgagccaagatcgcgccactgcactccagcctaggccacaaagcaagactccgtctcaaaaaaaaaaaaaaacaactaccaggtggctggttggatttggccagtagatctggtagacagaaataatatcaatattataaacttcctgtgttacagtgagattaattttagatacctttttataatcataggagacattatttaacccacattgttcttaatagtgcaatatgcatatttcattgtctagttttatgttgatccttattttttttttttcattttggttataagattctataccagactgttacaggattgaagaaagatttgtcaggagttcagaaggtatgaagaacatgtgttactgtttgtttatgtgaaaacagttttaaaggatataaactctagtcatactgttttttattattatttaatattattagaactaaatgttattttatattgttaaaatgttataattgctttcaaagtctgtggacatcttcagaaatgccatttttgtgttctttctaaacacagcactgaaatttggaaattaatttatttttctttctgtctctgaattgttcagtgattgcaggtgaggtatttatctttttgtatcctggtcgtcatttgtggagctcttaatgatagccattgtgcttcttgatggttttacaaccagcttaggagaactttggaatgtagtctcctaccagggtattacttgttaaagaacaatctcatgagttcagcaagtcctgctgtgctggattcctgtgatgttcttttttcttaaaacaatcttgttttgttttacattttagaagggcagggattaagtaattctaacttaggcagtcataaaagcagtctttatttttttaaatcttcctaattgaagacttaaataaaggatcacagtttgctttcttaaaatcatgtcttttctgtggaaagaattgaattaggggaattctggtattttgcatttctgagttataataacaggtgtcataaggaagttatgctttggattccagagcatgaagattttattgcagcaagctagaaaatcttgttgtacaattgacttctaaagatctgtttttttcttataaaagggaaacctcactcttaaaaactgctaggaagcgctgtattagacaactgctgaatttcaggaagtaatgaaaatttctcttcttcacatattgttttccctcccaattggattagtttattgctagaaatgtggttcacaggaaaacagctgtgaagttatccatataaatcttcattttctacctctatgtatattttgcctctttcccaatcccaactaaatgctcctgattagctgaaagaaggagaacagctctgttgttgatctaggtcacgcagtaaagccctggttccttcatttgagtatgttctggagccttacttggagtggctactttcatgtttccctcctgatgttcattctggtgttttgatgtttcagtacaggatgttagtttttaacatatatttgcgagcctaaaatctgaattctggcattaacacatttaacaacaacacataacttggtttgtgtgttgtttagaataacatggttctttaataatttcaaggtccctgcactcctagaaaatcaagtggaggaaaggacttgttctgattcagaagatattggaagctctgagtgctctgacacagactctgaagagcagggagaccatgcccgccccaagaaacacaccacggaccctgacattgataaaaaagtaagcaatgaaataccttccccttttctttagtgtgggagcacagccgctcttatttctctttgctcaaggatctagctagattatgatggctgaaaacattattgataagtacctctaattacagttttaatacctaagtgtgaacttgacttttggtggtaacattatcttgagattgggctgctcatcagagcaccttgggcattgcctagagagagcacgcactaaattcagtacatttcacatgaagtacaagtgatgttagagttgacccagggtaaatactgaagagccatttcagggggatttatagcccagcttgatgtttctggaatctgaaagaccatataatagtccccccatccatgctttcagtttctactgtttcagttccctgcagtcagccttggtttgcaaatattaaatggaaaattccagaagtaaacaatttataagttttaaattgctcaccgtcctaagtagtgtgatgaaattcatgctgtcctcctccatcctgcctggaatgtgaatcatcacgtggtccagcgtcttcacactgtcgacactccccacccgttagtcacttagtagccttcttggctatcagttcagctgctgtgatgttgtggtgcttgtgtgcaagtaacccttactttgcttaataatgaccgtaaattacaggagtagtgatgttggaatttcaggtatgctttagagaagccataaaatgcttcctttaagtggaaaggtgaccattcttgacttaacaaggaactcatgcctgtaatcctagcactttgggaggccaaggagggcggatcactccagaccagtctgggcaatagagtgataccccgtctctattaaaacattggtgatgagcacctgtagtcccaaatacttgggaggctaaggcaagaggatcccttgagtccagaagtttgaggttctagtgagctgatcatgccactgcacgccagcctgggtgacagagtgagattctgtctcaaaaaaataaataaaaggaaaagaatcatatgctgaagttgctggtgagaatcttttatccgtgacattgtggagaaggaaaaagatgtttgtgctggttttgctgtctcaccccaaactgcaaaacttaggaccatagcatgtgataactgcttagttaagatggaaaaggcatgaaatttgtgggtgaaagacgtaaacaaaaacatcttccagttgatggcaccatgttgcaccagaaagcactgagcctatacgaaggtttcaaaggtttcagcaagggttcccctgaaatgagtgccaccaggccatttactgtaaggaatagttacacagattcaggaataggtttggactaaaaaatagaaaaattaccagagaggctgcatctgccaatgaagaagctactgtcacatgagtatgatactgtgggatatttggagagagagaccacattcaaataacttttactatagtatattgttaccattctgttattagttattatctcttactgtgcctaatttataaattaaacctcatcataggtacgtatgtataggtagaagcatagtatatatagggtttggcactatccacagtcttaagcatccactgggagtcttggaacatatcccccatggataagaagggactcttgtatttctttaatccctagccatagacatagagacactgctgactgagtgctatgtgactattattattccatcttagtctaatcctttaaaccttatacaatgtgggtcccaagacttctgagggacatactcagctgctagcatattttctcatatgtctactagaaacacatattttgtctctttccaatgtctatttctgttagaatatggaacttgtaaagaaaagtatttgcaaacatttaataacattcttagggatatttctgtttggctgtcttcacatttctattaaggaagctcagctgggcgcggtggctcacgcctgtaatcccatcactttgggaggccaaggcaggtggatcacgaggtcaggagatcgagaccatcctggctaacatggtgaaaccctatctctactaaaaatacaaaaaattagccgggcgtggtggcaggcgcctgtagtcccagctccttgggaggctgaggcaggagaatggcgtgaacccaggaggcggagcttgcagtgagccgagatcacgccactgcatgccagcctgggcgacagagactccgtctcaaaaaaaaaaaaaaaaagaggaagctcaaggccggttatggtggctcatgcctgtagtctcagctactggggaggttgaggcaagaggattgcttgagcccaggagcttgaggctgcagtgcacaatggtcatgccactgccctcctgcctgggtgacagagtgagtccctgtctctaaaaagaaaaaactgaaagacagttttcaccccaagttcctccaccaacccataatcattttcttttcttttctttacattacactcacttttattcttctatgtgtgtattttatttagttataatcataataatactccaggtgggtgcagtggctcatgcctgtaatctcagcattttgggagatcaaggtgggtggatcacttgagcccaggaggtcgagaccagcctgtgcaatctggcgaagccccatctctaccaaaaaataccccaaaaaaacctagccaggtgtggtggtgcacacctgttgtcccagctacccaggaggctgaggtgggaggattgcttgagcccaggaggtggaggctgaagtgaaccatggtcacgccactgactccagcctgggcgacagagcaagaccctgtctaaaaaacaaaaaacaaaaaacaaaaacaaaaaatgcatactccaaatgaatgaaagttggcttttttgtttgttttttacaggaaagaaaaaagatggtcaaggaagcccagagagagaaaagaaaaaacaaaattcctaaacatgtgaaaaaaagaaaggagaagacagccaagacgaaaaaaggcaaatagaatgagaaccatattatgtacagtcattttcctcagttccttttctcgcctgaactcttaagctgcatctggaagatggcttattggttttaaccagattgtcatcgtggcactgtctgtgaagacggattcaaatgttttcatgtaactatgtaaaaagctctaagctctagagtctagatccagtcactgactctgtctggtgttgacagaggatttatttaagctattattttaataaagaactttgtacatttttatttttatatttttttctcttacaaatatgtttttggaagcatgataaatgtttaaatgtagtcaacatctgtaactcttacatgagtgtccagaggcactcatgggaaaattggttttgctttctttgtacacaccagagacccatctgaggtcatctgattataaggccatgtttatataaagggaatttcacccacagttcagctggctgttgattttcactgcaactctgcctttgtgtgtattggcgatcatttgtaatgctcttacacttcgtctttaatgttctttttggagttaggacctctcagttcataaagttttttacaattcaa

SEQ ID NO: 378 - DNA, 14782 bp, Homo sapiens
  source 1..14782: mol_type = other DNA
ggctggcggaagaggcacgtgcgctgctgaatggagctggtcgctggttgctacgagcaggtcctctttgggttcgctgtacacccggagcccgaggcttgcggcgaccacgaggtgagataccgcgtagttagagacagtcggaggcggggccgggaaggtcgggtttggttcctacacagcagaggtgaacattggagcgcctgctgttcactggatgatttgatgaatcaaacctaagagacttaagagaaaagctaaccttttaaaccgtagaatggacattttatcaaaatgaggcaatatctgccttttctagtagacaaaaggtccacgggacacaaaggaaaccggcatttctgcatacggacaaatgagtcgtagattgtggatttaaggatcgatcccataagttgacagtattcagaatttaatgaaagaagatctcgctcttttgctgaatttctgccctggaattttacaaattactagaactagattaggataaatcccttataggtaaagcgataccaattcattatttgttgggaacttatggcgagctgggcggtggagatgcaaagatgctggaggtatggatcttgccttagagacgttgcctacataaggggtggaggactgaggagacgcatagatggagagaaattacagcagaatatgatattactagatgtgtgaatagataaaaaggtcaaataaattatcagtagtcaaataggtagataggactatactcacgactaggaatccgacctcctaacatctagctcacttttattcttgaagcaattctaagcattttctagaaaattgagtacagtacttctttatgaagtcaaggcgtcggtctttaattatccagaaaatttggaagtatatcacttggcctattgctttcgtttattttgtttcctactccagttatttgctctttgtctttggctgaaaagtgatgtgttttgaatagtcaaagatgatgctatttaattttttttttttgtagtgaaattacttaactgtgttccagacacacagtagtcctcacagcaaccctctgaggaggatgcagttattctcgttttgcagatgaagtaccaaaatgttggtcctagataggttaagtgactgctgaaggacacacagataataattgacacagctgaccccaaaatgtcaggagcccccgagggtctctgacatttgaaactcttaaccattaccctatacttctactaaatctaagcaatagcctagataacctacattatgtgaattttaaaaggttattatttgatttaaggccatagcagacccgcaaaaatgcttgattcaaaggaggcccccttggtcttaaatgatggaaggagtatcttctgtaactaaggacctgatttgcagtaacacatgttcaaagaagtttgatgggtttttttctttttcggtttgttttgcaaatactttttgatgcagttccttcagtttaaggagtgagtgagtgtgtgtgtgtgtctgtgtattttgctgtcatgcttcgcactcatccaatcagacttcctaatgctattgtcacatggcaataagcacagagttcctgagatttcgttattggtgattctctagagcttacgttggtactcatggaaacatacctttactctgttggtttttctttataagacttgtccactgggcgcggtggctcatgcctgcaatcccagcactttgggagggcgaggcaggtggatcacctgaggtcaggggttcaagaccagcctggccaatgtggtgaaaccctgtctctaccaaaattagctgggcatgatggcaagtgcttgtaatcccagctactcaggaggcttaggtgggagaatcgcagttcattgctgtgtatcaactgcttggaatagtgccagacacatagtaggcactcattatttgaaagaataaattcaaataaaaatgtgaatatctgaaaaaataaattaagtctcacatataaagtaaatacactaaagagttaaagatttgtgtaggatctaaaagtcttccttagtccagtctccattactgtgttctagagtgatgatacccagtgttgcctgcccacctccttgctttaccttcctcatcaagtctcaagtcctttgtggtaaactacatgtcattttgtagtttaacatatcatttttccatttataggatccattgatagttttcatgaatcgtggaatgatttatcttttcagaaacagataaatggttccgtgattcatgaaaactaccagtggatagagttggtagaactgtggtgtgactggcattaattgtatgttttcatcttcagcagcaatggactcttgtggctgacttcactcaccatgctcacactgcctccttgtcagcagtagctgtaaatagtcgttttgtggtcactgggagcaaagatgaaacaattcacatttatgacatgaaaaagaagattgagcatggggctctagtgcatcacagtggtaagaaaattgtatcccttaagatgagaacatagaggttttctttacaatttgacttcagttgaacaatttgttgtatctattttatagcagattctttgctagaagatagaggaattttaaaaaaaaatggtttcttagcctggcacaatggctcacacctgtaatcccagcactttgggaggctgaggtgggtggatcacctgaggtcagtagctggagaccagacctgtctctactaaaatacaaaaaaaattagccaggtgtggtggcacacacctgtagtcacagctactcgggaggcggaggcaggggaatcgtttgaacccgtgaggcagagattgcagtaagctgagatcacgccactgcatgccagcctgggcaacagagtgagactctgtctcaaaaaaaaaaaaaaaaggtttcttgctctgggttggcttacggtctgtattgggagacagaaaggaggcatttaacccagtcagagtgaggttttcactgaaaccttccttaaaatgacatctgaattatcttaaaagagaaatgtcagttattgggcaggtaaagtttgcaaggagggagaaaggacattccaggcagagccggcagtgtgaggagcacaagtagtagcatcatagcaatatctgactttattgagggcatattatgtacccctctgtgtgccaagaaagtagaagagaacacctagtttcaaagatgtagcgtcacagcaatatctgactttattgagggcatattatgtacccctctgtgtgccaagaaagtagaagagaacacctagtttcaaagatgtagcgtcatagcaatatctgactttattgagggcatattatgtacccctctgtgtgccaagaaagtagaagagaacacctagtttcaaagatgttacttgacttgccgaaggtctcaaacactggaactagaacttgaacctgggcctagagcccatgcttttgaccactggtgttcatagggaaccgtaagcagttccggattatgagaaggttaaattgggagtttgaggggctagagaagtagatgggaccagatcctggagtccttgagagagccagttagagactgaattgggagggagggagggagcaagctagcaaatgaatgatgtgggcttgaggaaagtactgccagtttgtatcggaggggtgctgactgagaaccccaacagaaggactgatgaaggcctgccccattggaattggcagctacggattgagtaacatcagtttgcaagattttctgagtttattcagtaataagccacagacatttccctagagagaggaaggttacttggtgtgtgcggtagaaggattgagttacaagagaattaagaattttggtgaaggagtggattaggttgtcaacatagagaaaatgtgttgtcaaaggccaggcgcggtggctcgcgcctgtaatcccagcactttgggaggccgaggtgggccgagcgtgaggtcaggagattgagaccatcctggctaacaaggagaaaccccgtctctacgaaaaatacataaccttagctgggcatggtggcacgtacctgtagtcccagctacttaggaggctgaggcaggagaatcgcttgaacctggggaggcagagtgtgcagtgagctgagactgtgccactgcactctagcctaggcgacagagcgagactctgtctcaaaaaaaaaaaaaaaaaaaaaagaggaaaagaaaagaaaatgtgttgtcaagggcctggagatctctgaaatacaaaagcaggtggagtgtgagtgcagagaggcatgaaagggatgggaagatgtgagcttgtggtcagcaaatagcttcctagaggtcaagagttctaacgtggaacagctctatgtggtaacgatgcccaggctgtgggtgtaggggactgaaatgcaggggaggcaaaggtcactggagttgaagtcaagaagtagtactacagttcccggcttgtggtttggttttccacactggtggtcaaggtacccaggatagtggcagaatcaagggagagaaagactgaacaggtaaatttttttcttcagtaccaaacattttatgctgtttttgttgcattttcccaggggacagagaatgaggagtaactcagccaagaaagttggttttctgcaaagaaaggcagataaaatggtgccctttttcctacccaatcttacatgtatttcagaggatccacaccaggcattggtttccagcagtaaatttgcagcgataaatggcttccttctattaggtgttcccttagtttattcagactgctataacaaaataccttagactgaataatttatcaataatagagatttatttctcacagttgtagaggctgggaagtctaagattaaggcaccagcagattttcttgtctcgtaaggactggctctctgttgctgtgtcctcatggtagaagggcaaagcagatccctgcacaattctgtaaggtcaagcttgagagttggagccagtttaaaaaaagcaaacaaacaaacgaaaaaaacaactttttttttggcgggggcgggggggcttctcgctctgtcacccaggctggagtgcagtggcgcgatctcggctcactgcagcttctgcctcctgggtttaagcgattctcctgcctcagcctcccaggtagcttggattataggtgcctgccaccacgcccagctaatttttgtatttttagtagagacgggtctaaccatgttggccaagctggtcttgaactcttgacctcaagtgatccgcccgcctcagcctcccaaagtgctgggattacaggcgtgagccaccgcgccctgccaaaaaaaacaacttttataatgtcgccagtcctctaatcccgttcatgagggtttgcccttatgacttagtcaccatcacctcctaaaggtctcacctcttaaactatcacattggcaactaagtttcagcaaatgaattttgggggacactttcacacatggcagactgtccattgctgctttaacagctgtcttgctcttcatcagaagctgagctttgagtgattcaaatatacattctttttttctctatctcctagtcctagtttgttacaaagaaggcttctctctcaggtttggaagaaataagttaaatttgatctgcccaaacccattagtacaagtgttcaacaataagaaaaggaattacatagaaggagtttagattggggggtgaatgaagtagggctcttggtttcttggtttcctttatttcttgtataaatcctttttttcttttttctttttttccttcaacttttaagttcaggggtacacatgcaggatgtgcaggtttgttacgtaggtaaacgtcccatggtggtttgctttacagatcatcccatcacctaggtattaagcccagcatccattagctgttctttctaatgctctccttcccgcaacccttcccctcccacaggccccagtgtgtgttgtttttcccctgtgtgagaacatgtggtgtttggttttctttttcttttcttttctatttctttctttccttcttttttgagatgcagtctttctctgtcacccaggctggagtgcagtggcagagctcggctcactgcaacctccatctcccgggttcaagcgattcttgtgcctcagcctcctgagtagctgggactacaggcacacaccaccacatccagctaatttttgtattttcagtagagacggggtttcgccatgttggccaggctggtattgaactcctgacctcaagtgatctgcctgtctcggtctcccaaagtgctgggattacaggcatgagccacctcgcctagccagtgtttaattttctcttcctgcattagtttgctggggataatggcttccaactccatccacatccctgcaaaggacatgatctcattcctttttatgggtgcataaatcctatttttctaagagttgctaatagataagcttttttctagggaagcaaatgtgggaaaccaaactttccaaagtgagaaataggataatagggagaggaaaatatgaacaaatgaatgagaagtgtgtggaaatggatcaaaacagatctgagtgataaggattggattgtggctgattgggtagctaattcactgtttagaaagtggaagtcatgtggcagtacacctggtttgttccccagattagcttgttagctgattagttttgtttacttctgctcaaactatcctagccagccacctcctaaatttataatttgaagacataaagcaaggacgtgaactgatttgttcaaatctgtatctaaactggagatactctgctgaaaatatttgcatagatttgaacaactgtacttacatgaaaaaatttaaggtatgttttagtaatattaagacattgaggccaggcacagtggctcacacctgtaatcccagcactttgggaggctgaggtgggcagatcacttgggcccaggagttcaagaccagcctgggcaacatggcatggtgaaacactgtatctacaaaaaatacaaaaattagctaggtatattgatgtgcacctgtagtcccagttactcaggaggctgaggtgggaagattgcttgaacccaggaggcagaggttgcagtgggataagatcatgccatagcacttcagcctgggtaacaagagtgaaaccctgcctcaaaaaaaaaaaaaagaaaaagaaaaaaaggtattgagtgttttacttagcatagcatagccttcaaatcagaaatggagtttgcatttaaaatgaatattatttttgcctattttggtttttccataggtacaataacttgcctgaaattctatggcaacaggcatttaatcagtggagcggaagatggactcatctgtatctgggatgcaaagaaatgggaatgcctgaagtcaattaaagctcacaagtgagtcgggctctttccctttggcattctcgatgtgccagtcaagttggggactaacttttggtttcattatagaggacaggtgaccttcctttctattcacccatctggcaagttggccctgtcggttggtacagataaaactttaaggtaagtcattaatgctcaagagcatttatctaaggtgtgtgttttactacagctctccaccatctaaaaatactgttatacaagggaaaggtcaaaagctggtgaaccttttcatagtggttcatagtggtagaatgaaaatgacaagctctgttttctttcttttttttttgagacagagtctcgctctgtctccctgctctgtcgcccaggctggagtgcggcggcgtgatcttggctcactgcaagctccgcctcccaggttcatgccattctcctgcctcagcctcccaagtagctggaactacaggcgcccaccaccacgcccggctattttttgtatttttagtagagacggggtttcaccgtgttagccaggatggtcttgatctcctgacctcatgatccgcccgcctcagcctccgaaagtgctgggattacaggcgtgagccaccacgcccagccaacaagctccgttttcaaacatgcaattatgctgcagtcatcatagctgtgaattgaagattttagaaagggaaaccttttgaaaatacaatggatacgagatgttaaagggatatgggaatgaagcaagtcttaatcctgcctcataatatttcaaaatattgctgtaaggaagatagcaggtcttctaaatagccaatatttagtaaaatgtcacttaagtcttcattatgcttgttcttttacgcttagtaaaagttagttggtgatcacaccgtaagtgagcttcctgttttgcagaacgtggaatcttgtagaaggaagatcagcattcataaaaaatataaaacaaagtgagtatttttgtttgaaatgcaggttgagcattcctaatctggaaatctgaaatgctccaaaatctgaaactttttgagcactgatgtggtgcctcaagtagaaaattcaacaccttacctcatgatgggtcacagtcagaaccttgtttcatacacaaaattatttaaaatattgtgtaaaattaccttccggctaggtgtatatgaagcatagatgaatttcatgtttagacttgaaacatgagttgcatgggttttatcctcgagatatttcattgtatatatgcagatattccaaaatccaaaatcgttctggtcccaagcattttggataagggatactcaacctgtatattttacagtgacttaatggaatatgaatatagatatacatttttacatgtgtgtatgttacacatttatttccctgcatggtggtggttacctctgagcaaatgccttgggttactttcttttcccattttagactagattctttttgtggctctgccacctgcctttgatttttattttgtttcattttattttattttatattttttattttattttattttttgagatggagtctcgctctatcacccaggctggagtgcagtggcgctatctcagctccctacaacctctgccttctgagttcgttattctcctgcctcaccctcccaagcagctgggattacaggcgcgtgccaccatgcttggctaattttttgtattttttggtagagagatggggtttcaccatgtttgccaggctggtctcaaactcctggccttaagtgatccacccaccttggcctcccaaagtgctggcattacaggtgtgagccactgcacctggcccacctttgactttttgaacctagattattttctaaaaaacttgacttgtaaaatgtgttacgaagatgaaataggataatgaatttgaaaatgcacagtataaatatttgctatttttattactatgatcattttatgttttatttacaaaataaataaacttcgtttttttccacttacagatgctcacatagtagaatggtccccaagaggagagcagtatgtagttatcatacagaataaaatagacatctatcagcttgacactgcatccattagtggcaccatcacaaatgaaaagagaatttcctctgttaaatttctttcagtaagtaatcagaaatcattgaccaaagtttgtggtgatggttggaactgttgatgacattctggatgttattactctttttcctctctcctaggagtctgtccttgcagtggctggagatgaagaagttataaggttttttgactgtgattcactagtgtgcctctgcgaatttaaagctcatgaaaacaggtatttttaccaatctttggtgtatatgtctagtcttaataaaaggtatatatgcagtagtttcataagccaggttatatgtttttattaacaactgcagaaataatcagacatatctacatgtacagtatatggtatctgtagtctaataaggtggtggaagatgttatcttcctggcatttaataatgcaaaagtgggccgggagcagtagctcacgcctgtaatcccaacactttgggaggctgaggcgggcggatcaggaggtcaagagatcaagaccatcctggccaacatggtgaaaccccgtctctactaaaaataaaaaaattggtgtggtggtgcacgctggtagtcccagttactcgagagggtgaggcaggagaatcacttgaaccctggaggcggaggttgcagtgagccaagatcgcaccactgcactccaacctggtgacagagtgagactctgtctcaaaaaaaataataataataatgcaaaagtggtgaaattgttttctggactgtcatttacacaaggtattttttaaatgtctgttagacttggagcctgaaatcaagcatatttgaacaaacaaaagactaaacaatcttgagctttgttcccatctacttttgtccttttacataagtccccttgcctacttcttccccctttccatgtgattttttttcctgcaggagaagtgaattgacgttattgagttcctgttttgtgccagcttttattaccttttaatgctttctctatttctagggggtagatagtctcaaagtaagtagttaagtggttggccaatattaccccaatagtggagctgagagctgaacccggttttatctgactcttatatccctgctttctccagtaattttgaaaaaggtgatctaatatacagagttagattttgatgtgatccatttgcatgttctatgtctcaaatgagtcttaattcttatttcttaaacagtggttaagttttaagaaatccatacttagagtactgcagtcagtagtataaaggccttactcttctcctatattgggaagtgaatatatttttcaaagtcgcccattccagatgtactaataacacttaagatatttggccattcattcatttaacaagtattcattgagcatcattatgaaatactacacgaagtatttaatgatgaacagaaaagacaggagcttgtgctctcatggctcttacattataaggaggcaatagattataagcaagcagatcattataacaggatggaaatagaaaagtagagtgattaaagattaacaagggtaattggtttagataggatgatgagggaagaagatgtgagaccttaagaatgaaaaaggagttagttttaaaaagagagaggcacaggtgcaaagaccctgagggagaacagagcttggtgtattttaggagcagatagaagacctgtgtgactaggtgagaatgagcaaggagaagacggtggaagccaatcggtgcctgtaatcatcataatttttcttactatggaaaaatttaaaagcatttagactggtttaaggtgctaactctttaagacccaccatcagctttagcaactgtcactgtgtggccagttttgcttcatctatatgcccagccacttcttcctctcccatcttattttaaagtagatcccagttttgtagggttttaagcctgcaagttacatgatttgatttacatttttaaaaatttctggccaggtgcagtggctcatgcctgtaatcctggcactttgggaggctgaggtaggcagatcacaaggtcaggagtttgagaccagcctgaccaacatggtgaaaccccgtctctactaaaaatacaaaaattagccaggtatggtggcgcacgcctgtaatcccagctactcgggaggctgaggcaggagaatcgtttgaacccaggaggcggaggttgtggttagctgagatagccgagatcccaccaccgcactccagcctgggcgatagagcaaggctccatctcaaaaaaaaaaaaaagaaaaagaaagaaaagaaaattgttaaggggcaaaaaagaagcagaaaggccaatcaggctacttctgtgatccagaggaaaaatgagagtggcttagactaacagtggtgggactggagatgagggaaatggatgtgtgggagaggcctggattcatcgtttctgttgtcttttctctccttactgaacttggagtttcttgaggtgatgggctttgttttactcatctttagttcctttgtgataacctgattatttatagttatctgttttcttttcaacttttccttcagatatggttggcagtggattttatcttgttttttgggcctggatatatctcattaatgggaatgcgaagcatagctatattttaaggcaccattcattgagcagtttggaaatacttgaaacattgagaaagcactagtctttgtgtgtaattttataacaatattagactatttggaggaaaagatcttttatggtgttaatatttctatcctagggtaaaggacatgttcagttttgaaattccagagcatcatgttattgtttcagcatcgagtgatggtttcatcaaaatgtggaagcttaagcaggataaggtcagtgcttcaacacaatctaaatgtactttaatacaagtcttgctcataagtgaggtggaatttttttaagggtcataagacataggtctttaaactttttaaatctcttccaggcatgattgatattaatggttttaaaattagggttcccagggagctgccttgatggttgtcatttctgagtgtgagctggtgggatcccagaactcgcgctgctctttttagtcagagaagctctactttcctctcttgaatattggagttctctggaagctcttaggtaaaaatactgccattgctaaaagtaatttggaagctcctgatcaattacaaaattaacaaaccatttaaaccagacactttggaaaattgaattccctcctgtagtctccttacagtctctcttggtttattctttgttctctcataaacacattctgtgaatatggtttgttgaatgtctctttccaaggttctttgttcagccctggaaataagacctgattcctttctttagaattttctttttttttttttttttttaagtatacaattcagtgatttaatttagcatgttcatggagttgtacaatcataatcgtaattaattttagaatattttcatcacaccaaagagaagctccatacccattagcagtcaccccccatcctctcctttccccccactgccagtccctggtaactagtaatctgttttttgtttttatggatttgcctattctggacatttcatatatggaatcacacaacgtttggccttttgtgacgggcgtttttcacttcgtgtatgtttctaaggttcatcatgttatagcatatgttagtacttcactactttttatgactgaatactacgccgttgtgtggatataccactttttatgtatccattcatcaggtgatagacatttggattgtttccaccttttggatgttatgaatagtgcttctgtgaacattcatatgcaaatttttgtgtggatatatgtttttttttctttttttttatactttaagttttagggtgcatgtgtacaacgtgcaggttagttatatatgtatacatgtgctatgttggtgtgctgcacccattaacttcgtcatttaacattaggtgtatctcctgatgctattcctccccctgccccccaccccacaacaggccctggtgtgtgatgttccccttcctgtgtctgtgtgttctcattgttcaattcccacctatgagtgagaacatgcaaaattggctctgtgaataacagtcaaactaatcatgagtgaagattatatgttgcttctgaatatcatattttgtactcaagaaaatacaggaagttttaaattaaggtaacttgattatggaaaaagaaattattgaaaatgcacattatgaatgtttgtttcttctgtttagaaagttcccccatctttactctgtgaaataaacactaatgccaggctgacgtgtcttggagtgtggctagacaaagtggcagacatgaaagaaagccttcctccagctgcagagccttctcctggtaatcgaatttgattgttttgaaattttgaataatctattatctcttaaattgtagaagtggaggagatccagataatttcactttattgacagcttgtgtttatttcattcaaaggggaaaacagtctttttttaaaagcactctcttttgtgttttagtaagtaaagaacagtccaaaattggcaaaaaggagcctggtgacacagtgcacaaagaagaaaagcggtcaaaacctaacacaaagaaacgcggtttaacaggtgacagtaagaaagcaacaaaagaaagtggcctgatatcaaccaagaagaggaaaatggtagaaatgttggaaaagaagaggaaaaagaagaaaataaaaacaatgcagtgaatcacagatgtctcctgaaagaactcttttagatgaaatcattctactcaaatgtaccttaattttttttttttccctgagtaaaagcaagaaatttcttcctttggaaaaaatatatatattaaaaaaccacttttagatggttttttttaaaaaaaaaaaaaaaactggtaaaattacttttggcagacagtgttttatgaattatgtatcatgttgatatataatatgttaatgtgtcatgtaatttttactttgtacaaagcaaataaagatctttctcaa

SEQ ID NO: 379 - DNA, 32744 bp, Homo sapiens
  source 1..32744: mol_type = other DNA
cattcccgctctccttcccgaaccgccattttgaaaatcttgttgattctggggagccgagcgcgcggcgcgagcgtcacgccagacagcggcccgcgcgccttctcctcggcgtcggccgccgccgcctcccagaacctcctcgtgccctcgcgtgccaggcccgcggcggccgaaatccgcggtaagggctgcttcgggacgccggaggcccggtcgcccctgccgcggccgacgggggagggacgcggccatttggacggcggcctggggcgggggaggggacgtggagggccggcagctcgggccgggccgggaacagcgcaggccgggcgggcgcgcgcgcacgcggggcagcgggcgcggtttcccgcctcgggaatccctggacggcggcggcggagcgggagggaagccgcccctggggactgagcgctgcggtcccggctatgggaggaggcaactttcagggcaggtgtcccgcgggaagggtagcatcattcagggtggccgcccggtcctgcctgcgggagtaggaggaccgagacgtccggctttcttcccgcatgcaggttcacagcatgtccgcctcggcccctgctgcggagggggagggaacccccacccagcccgcgtccgagaaagaacccgaaatgcccggtcccagagaggagagcgaggaggaagaggacgaggacgacgaggaggaggaggaggaggaaaaaggtggggggagtcgcatcccaactgatgaatttttcagaccgaagtttttttgtatttttcacccaggaaacagttttcttgctcttttggtgtttagaggcgtgaagtcggagtgattttcagcgagaatgtgtgcacaatttatctgcttttgttttgagcgatggcgtagaattgactttgtgtattccggtttttaaagtatttgttagcgtggtagagatgtattggagtgcagccgacttctcgtccgctctaaacgttcgttaacatttcatcatttgacgggaagtttgtaggtcttggatttgatttttttttttacctgtgtgtgtgcacctttgaagttgctaagtggatgttctaattttgtccttttcattacacatcttttgccttttgaagttattgtaaggtcttggtgcagcccgttaagactgaagttataaggctagacccggaagtatttgaatactttcgaatatttttacatttaccaaaaagtttccctccctggcaaacagcggtgaaagctgttgctacttgagaaagtagttaaaaatgaagaaagtgaactctgaaagaaagttaaatgtgagcccagcactgtctcggtttcgaacctgtgtctgttttaagggagggcgatatgagccctgatttgactggaggtgtgaaacggaaacttgactgaatagaggagtgtgctgcggcagtttatccaggatgcatgcagtgtctgtttcaggtgtacccgcttcttgacatgtttccaaacatttaaaaatccgagtcgcatctcttagcattctttgatattagcttagtctgcggttatttcgtatatgtttacgactcagccacacttgggaagaggttgaagcgctcttcctaaacccggattttttttaagcctcaaccagcctgtggtcacaatctgggttaagattacaaggtgtgccttttgtttgtttaaagtggtatgtgccctaagaagggcatatttaagtaaagcatggctttttaaatataagttttcacataaactattgcttaacaacatgttattttaaaattatttttaatacaacaacaaaattggctgcactatctcgctgctagccaaagaggctctgcactttttctccaattttttgtttgtattttggtcttctggtgggggcagggttgagatgccaaagaaatggtgaattttcttcatgtcaggaaaaaattagagaagtcatgtaaatatactgtaagtggccaacacagtaatgcttggggaagagttggtagttgaaagaatcccatgttttgttctagacaaattatttttaaaaacatgatgttgtagaaattttatcccctaatagttttattgtagctgtgatttattattctttttactaatttgaggtgtttgtgggacaagtagaattgtgaaagtttttattttacttaaccctgaatatttaactttagaactgaggcatcatggaagccagacagtgaaatactttctgtattaggcttttttttttttttgcgttactataaagaaacacttgaggcagggtagtttataaagaaaataggttttattgattcgtggttctgcagacagtacaagaagcatggcgccagtatttgcttctggtgaaagcctcaggaaacttccaatcatggcagaagacaaagggggagcaggcatttcatttgggagtgggagcaagttgtagagggaggtgccatgctcttttaaacaaatcttgagagaactcactcaccaccacggattaccatgctaagccgttcatgagggatctgcccccatgatttaatcaccttaccaggcctcacctccagcattgcaaatcacttttcaacacgaaatttggagggggcaaacatccaaagcatatcattgcacccccggtcccccaactctcatatgtttctcacatttcaagattcagttgtgccttcgcagtagtcccccaaagtccggtcttgtttcagcattaacacagaagtcccaaatctgtaagtccagagtttcatctgaagatgagtttcttccacctatgagcctgtgagatcaaaaacaagttatttactcccaagatacagtgatggtacagacattgggtaaaattcccattccaaaagggagaaaggccaaaagaaaggtgcaataggccccacacagtctggtttggtttttgtttggtttttgtttttctgtgtttgtttgtttgtttgttttttgaaacggagtttcgctctcgttgcccaggctggagtgcagtggcctgacctcggctaaccgcaacctctgcctcctggttcaagggattctactgcctcagcctctcgagtagctgggattacaggcatatgccaccacagctggctgattttgtatttttaatagagacaaggtttctccatgttggtcaggctggtctcaaactcccgacctcaggtgatccgcccgtctcagcctcccagagttttaggattacagacgtaagccactgcgcccggcctacaagtctgaatcctagcagggcagtctttaaatcttaaagctccaaaattatctccttttactgcatgtctggcatccagagcacgctggtgcaaggggtgaggggtcccaaggctttgggcagctcaggatgcaagctgcttgtggctctaccatgctggagtttggaggtggcagcccccttcccacagctccactagccaatagagccttggtggtgaatctaggggtccaccccccatttcccctttccactccacactgccctagtagaggttttctttcttttttttttttttttttggagacaaggtctcacttgtcacccaggctggagtgcagtaacatgatctcagctcactgcaaactctgcctcccaggctcaagcaatcctctcacctcaggaaccacaggcatgcgccaccatgcccgggtactttctgtattttttgtagaggcagggttttaccatgttgcccaggctggtctcagactccttagctcaagtgacctgcccgtctctgcctcccaaagggcctggattacaggaatgagccaccacgcctggccctgagtagcagttttctgtgagagttccacccctgcaggaggcttctgcccaggcacccaggctttctcatatatcctctgaagtctgtcctaagaaaggggtcagattagccaaaattggcagtgattttggggaaaagggaagtgagagaaatgactagtaaaagatgactcttaggtttctgtctttggcaggtgggtggatggtattaatgttttttgaaaaaaattcacaaagtgagcaagtttggagatgattatgatttttcttttgaatattttgagtttaggtgcctgtaggacatgaattgtagctgtccagatgacagacaggcatatactgttggctctccatatctgtgggttcctcatctgtggattcaatcaaccacaaattggtaaaaatggatggttgcatctgtactgaacatgtacagatttttttattattcctaaacaatacagtataacaactatttacatatcagttaagttgtattagtcattatgagtaatctacagatgatataaagtatatgggaagatggtcataggttacatgtaactactacaccatttttttaaaaaataagggacttgagcatccatggattttggcatctgaggggcgtcctggaaccaatccctcacagatactgaggcaatattagttaatatgaatctcagatgaaagttgtggcttggagattgactgggaagtcattagcttgtagttagtaatcagagacaagcaaatagtttaaatcactaagttgatgaagttgagtgatagtaggggttgttttagtgtgtttggtcttcattctgtacaacatggccagaatatacctgttgatagccctttctcctgaagtattctttctgtgcgaatccttacattactaaatctaagctgtctttaaaagccagcacacgtgctttgttcctttttctctagtcccaaaataatcaattcctcctcagtgcacagcaatttatttgtgtatctttcttaagatgttttgttatcttttatattggcgtatatttatgtctcatttctttagtagcatctttttcaaaagatacgcagtttttatcatccatttatcccctcttagtattgagtgcagctgcacaacacaggcattaaataaatggcagaacctcgagcagtatatagtattcttttatctgactttatttcattcaaaaaatgattttattttagataaatggagcttaatgttttgaattttgaagtatatgctacctgttttctagatttttttttttttttttttttttttttttttttttttttgagacggagtcttgctgtgtcgcccaggctgaggtgcagtggtgcgatctcggctcactgcaagctccgcctcctgggttcatgcctttctcctgcctcagcctcccaagtagctgggactacaggcaccagccaccacacctggctaattttttgtattttttagtagagatggggtttcaccacgttagccaggatggtcttgatctcctgactgagttagccaggatggtctcgatctcctgaccgagttagccgggatggtcttgatctcctgacctcgttatccgcccgcctcagcctcccaaagtgctgggattacaggcatgagccaccgcgcctcaccgtagatttttgtgactaaacaatttaactttgagtgacttatggtcatcattaggaatgttattcataaactacaaagtaatgctctcccagttgattgcattaaatgtaaacttggagagttttatcctatccacgtacttcaggctgttctgcctggaagtctttatttgtgtttcttttgtcagtttactaaattgttattgttctctatatatcttttgaagttcttaatctcccagtctaaatttgattattcctgaagtacagcaaactgaatctcaattattaaatagaattatgtccaaagattaaacagagctagatttttttcacaaacgaagtgactggactgtaatggcaataattttagttggataaaaattagtttgctttctaatttttttttttaactgagtccctgtgagtgccaggtgagtaaaatgttactctgaaaaaattttcatggtgctctattaattaatcaagtgttttcctcttttatgtcatttgctttccaaaaccatgctcagaagaagaataaagtattaggttttggggactttgttctacatgtgtatctaataaagttaatacaatgtttaagctttttgttaattaagaaatactaaattaatttctagaaaagagtctcatcgtggaaggcaagagggaaaagaaaaaagtagagaggttgacaatgcaagtctcttccttacagagagagccatttacaattgcacaaggtaagtttattctagcttcctttcattttgtggtgaaagtgcctaaatttgtgaaaatgatggtttgtagcttagtatcagcaaggtagtgttttatacttttggtataattttatttaatttgctctgtaagagcagagttacatgtaaattatgctgtgaaaataattctcattaaattaactttgtaaatgtattagtaagccataggtatttaattgtgatttttttttttccccaggaaaggggcagaaactttgtgaaattgagaggatacatttttttctaagtaagaagaaaaccgatgaacttagaaatctacacaaactgctttacaacaggccaggcactgtaagacctttttacactttaaacctacttgtatattacttcacaatggaatcaatttctgtaaatgttagtgatccactagttcaatttccacactttatgactgagcagactgaggtatatacttattaaatgatttatcacaggaaacacagctggatattagcacttggattataatatccagggctctgtcttcttttttctttttctttttcttttttttttctttcttttaagacacggtctcactttgtcacccaggctggagtacagtgtgcaatacatggctcactgcagcctcaacctcctgggctcaagtgttcctcccgcttaagcctcccaagtagctgggaccacaggtgcatgccaccatactgtgtctggctaattgttttactttttgtagaggcagggttttgccatgtgcccaggctggtcttgaactcctgagctcaagtggtcctcccaccttggcctcccaaagtgttgggattacaggtgtgagccagtatgcccagctctagggctctttctcctgtagtagtttttattccaaactgaaatttcaaattacgaaatccaaattgtgatgaaaggttttagtgacctttaaatgtattgaaagaaattcatgtttttggattttctcgacattcagaataagtgaatgtcggtatgatttgtatgagatcatacatatgatctcatttgtatctcatacaaataagaggcaaaatcatttgtatctcatacaaatctcatacaaagtgaatttggtgtaattgtatctcatttttagcaaatacctgataaattggatgatagttctttgctaaaggattgttattatactgtacatatgacttagtatattatataatcgagggaactgctttaggttgtacgtgggcaaagtaaagttgggtgttagaatgtctgaagtagaatagaatgtctggtgcatgacataatttattttcagtgagtctgttaatctcatttaatccttaaaccaatttaatttacacaagtcccataactagtgaacggtattagctttttgtggtactcgctattctttactttgaaagaataaagtccttcttgatttggaaaagaagaattactagtaactttattacttatgaaaaggatatatttttaaatagtaactttccacatcccctggtactgtcaggtaacttttggttgtggtaaaaactccccagtgaaaatttgttcaaattgttcttttcagagacttaagtttgtaggatttttataatgttaatatgttaatgacaaatacatttttcagttttgaataagaaatgttgaatattgaacccatattgaattggttgactgttcagccagtattgtaacttacagacaggtatgaaaataaagatgttgactttgaattggctttgaatttattcttgtgtacattactgggtaataaataccattaataataaggaacattttcaggtgtcctcattaaagaagaatgtgggtcagttcagtggctttccatttgaaaaaggaagtgtccaatataaaaagaaggaagaaatgttgaaaaagtaagttatttttataaatactgtattttgatcaatatgctttaagtttattttttaatgttaaatcacattcgggccaggcacagtggctcacacctgtaatcccagcactttgggaggctgaggcgggcgtatcacctgaggtcaggagtttgagaccagcctgaccaacatggagaaaccccgtctccactaaagatacaaaattagccggctgtggtggcgcatgcctgtaatcccagctacttgggaggctgaggcaggagaatcgcttgaacctgggaggtggaggttgcggtgagccaagattgggccattgcactccagcctgggcaacaagagcgaaactgtctcaaaaaaaaaaaaagaaaaaagattcatagaagcattggccacttttttaaatgtatgtaactgagccaatttggttggctttccctttatattgtggagaacatatgtaagctttcctatattaacaccttggtttcttccattttctgtttcagatttagaaatgccatgttaaagagcatctgtgaggttcttgatttggagagatcaggtgtaaatagtgaactagtgaagaggatcttgaatttcttaatgcatccaaagccttctggcaaagtgaggatcaatttttatttttttcataaatcagttattcatagcctctttatatgaaacaaaaattgattaataacagcattgctgtcagtattcgttcatatctacattcaaagactataccttctgttgacgtatctgcagtaatttcctgatagaaataatatagatgccataggggtatgttgcttcggaaaatcagatacaagggatataaggttaagaatagtgaattaatgtcagaagggacagaaagtactagtagtcagggttaggtatctagaagacactggaagaataggaagaggttgggctgaggatgaggtgcaaggctggagggaaggggtgcaacctgtaatcaagtgaagacaaaatagggagtatattagaactggatgttttcctagatcctggaataaagtattaaaaagtgacatttaaaagctaactcttacaagtttcctatattgggtttccagaatctgcagcagagcccaggagccagacagggaagtaaaatggccttacagttttctcactcttcctaaaagctagtaggtttgccctaattatttaatggtaacgaatgacataggtgacttaaaatgtctgttgaagtgttacatgaccttgcctttttagtgtgatttaggtctgtcagcaaatgtttttatattcttccccatcttgacaggaaaggaagtgtgagagatctagcaggcctaggagttcaggggaatgccatctctgatgggagatggcattaatcaaaaccagaaaatagctctaggacttcgttttcgtccgcccttggtccttattaccattagctgcacgaggacagataaacagcagttaaagtgtaaacttttgttatacaactacaaacgcaaggggtatgatgatttttggtgttttaaattggcttgtttaaagacaaaatacttcttattttctaacttttactatagctatacttgtactttttaaggatttagtgtgaggcaaggtgatcactatttcctcagaagcaatttactaggttgttatgacagatatttttatatttatctttttctcagtggttttccaatttattggtttcaggatactgttgccctcttaaaaaattagtgaggaccccaagagctttttttaatatgagttattttgatcttcactgtatttgacattagaactgaaaaatttttattttaaaatgttaaaaataatattttctaggaaaaataacttttcaaaagaatgaaagagtggcattttatgtttttgtacatctgtttaatgtctggcttaagagaaaacagcttgattaccatttgcttctgcattcagtctttttgtgttgttgttgttgttactgttgttgttactgttgttttgagacagattctcactctgttgcccaggctagagtgcagtggcacaatctctgctcactgcaaccactgtctcccaggttcaagcaattcttctgcctcagtctctacagtagctgggattataggcgtgtgccaccatacctggctaatttttgtctttttaatagagacggggttttgccatgttggccaggctggtctcgaactcctgacctcaggtgatctgaccgcctcggcctcccagagtgctgggattacaggcgtgagctaccgtgcctggccgcattcagtcttttgcaatgtattgttttgtttaaaatctatgaagggcctgatgcagtagcttatgcctgtaatccctgccctttgggaggccgaggcaggtggatcacttgagctcaggagttcaagaccagcctgggtgacagagtgagactgtctcaagaagaaattagccaggcgctgaggcacgctcgtgtaatcccagccacttgggaggctgaggtggaagcctgaactcaggaggtcagtgctgcagtgagctattttcatgccactgcattccatcctaggtgacagaatgagatcctctctcaaaataataagtatatgaagaaaaccgagcctcacataaaaagaatatttttaaagtctttttagataattgtgtatattctctttttgataccatacaataccaaaactctacataagttgtagtttcctaaagattagttgtaatgtttaatgtaggtctgaaaccaggttaattaacttgggtcttgtatgtatagttttgtaacatgcatttaccgcttgtaaatattggttccctgaattatgtcttccaaatgttgacgttttattgaacactgtcattaaatcatgctcattaatataaatatcatctcatcagaaaaattacttaggccttggtaaactatcaagttcacagtagtagatgtgaattttccagaattctagttcccacttgaaatcataacgtttatcattggcgataaatgctctcagttttccttgaagtgacaagctcaccttgttcatgtttgaaaacatctctatcaaatacctaagtctgagttagccatatttgttcttttaaaaagtggtgttctctgggaggtgaagcttgcagtaagccgagatcgtgctgctgcactccagcctgggcgacagagcgagactgtctcaaaaaaaaaaaaaaaatgtggggttctatgaaaaaggagcttggagcgtgtttagctcacaactcagatacacaaatgcttttccttcagaaaaccattgaacttcagttgtagccatatttatgtatatcttccattttgtcacagatattagaaagacatgtacttgagagttaacacagtatttattgttttatcaaggacattattaagtgaaaccatttgccttgtttgtttctgctggtgtgtggttgtgaggaatacagtgactaatatatgttgcttccttgattagtactaaggtgccatcaattttacccacctttgctttcctttgcttttgcaattagtacaaatgtcaacacagtgaaaagagcagataaatagtgttgctattattatgaaaatagtttctacctcggagactccgaaaaaggtctcaggaaaccccaaagtccttgaaccacactgtgagaatctgttttttcttgtcatatagaatcttaactcttatgtcagtttttcatatgtgattctgtgatgattactccttaatctgatagtatcgagctcaggctattttcttttttttttttttttttttttttttggagacagcgttttactctgttgcctagactggagtgttgtggtacaatcatggctcaatgcaaccttgacctcctgggctcaggtgatcctctcacctcagccacccaagtaactgggactataggtgtatgctaccatgtgtggctaaattttacattttcttagagacaagggctcactatattgtccaagatggtcacaaactcctgagctcatgtgatcctctcaccttggcctcccaaagtgttgggattacaggcatgagccactatgtctggcctagagctattttctatgctacaagaagtttcctttttctcctctttaacaatttctcaatggtttaatcaacacaacattaatcattgattgctttcctatccttctattgtactttaccttattttatttgttaatcagattttgtttccaaaaagagataatgctgttgacactggattttgattaatagatttaactatttttggagtagtataggaaaactctaaggcatttgtatattactactttttggattttggttttaaaactcctcgtttacttttgggaattgcatttttttttttattggctgcttgaataacttaacatcttttcactttcctggatagatttatccagaacctgtttcagtcctcatactaataattcgatatacagattacatccttgctacctgtgtctggtttctgagctgagattgtgagggatattatgtttttctaatacatttgagacctggagatcatgtaacaagtagtaagagcttggacagtgagagttaccttttctccaaacggtgctatcaaagaatttatccacatggattaaggttctgataatagttgttaatggtagtatctcacatagcaaggatatgtgtatgcattcacgatttcttatagagaatcttctctgagaaatgtctttgatccaccaacttcaagttcctggagtgacctaattttgctgtttcctagtgtgcctttagaagggtacgttgttggagcaatctaggttatcctgtggtttctttgcagagagctcaagagtaccatattatacaaagcagccactttttcttaatttttgtgtaggtgacagtgacccctagactggaggttcctgggaggtaaaggacctgtcgttctagtctctgcaagaaaaatattgcctaaagttatcacaaacatttacacaattggataccttaaggttatgttatggaattttaccttaatgtttctgcttattgcagaaaataaagtaacaaaggtagaaataaaagaatataaaagatgctcaatcccagaaataaatattaattctgtaatgcgcattttaacattcttgatgttaggtaattttatggttttcaattttagaatttagcaaaacttccttgagaaagcacttaaaaattaaatttattgtttactgtaatcaactcattttcatcaggtgatctctgcttttaatatacatggtttaattgattatcagaataatagcagcatattcttagtttcataattaacatacttatcatttattgtatacttataggcatcagtgataatatgagcctgacattgttgaaagtagaggccagaagtaatgaatataaaccgtatagttcattcataaattcaggatgtataattggtaataaagttatacattttttttatgggccaggcgtggtggctcatgcctgtatcccaggactttgggaggccagggtgggtggatcacttgaggtcaggagtttgagaccagcctggccaacatggtgaaacactgtctctactaaaaatacaaaaattagctgggcgtgatggtgcatacttgtaatcccagctactgcacaacagaatgagactctgtctcaaaaaaaaaaaaaaaaaaaaaaaaaaaaggtttttctcccattccttcgattggagtgttgggccttctaaagcaaggagcttctttggcagtgacagttttttgttttttgctttttgtgtttttttgagacggagtctcacactgttgcccaggctggactgcagtggcgcgatctcggctcactgcaaactctgcctcctgggttcacgcctttctcctgcctcagcctcccgagtagctggggctacaggcgcccgccaccacgcccggctaattttttgtatttttagtagagacggggtttcaccgtgttagccaggatggtctcgatctcctgacctcatgatctgcccgcctcggcgtcccaaagtgctgggttggcagtgacagttttaatgcttgtagggatgaaataaattacaaatctaacttaaaatattatcatgacaaagtattaacagccgttggagcttaacataatgtgtcttgagcttctagtcccatgtcagaacctagaatacatatttctctacaattgagaagggtcttgctaggtgtttagaacacaaatggtattagtaacacagttttaggttaacctgacacggttaaagattattctctgcaaagctgctgggcttgtaaatacaatttcttgagagaggaataagaaattgagttgataagttttcaagaagagaattgattgaaatattatacctcattggtgttatctttataaatttttatgcagccattgccgaaatctaaaaaaacttgtagcaaaggcagtaaaaaggaacggaacagttctggaatggcaaggaaggctaagcgaaccaaatgtcctgaaattctgtcagatgaatctagtagtgatgaagatgaaaagaaaaacaaggaagagtcttcagatgatgaagataaagaaagtgaagaggaggtaaaatattttactatatttttaaatcatttctttccatggggagagttaaatatttctgctataaggtacagccagaaaacacttccttattggttgtttttaattctgaagatgcagaaatgattaagtatgaacccatttcttttccttaaagagcttttagtttcattaccatgtcagagtatgagtcagaaaagagtgaggttggtgtggactggatttgaagtgggccttgagctggacgttgaagactagagtagataaatgggaagggaagcggaagtggtgcatatcctgaataggaccacataggagcagattcttcgaggatttttttcgtaatatattgatactttataattgacttggatcattttattttacggaaaaagcaagggacttaagggcctttttccccccctcaacctttaggggactatgtagtgagaataaacagcatttgaagtttatataatgagtggataaattttgtattacctgtcattttcttttatttgggagtatttgtaaaagttgagactcttagtttccaaagtgaaacttcatgaagaagagaactgctgaagcagttaaataagagggttaacctcttcagtcaggtagatcatggagagtgggtacaggagatgggtttctattattgttaatgatgttttggtagactgtattttaactttgatgttttcgttcaaaggttggaacttgctctatagattgggtaatcaaccttgccttatttagggacttggataatgtcaacttgacattttggaccagatgattcttaattgtgggtgatattcccaagctccccttgtgacaaccaaaaatgttcttcagacattgtcaaatgtccctggggcgagacaaggagggaatcatctccactgaattagaaggaataaagatatagtgaactctggtattatatgatatgtgtgggtgtttagtatgtatgtttgtcttgagttatttacaattcatgcttgttttagcgtcaaattttataaagacttctataaagctaagtatgaaatgcttcatcatttaagaaagagggttacgaatctagtaggtgcttcataaatatcttaatatatatttggcacaaaggaaaataagtaatctgagcattaaggtctttatggattggatatccgggaggaaaacatgtttgtttgtatgtatatatataacagtggaaatttttaaactgatagtatcttcattcaggaaatatttggtgtctactgtgtgccattcagattcctaaactctctttatgggcagagttaaagcacgaaacattatcatagaatataaatgtctaattttttcatagagacgttagcatgggctctggaaactgagttcaaatctgacctctatattggattattactgtattagtataagcaagttatttaaactatacctcagtttcccatctgtaaaatggggagtgataatagtattagcctcatagggtcatattaaaggattttatttaaaatacttagagcggtgcctggtgcatatagtatgtaagtattagttgctattattattagaattaaaatgatgttttatgacaagtaaaacttctaaatcgaatcttcttgtcattactaggtgcaggttaaaaagtgagggcaggccgggcatggtgacccatgcctgtaatcccagcactttgggaggccgaggtgggtggatcacctgaggtcaggagttcgagaccagcctcaccaacatggtgaaaccctgcctctactaaaaatacaaaattagctgggcgtggtggtgcatgccgataatcccagctactcgggaaggctgaggcaggagaattgcttgaaccggggaggcagaggttgcagtgagctgagatcgcaccattgttctccagcctgagcaacgagcgaaactccgtctcaaaaaaaaaaaacgagagcattttatactcacttttaaaattcgctttctaaattgttgtcccatagttctgtagaggtagttgaacttggtgtatgcagatgatacctgatttatacccatattggttccaggataataatcacaagtggaaccatctcactataaatcaaacctttaccttctgtagtgccctaatctagggtctgtgactagaaacccaggtcaattgatgaaaatccatgggagaagaaaatgtaaaaatgctttcagacattaggtgtatgaaatcacacaatataaaagctatatcatattttattagagggatttttttgctacctttgctagtacttgacagattttataaaatgtaaaataaaatttggactgagaaattgtttcccccccttttttttccctgataaatgtctctccaacaagcattgttgctttaaatttagcactgtcttcagctttttattgctgattcagtttctgtgaaaggcctttgaaaggtaagttctggcaggaggaacagtgtatctgtggcaactttgtttttccttattccattttatgaagactcagttctaaatgtcagccatgttaggaacttcataaatggagctatttttggtcattactatggaaggacctcttttctaagaagccataaagaaaagttgcaagttagtcacagaagttttggattgcctgtagatttctttatgataggaaattagtgagttaatattctgtttattttctgacacagatttttctttgataaataaaagactcttattcattaagatcagcttcttgttctgtttttcttggagtaaataactgtgaatttgggtagattgattttactttgttcagtttcctctgtaaaatgaggattttgaactgtatagtcaaatatactctattcattgttgaagtaagaaatcttatgcaagccgagtaagtttatagttctcctttggctaattatatgaggttaaattgtatttattttcctcctagtttcatgtttaactttagatgtgtagaagactaaggtgtttataagtaaattcagtgttaagatgaaatcactgaaatccatatagttaattgaaatgacagttttacaaaagtaatttaaaagaaaatgtcagatttagcatattagctgataattgctaaagcacttgtttgaggttttctgtacctgtacctctacctctgtttttatgatatgcagtgagtgagtcacaatagttttgcaattcttttccttgtaattaaataaaagagtattctttgtgagagtaacttcagaaagaaatccctttataaaagagccattttgaatttccttattagcttgtctcttggacattggctttttagaacagtaaaaggagagcaattgggaaggaagtggtggatgattttctttttttcttttgatgagaaataggaaaataaacaggttattttctctaaattgattatgaaaatcagctggttcctatgtgggattagcttcttcagggcaggattgctaaaatgagtgtattagtcctttctcacgctgttaataaagacatacccaagactgagtaattttaaaggagtttagttgactcacagttccacatggctggggtggcctcacaatcatggtggaaggcgaatgaggagcaaagacccatcttacgcggcagcaagcaagagggtatgtatagggcaactcccttttataaaaccatcagatctggtgagactgtttcactgtcatgagaacagcatgagaaaaacccaccctcgtgattcagttacctcccactgggtccctcccacaacgtggggattattacaattcaaggtgagatttgggtggggacacagagccaaaccgtatcaatgagccgttgaggttaaaccacatttggtcataaaccacatttggtcatgctattcacaggtgttaaccttgaggcatagagaaattactgcagagtacagaaaaaagggggaaatagtacatattggagaaaacaattctaacagtcttttagactctttaaaagcatattttatttctttttcatcttatcctaatacctctgtcttcaatttttattttctagtgtttttatagcgcatacgtatctcgaaagtatgaaacaaactgtggagttttacgagtatttagaatttatctgaatgttgccatatgttatcaggaatgttttctgctgaaataattgtcagccttactaataatgttcgaaacaggagtttatttttctttcatgacaagaagcccacagacagggacattctagggccagtacagcagttcaagaaaggaattgaggatgtgggtactgtcctttcctgatctctcatctttagtatatggcaattaacttcatgatcacaaggtggttgttttacctttagacattgtattcatgttccagataaggaagagcaaaaggttttcttctagtgatgttttggcttttttccctgaatgggatgccttttaccagagatctccatatacatggcatcagccagcactttgttgtctgcccacctaactgcaagagaagctctgagatctaggtgtcagctttcctacctttataagaggaaggcagatcaaaagtgggtggttcagtgagccatcttacaatgtttgccaagtcagagaaactccattataatttttggtaaactatctatttggaccattcaagggattatctggtagtggtaaggtgaatgtgaaagttttgttagtcctttcacattgtgttttagaaaactaaactatctcttcctctcacacgttgatcagaggaattgcaaaatctgtataaaccatttaaacctttcgttggaaggcagaattgaataatcaccatactaaaacccatttaaacttgctttcataatcttctgtgaaatataactagacttgcacattctttcctcttggcattctgagttttctcagccaaattgttgaaagaatagtgtattttaagctaatttttattttgttcatctgttcacccagtacaacctttctgctgtgaggacagaattctggctctgtgacaggcgtcttttttggagaccctccttcaagagccctgctgcctataaatcataggtaagccttgctttcccaagattttttttgccttccttcaaaaagtgcttatgtcattcctctgattctgtaccttcatggttatcagagacagggagaatccccttcacgtttttgaaacttctgtattactgatcctttaaaaatttaggttatagtacattgtactatctgacattaatggcagctgttcatttttatttgttcccctttagaacatctgaaatagttgatggtcctgattgaaccactcagcatatagagaagtagcaaactcgaatctttaaatctcatgacaatttggaaatcagctttttctttattctttttttaaaaaaacttaacctaattttccccccattttgttaaaagactcagtcttgtctccacttaggttaaataacaagatgttaaccattgtgagtattttcaacattatttcctcaatgccatataatttttattataatcactaaagttttcaagatattttgaaagagacttaaaatgggggtcagtacttcacttatttttgagacagagtcgtacgtcttactctgttgcccaggctggagtacagtggtgagatcatggctcactgcagccttgaactccagggttcaagtgatcctgccaccaagtggctagcaatttttaaattttttgtagagagaggttcttgctctgttgcccactggcttttgatttctgaggtaaccactttttgattgctcaagtcagtgaattgggagtatgctaaatgctgttagggttacagaagatattttccaagcaaatgccatttgatacttagcattataggatttctaaagaaggaaaatcttcatgcctcttgaggaaaggctttgggtagaagtggaagtactaccaattcaagttgaccttgggaatggagaggaaagttgtacgtgtgaacaaagataaggaacagggaaggcagggtgcctttgactaactcgtggttagagttgtgtgcccagaagtagagcaatgagagatgaaactaaggtaatgtaggttgaacccatgctatagagaacccatgaagctgggcattgttgtgtgactaatatgtttggtggtaggttcattattctcactcattcaaaatgattatcttattctatacctgagcattttactaagtgggagaaaaaaaaaatgagacacgtcctctggtcttccaggaagtaccactcagtaagcatttattagcaactgcaaggaagaaactattcaaagtgtatataccatgtgctttcacatcttgcatctcatttagtcttgactccatgagaggtgaggtatgtctcctcatttttgtatttgaggttataataaatatataagaaaccttttttagtgctttctcttcacagtagtcacctcttacctgaacggagtacatttcaagacccccagtgtatgcctgaaactgcagatcatgccaagcccgattgctgtcatttgggacatgtttctgttcacgtttcccaccctcaaattatgcctttttcatcataactaagcacttatcctgcactgtggccataactttcgcagtttgaggtttgacagcagagccagcacaaagttcttttcccttcacaatttcacatatagaagatttgttcttactatagatcttagaaacctcaacatatgatttttttctttccttgagtaaagagctttcacttaaaagaacccactttatggcttctctttggcatgtttgaattgccaacattactacttctgggctttggggccattattaagtcacataagggtacttgggcacaagcacaatgatactgcaacagttgataggataaccaagatggctgctagtgactaatgggccaaggttctgggagcatctacagtgtggatatgctggacaaagggatgattcacatcccgggcaggagtgagcaggatgacatgagatttcatcacactactcagaacagcatgcaattttaaatttatgagttgtttacttctggaattttccatttaatattttcagactatggttgacaacaggtagttgaaaccacatgcagaaagagaaaccatagataaagggagactgccgtattattctttcttcttttttgagacagagtcttgctttgttgcccaggctggggtacagtggcacgatcgatactcactgccacctccacctcccaggttcagcaattctcgtggcacagccaccctagtagctgggtccacaggtgcatgccaccacgcctgactaattttttgtagagacggggtttcacgatgttgccaggctggtctcgaactcctggcctcccaaagtgctgggattacggggttgagccaccgtgcatggcttcctattctttctaaagcttcttgtttatgtacttctatcttcagagttctctctagaattcctgatttagatcaaaatttgattttaagcaatagctttaagaaagttaatgagtataaatccacttgtgcttatcagaacttaaaactaaaagctattaaaaacttgataattggaggaattgtcctgttgattgctttgtctggttcctgcctttactgtatatagctccaataattcaaaatctaggaatcagcaggcagtgtagcctgtatgccaagtccagcctacagcctgtttttatacagccctcaagctcagaatggtttttccatttttaaatgattgtttaaaaaaatgaatatgcaacaaagattatatgtagccgggaaagctgaaaatatttactatctggcacttcaaagaaaagtcttggtgacaaatctagtccataaatgtgcttttcattttatgtggtatagctagatgagtcacctctggagcttcaaaaacatatacaggtgctcaggaatcaggatgtttggctgtaacacccttgttcttacagcttcacaataccttccataaagtagggataatgaattgcaggccaagtactttgagagtatggattaatcaaattgatggtattgtgaaagatttagaggaggtaattgttaagctaggtttagaatcatgagtggggttttcctaagtacaggggaggaatgaaagtaatgaagatttgaaagttcatgtaaaattaaaggggacattgtttaacttgccttgtcagctctccctgtgtttttttctgttacctccaaattctggttacccatatttaccttgacagacaaaaattgtccattgtgtcctaataccaaggtatgtcctttgagatgcccccattttccagagacctattcctcctatacctaataaccttcagggcagccgaagtgatgaaaacctgcaggactaaagcacaagatacaaattcattagtagttttactgttcagctttcatgatttcttaactcagcattaatctaaaaaagagactttaccaaattcctaccttaactttgtcacagaagaatttacagctggttgctaaagataaatgaaattctgtataaatgacatgacgtattactatagatgtttgcgggccatgtcgtatctactataatgtagtgaagtaagtgcgatatatcatggctagttaatacagttgttattgagtttgtctcactgtgtttataatttccagtctgtgtatctgccctgcttttaaaaaaaagaaaattagttttttagagatagggtcttctgattttgcccaggctggtcttgaacctctggcctcaagtgatcctcccatctcagcctcctaaagtgttgggattacaggattgagccactgcaccctgctttttgaaaacacttagaaagtttaagttattggaggaaattatatttgcataatcaaagaatttctcattctgcaaaaggaagcactcagtaataatagttaatatttagtgtttactatttgccaggtactaccaaaaatacttttcatctgttaatgtatctactccccataaaaccataggaactattgtttcttttgttttgtaaatgagacaagggcccagagatgtactggggctggaatttgaaaccaggcagcttgctgctagagcctgtactctttgaactattatgtcgtatatttttctttagtgcttgtgcagtatatttgcagtcttttagaaattttaatagatgacaggcctggttgtccgtttagaaaaactgtagaacattatcctttacagcagatatgaaatgtagaaagatgtggttttgttatacagaagtaagattttatggagatggcttgttatttattattataaatgtttatgctttgacaaactgtcactactcacaatttgcaggttttaaaatgatgtcatgttgtgtatcacatctaaaattttaatggcaagccttaaaaggctttggaagtattttagttatctaattctgattttctaatttgaatggagattgagtaattattgatgatattgtttcttttgctcaaccttcaaccctttcagtaataacttactttcttgtacctgcaagtccagattttattaccgtttaactaaaaaatgatatataatcatgattattgtattctgtgtattaagtgtgctaaagaacttaagaatttttaggattccctttcagagcctaatatatagttcacatgaactgggtggacacttaatgaaccttaaaacttagtttaagttcgtcataaaaaaacgacaaatcattgatacttgtcccatagccccacaccatctagaacatctcttaggattaggaagtaagttaaaatggcctgtaaatcgcaaaagtccatgggaaattcatgtacttacttttagaagcatgtcagccccttgacaccttaaaaatgtattttttagtagcagttaaactacatgcttcccagccagtggtatattgttgaggtagtgcagggtgatgataggcttgtataaataggtacagtgatggtatattagcaaaaagaaagacaaacactaaaatccagccaggtgaggtggtgtgtgcctgtagtcccaactactcaggagcctgaggtgggaggattgtttgagtctagcatgggtaacatagcgagaccatctcttttttttaaaaaaaaaaaaaaaaaaaaaaagacactaaaatccaatgaatagcttgaggccacttttggaacagattgatgtgtatactttaatctaaaggataggttcaacacagtgcttatgtctttaaaaacaggttgacttggccgggcacagtggctcacggctgtaatcccagcactttgagagaccaaagtgagtggatcacctgaggtcgggagttcctgaccagcctggccaacatggagaaaccccgtctctactaaaaatacaaaagtagccgggtgtggtggcgcatgcctgtaatcccagctactcaagaggctgaggcaggagaatcacttgaacccgggaggcagaggttgcggtgagccgagatcatgccattgcactcctgctcctgcctgggcaacaagagcgagactccatctcaaaaaaaaaaaccaggttgctttaggataactctcaggaatcaagagtgttaaacatttggagaaacgttctgtcaagtgatcgcagtagttttagtgtgtaaatgggagaatttaaaatatcttggaatgtttaataggaagcttttcctttgggaacattaattaaactaagaattaatgctttctaatttcacaggctccacatgagacaaagtatgaactctgattttgtctttttttttttttttttgagacagtctctctcctggagtgcagtgtcatgatctccactcactgcaacctccatctccagggttcaagcaattctcttgcctcagcctcctgagtagctgagactacaggtgcccaccaccacacccagctaatttttgtatttttaggagagacagtgtttcaccatgttgaccaggatggtctcagtctcttgatctcatgatccgcccgccttgacctcccaaagtgctggaattacaggcatgagccaccatgcctggcctgtcattttaatctatccatatttatgtattttgtttgtgtctaatcacctatgggttagtgtttaagaacacaagttctggagtcacatctatatttgaatcttgcatgtttattaatgtgactgtggacaaggtaaccacactgagccttagtttcctcatatagtcataagtatttattgagcaactactgtataccagagactattttaggagttagggaaacatcagtgaacacaagattctaggccaggtgtggtggctcatgcctgtaatcccagcactttgggaggccaaggcaggcagatcatctgaggtcaggagttcaagaccagcctggccaacatggcaaaacctcatctctactaaaaatacaaaaattagccgggtgtggtggcgagcacctgtaatcccagctactagggaggcagagacaggagaattcgcttgaacccgggagggcagaggttgcagtgaaccaagatcgggccactgcactccagccagggtgacgcagcaagactctgtctcaaaaaaaaaaaaaaaaaaaaaaaagattccagttgaaagagagagaacataaataagagaagataatattatctatatttaggggtcccccccaagattaagtagagtaatgcatatgtagtttatccatagtgttgaataaatatgggcaactcttgtgtgtgtgtgattgtgatttgtcatgcttagacttgtgttgggataaaattgttgtatattagtcatctctcaaaaagaatttttaattgctgataccaaatatattggttttctctaatattattaaggggcataggggaagtagagggatgggatgggatagcattgaatctcatcaatatgtgtacttttactttcttttgtaacagccaccaaaaaagacagccaaaagagaaaaacctaaacagaaagctacttctaaaagtaaaaaatctgtgaaaagtgccaatgttaagaaagcagatagcagcaccaccaagaagaatcaaaacagttccaaaaaaggtatgttagaaataacattaatcagcaactttaaagatatagcatatattaatatgttgtacatagtatttaagtgtgtgggagaaacaggtaaactgcagagaacattgcggggagaagtaatacaggttgaatatcccttatctgaaatgcttgggacaggaagtgattcagattttgcaatatatatatatagagagagagacagagagagagatatcttggggatgggacccagtctaaacatgaaattcattcatgtttcatattcatcttaaatagcctgaaggtagtttaatattttaactaaataaattatttattgcagtggtgccgttacagctcactgtagccttgaactgctggactcaagcgagtctcctatcttggccccccagagcactgggtttacaggcttggaccactgcccttggcctgaaaccaagttttgactgcgacccgtcacacgaggtcgggtatggaattacctcctggtggtgtcatgttggtgctctgaaaagctggattttggaacatttcaggttttggatttttggattagggatgcctaacctgtataccagttttttatagtttttgatttttcaaattgactaaaatttgtatgcatgttttataggtaactgtagagtagtgatttataatttttttgatccagtacccctttgagaatctgttgaaagcttaaaattcatctcagcctttgttaaatgttaatttactatgtaagaaaaattattattattatattacttttagaaagtgagtctgaggatagttcagatgatgaacctttaattaaaaagttgaagaaaccccctacagatgaagagttaaaggaaacaataaagaaattactggccagtgctaacttggaagaagtcacaatgaaacagatttgcaaaaaggtaattagacaaatgtttagattattttgcttttgctagaaaaattctttcacttatctctgaatttgaagctaaatacttacgtgcattcacttattgaagaaagatttattgaactactatatgccagatctccttacaggtgctgggataccacttaaaatagtcaaagtctctgtcctaatagagttattttataaacaacattaaaatgaataaagttagagtgaataaaattaaagtgacacattccaaaccacataggaaactttttctgatctgtaggttgtttctattgatgtatccttagtttatgttagtttaaagaagcagaatctcatgaaccgtcttattctcttcttagtgtgataaatgagctgttatagattaggttcttaactcagacttctgcagcgtctttctaatatttctaatacttctcaggaaataaagtggccttgtcttgaatatgattccatagggattctatggaaattttagaaacttgtctgttggggtaaaataaaattacaatttggaatgtaccaaaagtgaaatagtctgtgcttttttaaaggacattgattattattttgttcattcattcaccattcattgattctctactacatttcaggcactgggctaaatgttacaggtagaagctagatgtggtggctcacgcctgtaatcccaacactttgataggctgaggcaggaggactgcttgaggccaggagttcaagaccaacctgggcagcatagtgagatcccgtctctaccaaaaaaaaattttttttaatgttacaggtggaaccagagaagccattacttagctttcaagaggagcttacagtctagtgggatggaaagagataaatattttagtaattaaaatattgtaagcgagggctgtgttagaatatggaaggtactgcagtgccacagaacaagcaccctacttgaggctgggggaatctggaaaagcatcttggaagagctcttaactgaatttcctagtggagcatcacccattctatacagttgaggaacaataacacattaaccaaaacaataattgaaaggaatagtattagttcaacatgtctcaagactaggattggaaagaagtcctcacagaagttaggagaaaatattagagttttgcagatcttaaatatgccatgttagagtttgagtttcttcctgaaataaatgaggaattcagaggctatgtagattattgagatttagcaggggcataacgcaatcatatttttatttttaaaagttatcctagaaacattaagaacaatgcaatagcaaaggatgagatgagagaggcaggacacccagttatatcatcattaaaatgacagtgtggagtggagaggaagtcaaagagaaattagttctgtccattagaaggatttttgtgaataccttcatgtaaattttttaaagggattaataacatggagaggtcaggtgagaaggaactgacctgttttggagtctgcaattaggagacgatgacatagggtggtaaaagcaagagttattaatgaatagtgaggaaaatgaacaaagtaacttctgtttcaagcagctgtctttggaaggaaaatagtaggtaaatgggagtaggtgagaaagtatttttaatgggtagtaggggtggaggggagaaagcaatttggtgggaaaggagaagttacaggagaggtgaagggtggtcctgtggaggcaaaattaagaaccattgatgaatccagatacaactggaggggaaagtgctgtcagaaaattgaaggaattcataataatggctttttggctgacagtagcagtgtgagacacttgaataaggagatgaaactgccattggtggaaatgaaaggagagagcctgactgggagctccagggggaggagcctttgaagatgaatgccatgaactgaaaatgagaccagtctcttcaaagttattttcccacagcaatctgtagtctgggcttaaccatagaaaaatgagtggttagaccaattcgggattggggttttgcagggaaagaacaaggggcaaacaatttttttcttttttttaatacttttaagttctaggatacatgtgcacaacgtgcaggttacatatatatatatatatatatatccatgtgccatgttgatgtgctgcacccattaactggtcatttacattaggtgtatctcctaatgctatccctcccccgtcccccccaccccacaacaggccccgatgtgtgatgttccccttcctgtgtccaagcgttctcattgttcaattcccacctatgagtgagaacatgcagtgtttggttttctgtccttgcgatagtttgctgagaatgatggtttccagcttcatccatgtccctacaaaggacatgaactcatccttttttatggctgcatagtattccatggtgtatatgtgccacattttcttaatccagtctatcatttgggttggttccaagtctttgctattgtgaatagtgccgcaataaacataacatgtgcatgtgtctttatagtagcatgatttataatcctttgggtatatccccagtaatgggatggctgggtcaaatggtatttctggttctagatccttgaggaatcgccacactgtcttccacaatggttgaactagttaaagtcccaccagcagtgtaaaagtgttcctatttctccacatcctctccagcacctgttgtttcctgactttttgatgatctccattctaactggtgtgacatggtatctccttgtggttttgatttcatttctctgatggccagtgatgatgagcattttttcatgtgtctgttggctgcataaatgtcttcttttgagaagtgtctgttcatatcctttgcccactttttgatggggttgtttgattttttcttgtaaatttaagttctttgtagattctgaatattagccctttgtcagatgagtagattgcaaaaattttctcccattctgtaggttgcctgttcactctgatggtagtttcttttgctgtgcagaacctctttagtttaattagatcccatttgtcaattttggcttttgttgccattgcttttggtgttttagacatgaagtccttgcccatgcctatgtcctgaatggtattgcctaggttttcttctagggtttttatggttttaggtctaatgtttaagtctttaatccatcttgaattaatttttgtataaggtgtaaagaagcgatccagtttcagctttctacatatggctagccagttttcccagcaccatttattaaatagggaatcctttccccatttcttgtttttgtcaggtttgtcaaagatcatatggttgaagatgtatgtggtattatttccgagggctctgttctgttccattggtctatatctctgttttggtaccagtaccatgctgttttggttactgtagccttatagtatagtttgaagtcaggtagtgtgctgcctccagctttgttcttttggcttaagattgttttggcaatgcgggctcttttttgattccatatgaactttagttttttccagttctatgaagaaagtgattggtagcttgatggggatggcattgaatctataaattatctatggccattttcaagatattgattcttccaatccttgagcatggaatgttcttccatttgtttgtgtcctcttttattttgttgagtagtggcttgtagttctccttgaagaggtccttcacatcccttgttaagttggattcctaggtattttaatctctttgaagcaattgtgaatgggaattcactcattatttggctctctgtctgttatgggtgtataggaatgcttgtgatttttgcacattgattttgtatcctgagactttgctgaagttgcttatcagcttaaggagattttgggctgagacgatggggttttctaaatatagaatcatgtcatctgcaaacagggacaatttgagttcctcttttcctaattgaataccctttattttctttctcctgcctgattgccctggccagaacttccagcactatgttgaataggagtggtgagagagggcatccctgtcttgtgccagttttcaaagggaatgattccagtttttgcccattcaatatgatgactgtgggtttgtcataaatagctctttattattttgagatacgtcacatcactacctaatttattgagagtttttagcatgaagggctgttgaattttgtcgaaggccttttctgtatctattgagataatcttgtggtttttgtctttggttctgtttatatgatggattacgtttgttgatttgcgtgtgttgaaccagccttgcatgccagggatgaagtccacttaatcatggtagataaggtttttgatttgctgctggattcggtttgccagtattgtattgaggatttttgcgtcgatgttcatcagggatattggtctgaaattctctttgtttgttgtctctctgccaggctttgatatcaggatgatggtggcctcataaaatgagttacggaggattccctctttttctattcat

SEQ ID NO: 380 - DNA, 16910 bp, Homo sapiens
  source 1..16910: mol_type = other DNA
ggggcggtgcagaggcggcaggaagatggagttggggagttgcctggagggcgggagggaggcggcggaggaagagggcgagcctgaggtgaaaaagcggcgacttctgtgtgtggagtttgcctcggtcgcaagctgcgatgccgcagtggctcagtgcttcctggccgagaacgactgggagatggaagtacgctttcgctgtcctcgcttccggctccattacctaggtcggtggagcgcacaaacctcatcccttgtgcctttgtttttcagagggctctgaactcctacttcgagcctccggtggaggagagcgccttggaacgccgacctgaaaccatctctgagcccaagacctagtaagtgatgaggggagcgggagccagtccgcacggaggcagtttgataccaggtagccctgcgcgtcctgggacctgccgtggagctgggcggacgatgctgaggcagatctccaagctgcgtagccagaggagcagggcttgcgttgctgctgctgcgcggagttgcgccccagcagcggatctaacactgcaccagactgtcgcttcgaacgtgatttggggtccagggaggaaaagatggaaatgtaatgtttaactcaaatgaaaggaaataagtaagcgagaggtttgaaacaaatgaacgaaggctaaaccttctatcgaaaaatggcaacttggaagtctccttgcttcctgtattgtttatttattctaggccctaggctgaccggccagaataacaggtttgttgttgttgttatttttttttaatgcacacctactcctgttatttcagtgcccctctccagttcctgcacttaaaaagtgtagctgccttacaaggccctctactatttggctccataacttagaacctgcctttccaggttccaggcctatcaaacttttacttttttccaacgggtcattttctcctgtctttgaaacttcgtaaagatctttattacctgtgcctggaatttttttcttttcccttccttgctaatatttgtcttaaagccccaagctgagacatgatttatctctaggaagcttttcctgatgtcctaagtctgggtaagagtccccttttaggtactcttatagcatcctgcatgacccctgttacaataccttagtccgtattataattgctgttcattattttatgtctcctactagactgcacatctagtaaggagtatctgttttgtacattgttaatttcccaaagtctgacacaacatttgacacataataagctcccaataaatatttactgaatgtataaaattctcccagctatatgtacaacctgtaaaattgactgttcatagtggagactttattttccctttggtcttttcagctacactggcttacagatgtgataagatattttctttaggttcctttctctgtcttgcctcttgttggggaattgtttactcacccacagtgatttgtctctggctcccgttttactaaccagagcaagttggactaggaggtgtttgcctagctcaaactggccagtcagatcctctccttggtttcagaattaggaccaagagagtcaagtctgagtcttcctatggagctggaactgtaacatgttaacttagcacctgtgaggattcatacatatctttttttgtgtacagagaagctgagaacagaggtctgcagagagacaatgaagcagagggaagttgaagtgtaggattgagagaaagcccttaactgcccttccttaaacatggctgtatttctgtaccaggctctgtgacatgtttgtttccttataaattctcctgttttggtcaaaccaacctgagttaatgtctgttggttgcaacagactatattgtaaccaataaatagtaacaaaataagtggatttcctgtaataggccctcagaaaagatgcggatcaagctgatcaatggtgtcatggctattaggattctcttaccccggaatggtaaattggcaaaaacaagcaaaggtgttgattaggctgtggtctcttgtctctcagaactcaggtcaagtatgaatgagagtgaggttttaaagtttagtttgctcaagagagaaaaatggggaaggggcaaacttcagcgtgtttctaaggcctgtgacctgattagatttttgatgttggctttagcaaaaatgaaagggaaaaaaaaattgattggaagattttatgaccagaaaaactcaaccctgctgagcaagggcattggctgtcttaaatgaatggcgcaggaatctcaattctggagtgaattcctgggatatcaacaaaaattgaaattgaacactaaagtgatttagtcccctacattagaatctatcttcagtgtctctgatgagagacaagggaaatcctcttaaaacagctatgctgaatcttagctgcatattggaattatctggggaatttaaaaaaaaaaccagagattctaatttcattagtcttgagtggggcccattattccttattggcttttttttttttttttattagctgtgcaggtaattctaatgcagagccagcattgaaagcccgtgtcccagagccttgttatttagagtgtggactctggaccagcagcgtgccactgctactcgggaatttgttagacatgcagaatcttaggtctcacccagacctactgaatcagaatctgtattttgacaagatctccaggtgatttaaaattgaggagcactggcctaacacataaaacctaagacaccagatatactgacaaaagcacttcctcctctgcttaggaatgaagtcaacaaatcatgcccctaaagtttgccagtccctttctgttcccttagtatttctgtacagcaacgttttagagtttatttcccttttcatttttccaaaaggaaatttttaatacagttgcctggtttttcttgctgcattaaatattaaatattgtgggtgttgcataaattgcagagatatttgtattaggttcttgtgttgctataaatacctgagactgggtaatttataaagaaaagagatttaattggctaacagttctgcaggctctactggaagcatggccccagcctctgctgggcctcaggaagatttcaatcatggcagaagggaaaggggagcccaggtatcacatggagagcgcaggagcaagggggtggggtggtgccacatacttttaaacaaccagatcttgcaagaagaactcagtatcgtgaagatagcaccaagacattaatgagggatctgcctccatgacccaaacacctcccactggaccccactaccaacattacggattatatctcaacatgagatttggaggggacaaacatccaaactatatcaatatggaattggattacaatgaaacagaggaggaaaggatggcatagtgaataagagcatggactctggagccaaaatgcaaaggttataagtccacctgtgctatttagtaactgtgtaacttctctctgcctcaatttctttgtgcagtggggatagtaatatggttctgagtctacctgtgctatttagtaactgtgtaacctctctctgcctcagtttctttatctgtgcaaccccttcctcatggggttgttgtaaggattaagtgagctaatagatgtaaaacacttggaattgtgcctggcatatagagctcagtaagtataagctatgattaatgacaccatcatgctctccccatacatcacccatgacagtccacctgttgaggaaagtaggggttgtgtttacagttttatgaggtagattgagttatagttggatatctttaaacttggaaaaaaaggtgtgtgtgccggataggtaaggggcctgatgtgatgagcaaacacctttgtctatgatagtatatatatttttaaattcagctatgaaacagaagatttgacagaaataaagagctaataatttctcctttctggttttaatgcttttcataaaaaggaaataacatctttgatcaggcatggaatcacttggctttttctctctggtggtaagatgaagggggccagcccctccacacctgtgggtatttctcttcaggtgggacgagagactgagaaaataaataagacggagagacaaagtatagaggaagaaaagtgggcccaggggaccggcgcttagcatacggaggatctgcatgggcactggtctctgagttccctcagtatttattgatcactatccccatctcggtgagggggatgcgacaggactagagggtaatggtggagtcagcaggaaaacgtgagcaaaggactctgtgtcataaataagtttaaggaaaggtgctatgtctggatatgcacgtaggccaggtttatgtttgactttacacaaacatctcagtgcaataaagagtagtattgccgccagcatgtctcacctccagctataaggcggttttctcccatccaagtaaatagaatgtacgatcgggttttataccgagacattccattcccagggacgagcaggagacagatgccttcctcttttctcaactgcaaagaggccttctttcactaatcctcctcaacacagaccctttttgggtgtcgggctgggggacggtcagatctttctcttctcatgaggccattatctcaggctgtctcagtggggggaatccttggacaatacccaggctttcttgggcagaggtccatgtggccttccgcagtgcattgtgtccctgggtactcgagactggagaatggcgatgacttttaccaagcatactgcttgcaaacacaattttaacaaagcacatcctgcacagccctaaatccattaaaccttgagtcaatacagcacatgtttctgcgagcacagggttgaggctagagttacagattaacagcacctcaaggcagaagaatttttcttagtacagatcaaaatggagtttcttatgtcttcctctttctacatagacacagtaacagtctgatctctctttcccccacagtaagacgttgaaaaaaagtctaatagctcattgttgaataagagaacttttgggtaggatgaaattcacaaaagaaagttttgcactttttttttatgctcttgaaggttatttttatgtaaaagggagacaattcaaaatattttatgctacaaaattgacattaagttcatctagcacccagatcatggcctttaaatacaattcttcactgaaaggaacaagggcttttcagaaatgactgatttcatagaatgaaaggggcttaatgtaaaaattaaaaaagaagttaaaaagaaatgactgattccagagcaggggcaaaaaaagtacaagatgagccaatggtatctgtggtgttagaaagtaaggaggtgcccagaaaatgttggggacatgccagaagggcacaagacctagcttaaaagctgcctaccctttccccgtgaaatctggtataacccaagcaacaggatgcttggtaggaatagattacaatccataaaaaaagaacccatactgatataaataccattgtccaagagagaagggaacatttttccttacagtagaactccatctattaaatgtggaagacatgaggaattagaaaaaaatcttcatttgggaactgccgtattgataattatttcaggtagatatcaacagatactaaaactagtaggaaagttcagtgaacaacagcatatttacataatcacaaagtactttcccacaaaatacttactatgatggggaaaattataacttcgtactagagaaatctggttaacaacactttaaccaagtgatcaaagctaacatcaccaggaatgggaaagctccatatcagatgcttgatatggtgcattgcggaggacatactatcacttctgtgacattcctgccaaaaaatgcataatctgaatcaaataataggaaaacataagcccaatctgaaggacattctgtaagataaatggcctgtactcttcaaaaatgtcagagtcatgagagacaaagactgaaaaacttttctggattgaagaaaattaaaagagacatgccatctaaatataacatgtgatcctagattaggacactagtagcacaattggcaagattggtctaggtctttagatattaaatctagccataggaggcaataagaaaaagaaaaacttatatcaatgataatcttctgacttgttgatcatactagagtatactgttatgcaccacataaccacatctctattgacaacaaactgcataaatgaagatgatcccataagattatattactgtatttttgctataccttttctatattaggtatttttagaacacaagtaagtgccattgtgttacagttgcctacagtatccagtatagtagcatgctgtacaggtttgtagcctaggagcagtaggctagaccatatagcctaggtgtgtaggaggctgttgtaccatctaggtttgtgtaaattctctctatgatgtttgcataatgatgaaatcacctaatgacacgcttctccaaatgtggtgcataactgtatatgtaagcatgtcttcgtgtttaggaaataatacaaaaatatttaaacaaatggttcagaataaaaagaataaagcaagtaaatgttaagtaaaatgttaatatttgaggaacctgggtgaatggtgtataggagaaaagttaaaatgttggcattaaaattataaattcagacacctatttttaaaattcatgaatagtttataaatgcttaggagttaaccttttaataaagtttgtccctccactcatatgtctggggtattggttgggggagcagatggtggagtcaagactatggactggaacacatacatatgtcctttccagcatggcagtctcagggtggttggactttttacatggcagttccagggttcctggagggagtgttccaaaagccttgaatggaagtggcagattatcttaaggccaaacctcaaaagtcccagaatattctttccctgtagtaagcaagctactaaggtctggattcaaaggggaggggcattaggtttcatcattcaaaggggagtagcaaagaatttgcagttcctatttatctgccacaatgagatcttatttaacatatgattttaaaaaattccaaaaagatttagaaatcctacgtttctgagtctaatttgggatcatagtttatacaattattctagtgacacatgtcattgaaggatattaagttgtttataactgcctaagtgagcaaacatttggacagtacagtaagaatctatctacgaacccaaaagtatctgagtcaggtctaaatcaatttagaaggtttattttgccaaggttaaggacgcacccatgacacaccctcaggaagtcctgactaccttgtggacatgtgccctaggttgttgaggtacagcttgcaagtcaataccctgagacaccaaaggttgcagcagaaaaaaaattttaattgtaaggccgccaaaccaggggactggaggaaacttcagattctccttgagaagtttggagcttgagacttaaagaggtttggagtggaccaaggtgtgaggattgttgattggtcagagtgcaatgatgaagtcatgggatctagagatgaagaaactgcattctcatgctgattcggttcctgtcggggtgtcttcaaactggttggtgtcagctttctgctggaattcagcgtctgaaaaacatcttaagcaatgcttaaacaaaagccttatgattctgatgtcagagatcctacccataggagcaatggggatgcaagtcatcagtatatagggctatgggatgactttccgtacaaagaagtgggccaaagtgcagcgtgattaatgctcaattatatttctgtctagaacctggcatgcaattcttgttaaccctgtaaggacagtgtcacttttagggctcttttaaaatttgtctgtaaaatgagggctacaaatacaaaataattcttaatcaatttatagattatttgcaaagccatgttttattctgatcttgccagtgttgacctaaccaatgaagaaacaactgattccaccacttctaaaatcagcccatctgaagatactcagcaagaaaatggcagcatgttctctctcattacctggaatattgatggattagatctaaacaatctgtcagagagggctcgaggggtgtgttcctacttagctttgtaagtattatcacttctatttaatagtaatgtgtcttatgtatatacaaagtaacagttcaaggttgtgggctttagaattaaacctaagttcaatgtccagctctgagaagaaacatctgaagaattaagatgattgcctctgagagcaggattgcaggctgcagcaaagagggaacactaattttcgttagaagccttttagtactgttttcttcttcaactttgtttatcgtaactacgtgaaattaaaactaccaaaaagatctatttgtgccccatgctggctctgtgaccttggccaaatcacttaagttctctggacagttttcttcattgtggttaataactgcttcaagaggattgaaagaaacattgaaagcatctcttagtgtgtaggaccattgaagtctctcaatatggcggtttctattgtcagtttttctagttctttttgatatatttgttacagtactacattaataaatagcacacatctttctcattttatagttatcaaagatcagcataaacactcaatattaggtgccctagagggttttttgtttttggtatgttgtgggatttccttcatttaggtagctgaaaatgaaatggtatacttggtatttgtcataaattgatgtttttcattaggtacagcccagatgtgatatttctacaggaagttattcccccatattatagctacctaaagaagagatcaagtaattatgagattattacaggtaacaatttttgttattcaacttgtcttttctttgaaaaacagatcagtgaaagagataaatcaaagttggtctattgggacatagagaggaaaaagcacaaataaataagtttgagaaaaataagcaagacacagaatactacaagaattataggagaatattttatacaacttaatattaatagtgtgaaaaggaaatggatgatttttcaggaaaatataaattactaaaatttgagaaacaacacctttttggtgaaattcagttgttaaaagttttaactgaaataatcacattgtggttattatgctttttcaaaaagtctttattttataattccttatttattttgttgttctttttgtactttttttgccctgagtaatttagtttttaaattttccatctaatttgtttttgctaaatatatttaaaatactactttggccacatctcgtgattttcatatacagtctttccttggtattctcagaggattggttctagggttcctcaatggataccaaaattcgcacatactcagtttcctcagtgtgctctgcagaacccatctatatgtgcgcactccatttctgcaggtttcatgtcctgggaagactgtattttcaacctgcatttggttgtggatgcagatacagaggaccaaccgtatttactgaaaaaatatctgtataagtggaccttgaagttcacttgtgttgttcaagtgtcaactgtatagtgctttctttgactttcatttttatatagtatgtgatttttagtttcaatcgactccttaatcgagaatttctaaggagagggttctctctcagtctgtgtgtgtctctctttatggaactattttgtattctcttggggattcttttaggatttctgattcccatgcttccttcttggtttacttccttattttattggagcaccttctctaattaatttctaggaaatagtgcatggatagtgaagtttttgaatcccagcatatttgaaaatgtctgtgtcgtagctttgtagttcttgatagtttggctgaagataggtatctgggtaaatagatgttttccttcagaattctgaaggcattcttcaatgtcttctagtttccattattgatgatgggtgataaggctgatgccattctaatttttattcttttctttttccctactctctggaagctttgagggtcttctttttaaccctcgtgttctttgggtctttttaaaatctattgtactgaatgcttggtgggaacttttattctgtggaattttaatatgtggaaaaccttagttggaaaatccttttccctctccctccctcccaccattcccctcgcctctcctttcattatctttgttatttctctttccttttctccctgtctcttctttcctcccttaagtttttttactctcccatttttctgaattccctctgttaaacggtggatctcctgggttgatccttgaattttcttaactttctcttattctcctatctctattgactgttctactttcttggcaactatcttgacttttagatagcattattttaatttcctaggcctcctattcactgaatatcttttttatggcacacttttcttggtttatggatacagtatcttttttgttagttttttgtttgttttaggttttaatctctttccctgcattgtttttatttccttctttttgtttattttgattatgttatgtcagtatccatcatgtcatgttagacctgttccttaaatatgtagggatccttggcttttggttcacatttaaacaccaaacactaaaatgttgattacagtttagtatgcctgagcaaggctaagtagtttaccttactggacaggggtgagggattgattgtagagcaaactgcttattcatttgagggagacccacaattgtcagtgtgttggtatatacaggcctttaatctgagaccattttgtttctccaaaaaagagttatttagctttctgccttctgggtgttgggactggggtggtgtgcttgttttgcctaccttctggaagcaggtgaggggaagggagctgagtaggcacactttacttaatcagtgttcaacctattcacctatcagccgtgggctaacatgcatgcccctccctgtggctggtgactctggagcctctaaaatttagttctatgtaaaactgtagtctcctgttaatagagggacagtcacttagctctaaggagttgaggaaacctgggggttgtttaaccccatatccagaccttgaactggccctcctcttcttagctcagcaccttaccttttgtggtacctttatgttcaagcactaagtgtttccagattttggtggaacaaatctgcttgcttcctgtctatggttctctgctacagtcactcaagtggtttccttctcttctgataaaccggttaccacttctccatctgttttctgttttctgaaaaactgttggaagctttcattcatggcctctactcctattttctgttcttgcaggtttatatctttctagatttttattcatttactataatttttctgaaacttctagtatgagaagtagtaagtggctatcagctggccacagttcatctcatctactctgtgtctttcagaaatttctcaaattttctcatctgatattggcagcattattttttggcacttgtttacattttttttcatttttatttattcatttattttgagacggaatttcactattgttgcctaagctagagtgcgatggcacgatctcagctcaccgcaacctctgcctcccaggttcaagtgatttgcctaattcagcctcccgagtagctgggattacaggcatgtgccaccacgcccgactaattttgtgttttgtagaggcagggtttctccattttggtcaggttggtctcaaactcctgacctcaggtgatccgcccacctcgacctcccaaagtgctgggattacaggcatgagccactgtgcctggtctttttttattttattttatttcttctaagcttctagctaaaatttgggagggaggaggtagacttgtttggccatgatgaactattttgaaataatagtttaaagatttagatccatgtaaatatctgttacctgtttgctataaaattcttcaataggcaaacttgtggtaaactgaaaataactctcaccttctcagcctaaattcttttccacaaacatttgtaggtcatgaagaaggatatttcacagctataatgttgaagaaatcaagagtgaaattaaaaagccaagagattattccttttccaagtaccaaaatgatgagaaaccttttatgtgtgcatgtgagtaatttttaaaaattgagtgttttataaaaaaaagattttttcatagttttgtgttattattctttttaaaaccattgcctttagagaaaaatttgcttcacacatgtagattcttttagatagtctttaacactctctaaaattaattttttacataaattttaaatgcagatagaattctcagtctattgttttcttaagaatatttgagtttgctgacattccacatttgcttcctaaagtaatgtttttactttctactctatacatgctgctatattttactctatgagacttacaaaaatgaaaaatagatcttgctctgatatagtatatagattagtaagggagagtgtgtatatagtaactaaaacataagaaaggcataagtgccacaggagaggtataaatgatgtgtggaagtttagagaaaggagagatgacttttagccagattgtttagtgagagttttatagaggagatggtatttgaaatgaaccctgaaaaatatgtaagacatacatattaaaaagagtccaagtagagaaaccaccatgagcaaacttttgcaagttgcaagaggtgtacatgtatgagtatgaatgagcattctattcagttgagtgtaggggccatggagaggcaaatgtgacaggttgagaagtaggtaggctcctgattatagaagagcatgaatgaccaatatgaaagaattagacttgattctgcagacacttagtataatgatagattgtacattgttggtgtcttaattgcaaatggtaaatgattctcattcattcagttaactgacttttttggaatacctgtatgccaggcccttaataatacagcaataaataagaatcatctctgctttgcaaatgacttatggctttgtaggagggaaataattgtccttttaatttagcctagggggctttgaaacagtctgttcagcatgcctttggtgtattgaggagggagccgctgatggcctggggacactggggaaaggttcacagtggaggtgacatctgggggtaggtcgtgcttgctaaaccgtcgtctttggggacagggttactgctttaatacttcttttgatccggagggataggcatagtgctgattttacagtttcagtttagtaaatatataccatttgacagaacaatctgctgattttattattaaagttcagtattaatagtcagtggacagttttaatgactgtttgtcctgctgcaggtgaacgtgtcaggaaatgagctttgccttatgacatcccatttggagagcaccagagggcatgctgcggaacgaatgaatcagttaaaaatggttttaaagaaaatgcaagaggctccagagtcagctacagttatatttgcaggagatacaaatctaagggatcgagaggtgagtgacaaagtcagtttgatgtttgaggacagattattgctatggagactaatttaggttcctttgaccaaagctgttaaaactaggacctttagtcactcaaaatgtcttaagtgaccttgcaattcagcgaatatttgtttagcctatgctgtatgcctaggggaagaaggggctctttttggaggaaaataaaaatgtgcatgagaaatagacaacactaaactatatgtgtgtgtgtatatatatatatataggattagaaagaaaggtagagaaaatgattgtagaagagtttagaaaaggttgtttctttgcagtattcctaggtgcaatatgagaacaatggaaagattggaccgtgataattgttcctgactctctttttttctgaggtttccttttcttttttcttttttggcttttattagccttttttacccacttttcctgccaccaccatgtccagatctccaggtctgaaacaaagtctctttctccctgcctatagctcagttgagacacagtgggatttttcaggaccttaaaaaattaaacatggaattactaatgtgatgcatcaattacacttctaggtgtaaatacccaaaagaagtgaaagcagggatttgaatgtattttgtctacccatggatgttcacagctgtgttattcacagtagctaaaaggtggaagcagcccaaatatcactgacagatgaataaacaaaatgtgctatatgtatacagtggaatattattcacccttaaaatgaagaaactttgacacatgctacaatatgggcgaatcttaaagacattatgctgagtgaatgaagccaatccaaaaaggaaaagatactatatgattcctcttatgaatttcctaaactggtcaaattcatagagacagaaagtagaatggtgtttgccagggactgggggtataagggaatggtgaattggtgtttaatgggtacagagtttcagttggggaagattaaaaggttctggagatggatggtagtcatggttgcacaactatgtgaatatacttaatgctacatcactgtacacttaaaaattgttaaaatggctgggcacagtggctcatgcctgtaatcccagcactttgggaggccgaggtgggcagatcacttgaggccaggagttcgagaccagcctggccggcacggtgaaaccccatctctactaaaaatacagaaattagccgggcattgtggcacatgcctgtgatcccagctatgcagaaggctgaggcactagaattgcttgaacctgggaggtggaagttgcagtgaaccgagattgcaccactccatcctgggcaacagagtgagactcccacctcaaaaaaaaaaaaaattgttaaaatgataaatcttgtattgtgtatattttaccgcaaacaatttttttaaatcctggagtgtgaatgagcaaacagaattaatattattaataaacttcaaataaaactgaaggcagttgaaatttttggatcatatgaatgctatacttctgaagttgtagactaaagtagagtggcagttctgccttcttttcacttgagttcagtttttgaaaacagataacagcagtaacaggccatgtatattcagccttctaagttttatctgaaacccaaagttaggaacctatttatggcagaagagaaggggcaaattccaaacccctctggctgtcttgatatttttatattacataccactatgcagcatagtactttttataatgtatctcattgttttgcatttctgcattaataatttcttgcacggtaatagcaaaaacacctttttttttttttttttaagttagtgggcaaaaggctatgtgtatcttagagagtattcttcttcttttcaggttaccagatgtggtggtttacccaacaacattgtggatgtctgggagtttttgggcaaacctaaacattgccagtatacatgggatacacaaatgaactctaatcttggaataactgctgcttgtaaacttcgttttgatcgaatatttttcagagcagcagcagaagagggacacattattccccgaagtttggaccttcttggattagaaaaactggactgtggtagatttcctagtgatcactggggtcttctgtgcaacttagatataatattgtaaaatgcttttcaagtgtgggttttgccctgattgttgcaaatacaatttccaccttctggaaaggtaggtttgctgtggaggaaataatgtactagatcattgtcacagaaaaaccaactatgatttatggttgtgttttcagaattcaacattaaagattaatgtttatttaaacgaacacattcctgcattcaggatgtgaggccatttaataaaaagggcacaaagcctgtcagagttttcaacggtgcttatagctgccagctggattccaaacaggtaccacattgtctctgagctaatgtttatatttttccattcaggcaccgaaatagttaatatttgaaataagtcttcaaaagaaaacataagagattattgagttcttgggactggatcctttatttcataagttcagatcatcttaaatgaaaatgccatgattatctgcagttaagtagatgacagctattctacatcagacttgatttttgtcagctaattacataattggtaagctataattgaaaccttatggcttaaaattccttaactcctttttgattcatgtttgtagtcatgttgtcaacagaggcaaagttaagcttgatgatggttaaaatcggtttgatagcaccatgggacatttttctaacaaaaataaatgcatgaagagacatagccttttagttttgctaattgtgaaatggaaatgctttacaggaagtaaatgcaaattacttttaagtgtgctttaaagaaaaatattttccccacaagagaaatttaaataaagaattttatttgttt

SEQ ID NO: 381 - DNA, 11166 bp, Homo sapiens
  source 1..11166: mol_type = other DNA
tctgcgtcagttggtcacgtggttgttcggagcgggcgagcggagttagcagggctttactgcagagcgcgccgggcactccagcgaccgtggggatcagcgtaggtgagctgtggccttttgcgaggtgctgcagccatagctacgtgcgttcgctacgaggattgagcgtctccacccagtaagtgggcaagaggcggcaggaagtgggtacgcaggggcgcaaggcgcacagcctctagacgactcgctttccctccggccaacctctgaagccgcgtcctactttgacagctgcagggccgcggcctgggtaagggcgaaggggttgttgaacggtcgcgggagccggggcggggttgggaggtgagtcgagggactgccccattggctgggtcggttttggcgcgctctcacttccgcgcttcctattggctggctggcgcagttcccgaggcgcgcgccgcggttggtaggctcggacgcgcggggccacactgcccgccccctagcctggcgctgggcctccgggacaagttggctgggtccgggcttggggactgcaacgcgggtaagggactcagcctgggcttgccagctgtggggatgaggcgaagcatccatcctcttggcagttaagtggctggtcctgatctgagggatctgcaaatttggctcatggaaagaggtggctgaattctgcgtctcccattaaacggatactggcgttgttgatacgggtttcgcatggaccctgtcctgtgccagggtttttaatctagctattaaaggaactggagaataacaagtaagggttgcaaggtcgctgacaggcgtgggaaacttgtgaaggattagaatgctaagtggctttcagcttttttcacactaaggtacgttttacgtcgcaacctaggacacagctatctaaccaaatgagacgtgatggaagcaatgtttctcgtctcttcaattccattctgttcagttgcatttttctaagcagtgttgctcatgactcactaatttcgagatcacggcccgcgacccgcagtttgaagaacattgcgtagggtctgtttactggggcccgaacaccattttcttaacatgaaatagagtagaaaatagcaggatgcccgcacaaattagattgttttgttttctaagctttttttttttttgagacggagtctcgctctgttgcccaggctggagtgcagtggcaggatctcggctcactgccacctccacctgtcgggttcaagcgatactcctgcctcagcctcccgagtagctgggactacagacgagcaccaccacgtccggctaatttttgtatttttggtagagatggagtttcaccatattggccaggctggtttcgaacttctgacctcaggtgatccgcttgcctcgaccttccagcactttggtgatcatgcaggtgatccgcctgcctcgacctcccaaagtgctgggattacagatgtgagccaccacgcccggcctttcctaagcttttttgtttgcacatgtgtgtgcacgcgccaggacacaaggtaaaatgtattaatgttagaagccactgcactgagtaaaggcatggccacaaaaattagggacatctatcgacgaggcacaggcgcagacacggcaggggccaatgggtagtgggcagtgggcagtgggcagtggagcagcagttcagatgctgagtttggcccagtggtctagtcaaccgcattacatagatccctttctaccttttccctctttcttgcttgttagtccttcagttcatgttactggttaaacatttcctacaaatgtaaatgcatgatctcatttgaccagatattaagtctgtgttaagttattgtcagagcccagtttattataccttaaatctgtctttgaatcaggaaagttaagatgctgctctttaggatggacctgggcataccctagtatctgtttattttgctttttctggtgactatttaatccaggacaatatgtttagaaattttaaaccagttttagaaattggtttaaaatacattaatttcattttttcagctataattattatgtgtgtatatatgtaaaatatagatatcaagagtcattaactttagtcaccttagtcattgacagggctgagtttggattaagagagaaaaaataatagttctactgtacaatagtataatttttatgattgtaagtattttaaacctagactccaccttcgggggtgcaaaccatattgttttttaattactagtcttctgtgcttcaccatctacataatgaatcccagtatgaagcagaaacaagaagaaatcaaagagaatataaaggtatgtgattgaataactttaatttttttttgtagaaagcatggggctaaaagtattttgacataatttatccaaatttagcctggctataatttctgtaagccttgagttagtcagaggatgagtaacaatagagaacatttttaaaaaactaattacggttgaatattaagtctgacccaagaatatgggttgtctctcttattttggtctttcaacagtattttgtagttttcagagcatgaattttacactatttatgttaaattttttcctaagtattctttttgaggttactgtgaatggaattgtttccttaatttcattctcatttggtcattgctactgtataggaaaataattgacttttgtgtcttgattttgtgtcctgaaaccttgctgaacttaatagttctaattgttttttagtagattcttcaggattttcttttctttttgtattttctctgtgaagattccagaagtatctttaggattttctatgtatgagattattactgctttgtttctactcttatatttcatgaaatgttattaaaatccattgtgtatatcttcagaattaagagtctttgaccacagacatgttttgcattatattacacatttttctagagtataccatattcattaccatctaacctatttgatttgtgatactttttcaatccctatatgatactttcactggaaatcttattccaagtatttactcttatgacagcaggacagagtttgtttagttttgagtttatacttctgactagattcatatttatggttctaagttaatttacaatttagctaggtccttccacacaacttaaattatatgaataccttgggaattggatcacatcttcaggtaaactatcaatttgcggttttaaataaataaagagccaggtgcccatggtggctcatgcctgtgatcccagctacttgggaggctgaagtaggaggattgattgagctctggactttgagaacagcctgggcaacaaagggagaccctgtttctaaaaaaccataattagctgggtgtggtggcacccactggtaatcccagctactgggaggctgaggtgtgggaggaattgcttgagcctaggagtttgggctttggtgaattatgattgcttcactgcactccagcctgggtgacagagtaagaccctgtacctaaaaaaattttttttatattaagtaaattaaattgagtacctaaaagccattgataagtataagcaagtaccttttgatgggttttttgtttgccttgcttttcttaggattcttacaatatttttcttgaataagaatgtcaattgacattatattcgcattgacaatttgtgaatttgattccattagcttccatttaggatgatggcatcttcccactgtgctttgtgtgtgattatttaaaatttttgttatgaaatttttgaaatatttaaaagtattttaataatttacttccccagcttcagcaattaccgctatatggccaatctggtttcatctatgtccttatttactccacttttccttcagtggattaatttgaagcaaatcacagccaaataatttatatatttccagcagattacattttaaagaaagtcttgtgtttactagctacagtgaaactatcttgaatataaaggatactaggttctgtttggttttggttctacctccaaaactgagaccttgggtgggttagttagcatttcagccttagtttactcatctgtaaattgggagaactggactagaactagatccttgtgagttgcatgcaaaattctgtgtgaatgtgcttttatgtgaatttttttggggagaggattcacagagtattaaatagttttccaaaaaggttaagacccattaatatacaagaaactttctggctttaagagtctattattccaatgcatactctatatacagaaaataataatagtaatgttacattgttttaggcaaaagtctatatagcttatataaataaaagttaaatcttggaaatggtctttttttttggtgacagttacttagctggcttctttgaccattattaacagaaagcatttaaataacacctcttgttagtaaggttccaacgttacattttcttttatttgtctggagactgttgactaatctataatctaaattatatctgaaatgttgatgtaatatttgtcctcacagtagctggcatttgtccttcagttaaatggtgagataataatcagcagtagaaactttaccgtgggaaaggtgaactcttatcatgtgaagtacagtgtggaatcagtaactttctcacgctggtatggtatcatgttcttgctaaccttgtttgagtattcaccattgtttgctatcccatggtggcagtataactaatgatattttgcaaaaataggagagaactttcagatcatgaaatatacaggaagttgtttacatattacaaggaaggcaatattttcaccaaaacaatagcttgggcattttagagtattttagtatgcctcaggcactgacattttagccaccttctaatgaatgggcttgaagcagaactgcttctactatcaggtaatggttgaggggggatgtctattacacatgtactttgttttgtgtaaagtatgttctggaaagttacattcttttggtgagtacatgtaagtatttgagggatattcatgatttaaggaggcctgaaatgaatctttttgattagggaaagaaatattttgcagtgtaaatgattaaccatttcttccagtttacctgtttggtgagttcataccataaatgttacgatgtttggttttataaaagagtacctgtaagtttttagtttctgtgtggaagattttttcagagagaatacagatagccttcttgtattagaattttgtcatatgtggtttgaaactgttcattggagctgaggaattttgttacgtttgttttaactagatatgattaacaaaatgaccatagcaagagcatgcattgaaatgagagaagttacgtgtgtttgtgtctagtttgggtaatatgattcattcttaagaattcttcaaactttattataatttttggaaataacaagtttgtcagttgattaaaccagtgtcttgttcataggcgaccttacgcaattatatagcagaccaaatgtttgtgttgttagtgttccttttccacccctaaattatagaaggactaagagtaacactccatacagaaactcagtaactaaataaccatattgcaactcagtaacaagataatgaattatgctgactttttagaatagttctgtcccaagaagaactctgaagatgattcagccttctgcatctggatctcttgttggaagagaaaatgaggtatgcactatatggctaaaatggggtactggtgatacagtgtctacatcgaaaacatttctactattttcttggtcagaaacacgtaaattgttgaaatttggaaataatttgggaatcacaattatatatttcccaaagaagtgattttggttttaattgttcaatttaagaagttcgtcgggtgcagtggctcacgcctgttatcccagcacttagggaggccgaggtgggtggatcgcctgaggtcaggagcttgagacaagcctggccaacgtggtgaaaccccatctctactaaaagtacaaaaaaattagccgggcgtggtggcacacacctataatctcagctgcttgggaggcttgaggcaggagaatcacttaaacctgggaggtggaggttgcagtgagccgaggtcacaccactgcactccagcttgggtgacagagcgagactctaaaataaaaataaaaataaaaaattttttaaaaaataaataaataatttcagctaagctcttgaccccagtctaatccaaaataattgttgcaaataaaattcctaaaatgttactatatgttttggtagaatttttaattgtataacttttttaaagatccagagatgtgaaaaagttagatatgcgtactctttttttaatacataaatgaaaaaccacctaatttcttgttaattaaatcaaagtaaatacagttgataagtgttttcattatagctgtccgcaggcttgtccaaaaggaaacatcggaatgaccacttaacatctacaacttccagccctggggttattgtcccagaatctagtgaaaataaaaatcttggaggagtcacccaggagtcatttgatcttatgattaaaggtatgaaaaaatagataacttttgtcttaattttaaattatgatataaggaaaaatttgttaatactattatgaattctgccaattactgtaatctggggatagtataacagcactataaatgtttttgtatgtgaccatttgtttgacaagatccatgtgtggatgaaatgttaggaaaaggaggcccagtgcagtggctcacacctgtaatcccagtagcttaggaggttgaagcaggaggatggcttgagtctagaagtttgagactagcctggacaacacagtgaggctctctctgtatgaaaaaattagctgagcatggtggcttgtgcctgtattcccagctactcaggaggctgagtcaggaggatcacttgagcctaggagtttgtggccgcaataagctatgtatgatagcaccactgcactccagcctgggatacagggcaagacccggtctctgaaggaaaaaaaaagggtagggggaaaggatagttattaatatgacagctctgataattggattgccttgtaggggtttacaagacttggaaataggctttttagaagaaaaatgtttagataatgagttcgaggtatgaaaggaatttgaatattccaggagagtatggcataaggaaaccaataaaaatatggatgaagagtaaagatgaatgagaagaattatgcctataataagtactagtttttaatagaatggtagtatacatcagaagaagaagcaactgatgttttgtaagcattatggaagattattatttctgtatgaattatgggtcattgaatgttaagtactgatgataaaattgaggcctagagaagttaattgacttgctgaaggtcacagtaacatttggactcattttgaattgccttgaagacaggaagaagagaaatagatggtaggatttttattaggcaaaattaggaaaggttgactggatagaaataaagcagctctttaaaaatattgtagattgaagagcaggatttgtgacactcatatctgattaggttaaaaattaaatcaaggattagttaaaataaactgctaaagttaaatatcaagacaaataactatatatcatgttggtaatataaccacaggtggaacacattatccttgtaaccctctgcgatacatggtaaaaattaaaataactgcgaagaaatcccaaactttattacatttgttgtttgaactttattatatttgttgacagtggtattagtgtaattttgaaaaaaaaaaaaaagttgtgtatattttaggactgagcaaatgaataacatgttgaagtattacatttcctagcactgcccctaaacaggtagaaacaaactacacctctgtagaaaggagcacaccgtgtatccagttcttggtttataaacactattcttcactaaagttccatggagaaattgctgattccaggtcaggggcagggaaactttgggtgatcatggattatcttttgacagaaaataaggaagtactcaaaaacgggtggacatgttgaaagaacacatgtcatcttggaaggattctcacagactacagttgggaaaatttgagcatcaaaatgaataacgtcaagaatggattataatacattgaataaaaaaggatatatgagtctatactgataaattttcttttaaattggggtaggaaaagtttttatttacagaataatgctaactactacttgtagaaggaattacataagtgaaaaaaaattggttttccatccaccgtagaagtaatagatataagccggaaacatcaatcatcaatggaattaaacttaggtaaaaagttgttggaggacagggtattgacacagtctcaaatattttgctctacagatcattagttaattactaagggaaaaagttatctttacaaggcagaaatctgatagatagcatcttaatcaaatgatcaaatttaacatctccagtatcatgacaaattggcgtgtgcttcttgatgatatactgaggatacatacttatatagtattcttatactatacttatatagtattcctgccaaaaatgtttagtttgaatctaatcatggagacagaaataaaaaattaaggacagtgtacaaaataattgatctggactttgtaaaaatgtcagtgttacataaaaagacacgacctcacaaaacaaatgtattgcaaaaatctttaataatctaggtggaagatatatacgtattgtacttttgttgtaattctgaaggattgaaatcttggaaatgttggggaaaatagaataatattgattttattttttaactttaatcttttaaaaatgagtattactaaacaatatgggggtactaagattggaaatttttttgaaacaaattactgggttttgacagtaatgatttttaaagttatatttaaaatattattttagaaaatccatcctctcagtattggaaggaagtggcagaaaaacggagaaaggcgctgtatgaagcacttaaggaaaatgagaaagtatgtattgagtataatttgtaccatttttaaaaattccaggattgttttgctgcttagcatattttattagagcaatatgggctagctttagtattggcttaagaaaagtttaagtaaaaaggcagctcttgacaattatacaaaatgaatcccgttgtgttgagagtcaattctatgctgcatgtcctccatgttatatacttggaggtatgtaatttgatttatagcatagcaaatctatggaatactgaactttatttatgtaatacagcttcataaagaaattgaacaaaaggacaatgaaattgcccgcctgaaaaaggagaataaagaactggcagaagtagcagaacatgtacagtatatggcagagctaatagaggtaggtaatttaatagttatctggttcaaatttatgtatttttctataaagttgaggtagtgtagtgtgatcactttgaagtgttagggctctggaatcagatttcctggatttaagacttaacttccttcctaacaccattaagtttgctgggtagagtgggtttatccggtcagggcttcatcttcctcatccacaaaatgagagtaatgatgcctaccttatagacttgttatgagaattaaatgagttacaatagatggacaattgcaaggagtacttgcacagagtgaaagttcagtaacttaattattgttatgaagcaaaagaccatattttttggtagagttattaaaaggaattatccctggaaaatatgtatagcaaattatttcatagttgacacattttagatagttttaattttaataccagcttgacattactgtcatttataaaattgataatttgtacaataaatgagttttgtggttttatctgactttaaaacattttgtaagtagctaatatgtttgtaagaattagcctggtgttgctttatcagacttgaccttaaaaaggttttaagatttatttattcatgtttgcaaaaagtttttcttgctgataggaagaaagtttttcaaatcaaaacttcatgtaactgaattgtgaccttttacatttgagatccatgatagaattaatatttgaagttttcatttggagatactgtggtagctgtcttaactgccttaaaagaattagtccacagctgattggaaatgtagaacacctacttgtccttgcagctgattggggaagtacctgtttatactctgaaataatttcagtgctttttaaaaaaaaaagacaaattattaaacactttgactttgctgactatgatctagcatggtagagactttgatataatactgtttataaatgaatttattgaggggcaagatgaaaaaaatctcatagctatatcagtatgctatacgggtcagctatatcagtatgctgatcagcttaggttttaacatttttacaataaattattggtttattctttaaaagagactgaatggtgaacctctggataattttgaatcactggataatcaggaatttgattctgaagaagaaactgttgaggattctctagtggaagactcagaaattggcacgtgtgctgaaggaactgtatcttcctctacggatgcaaagccatgtatatgaaatgcattaatatttgactgttgagaattttactgccgaagtttacctccactagttctttgtagcagagtacataactacataatgccaactctggaatcaaatttccttgtttgaatcctgggaccctattgcattaaagtacaaatactatgtatttttaatctatgatggtttatgtgaataggattttctcagttgtcagccatgacttatgtttattactaaataaacttcaaactcctgttgaacattgtgtataacttagaataatgaaatataaggagtatgtgtagaa

SEQ ID NO: 382 - DNA, 32744 bp, Homo sapiens
  source 1..32744: mol_type = other DNA
gggcgggagctacgccggcccaagccccgccggggaccagcgagccgggaggaggagcaggcgccacagccgccccgcgccccgcgcccgcttgtaatccggtccgctccttattcagccgccgggaactgcgaggaggcgtcatgtagcagcagcagcaaatccgcctcgcatttgcaactcttttttttttttttggtggggcggggggcgcgcggcaaaattctgtctccgcccccccttttcttgcccacttccatttgcaagctgcatctgcctctctaaaaaaattgaggagttcggggaagggcagggggccataaatcagagttggacctgcaataacccccacacctacagggcaaccatgaccgaggagagctctgacgttcccagggagttgataggtaagattcacgcggttgttggttttccaccttcctctgcgtactcctcacctctctctcccttcccacctctgctttcccgcaggtctcgagaagtcttggcgccccttagggcagagtggtgttgggcagggtcactgggggtgccgggaagtttgttcccatccgaccgcctgtagagccaagtgcagagagggaaggcttcggggaggaatcgggagtcctcgggaggtgggtgggaggagggtctcgactgtgagccctgggcacctcctcttgcccggaagcggggatccaggttggcgaaagaagggggcgggccatcttagacttgggagttctgcaagcgaggggagccctttacagctcccagcccactgccccaaactcgggaaagtccgggaaagcctattggaaggacaggtggcgagcgcacagtaggtcgtctccggcacgtgtcaggcgctttcctgaaaatgccccgcgggaggtgatcttctgacacgcagacttgggggagtgggcgctagtctggtaaaatgactgggcttggcaaggtgtggcttggtgtagccagctgggagcgaaagggttacagggctgacgcagactcaggccaggaaatagagggttaatgataaaagccttattttaataatgattaacctaccgattctccctataggggatctcttagggaacccgtgtgtgttacgctgtgcaaggtgacccattgtttgagtaccttgaggtttttttttttttggtggtggtgggggcggggctggttaagtcttggggtttaacttaattatctggagggttaaaatggcagagctgaaataggatgggagagtgttctgaaaacctagcgtttaagcatgtatatgtgtgtagcatgttatactgtaacaaggtatgtgcgtctgtgtacagatgtgttttgagccctagtgacctatattccctcctgtaccattcttggcacactacacagcctacagctcacaaagatgatgtttaatcggcgctgacaacaagaggaagttctgagcacccgttgatctccatgtgtggaatttgcccctctgttgtttcttttagctaataatactttggaggaatttgtgtatgcccttccgttggtgactgttaactcagcaggtaaaacttgatgtagagaggctgttgctaggtttgtatggaagcccctacttctgctgaattacagacaaacctgatcttttaccagaatttacagtatgaaattattcacagacgcacgcgcgtgtgcgcgcgcgcacacacacacacacacacacacacacacacacgcacctctcatcatgatcccagcagatcctcttctctctccccaaccctgtggagtctgcatcttttgctggagtgagtgacacatccggttctgggaggctgcgacctttccaacaccccaagcaaacgccagaggctctgaagacgcctccagaggtcctgagaatgagtgtagggcagggcttgcctggctggtcaggggataaggatggctaaagtgggtggcagatttttactttatataaggagttgtccttaagtctggaaatggaaagtgtaggtaattacttaggcccaagagaaagagtgaagggtagagtggaaataaggtgtctgggtttctattcatggttctcaaaaggaatagtttgtatattttaaaagttgagtttgacctttatcttgaaatggaatttttgtttttattaagtattgcctatctctttcaagagagtgacatattatgcccgatatgatttttctgggcctttcagtggtcaagttaggctgggatagaataaatacctgcacctgctttcctctaaattcaagtgctcacaagagttctgctctgatcaattcaaaatggcgaccgaccacatgaaaacctctatatattcccttaagattccctcaagatatttaaaaagtgttacagacttggctgagcgtggtggctcacccctgtaatcctagcactttgggaggccgaggcaggtggatcacctgaggtcgggagttggagaccagcctgaccaacatgaagaaacccggtctctactaaaaatacaaaaattagctgggcgtgggggcacgtggctgtaatcccagctactcgggaggctgaggcaggagaatcacttgaacccgggaggcggaggttgccgtaagccgagatcaagccatttcattccagcctgggcaataagagtgaaactccatctcaaaaaaaaaaaaaaaaaaaaaaagtgttatagactttatgtagaaacaatttaaatgtagagaagaataagaagactatatgtcactcctgttaccacttagaggtagttattttaaagggtatatgattttccagtctgtttccatgtgtatatgttcttaagtcaatttcagatgcccatttcccgcaattcttttttaggggagggaggagtggcctgtgcttgtttctcgagttctgataagataggagctttgtgaagaactcatagtgcagtgagctcttctacatgttcccttgccccaaacattccacctccttgctgttccttgaacaggctgtgctttctcagatttccatgctgttctttatgcgtacactgtctttttctccccgttttcactctttatctcagcagctctaaactttcatggcggtatttccaagaagaaaattttgattaccccttattaaacatatatttgttaaactacatgctccatttagtgtgtataatctaaaacacaaactgaaacacacattgtaagtagaaatgaaaattctattttcttctttcatctcaatggattatattgtacactctactttggaaaccagtgatcttatttcctatgccttcaagattcagctcagggatcctctcctccctgaaacctttgcgtgcttccgaatccatgatcttatgcattgtgtgtgaatttcttttatgacatctctcagtgacctccactagattgcaaactcctgtgaaatgcaaagaccatctctatctagcacctagtagagtacctgacatacaagaggtactcctatgtacatttatttgttgaacatgtgaatagaccaaaatgattataatacagaatacagaggtatgggagcatagaggaggggactgtattttggaggataagtagaatataaccaggaggacaatagggaaagggcatcccaggaaagagaataatagatacacaatcctaggggtgtaaaagatgaagatattaggaataattggatgtttaggtatgtgctgagaagtcacactgaaaataaatgtgaaagaccttgaatggcatgccatgagttttgggtttattcaaaaatgactgcaactcgtagactgggagggacgtgatgaatctcacagttttggaagagtcactgtggttatggaggtgacagtgggctgatgggttagaggccatggacttagtcttggtgagagattctgaggcccttactgcagtcatgcctaggtagtcaggagccgtggaggaggtagattttaggagactgactttctgtctgagagaaaggagttggacataagcattttccagcaacattagtgtccagagtaggagataatgagtttgatttcagacgtattcattttgaggtactcatgggagccctaggaagacttttccaccaccatctgaaatgtgaagtctccagatttctccttctattgcctttgaccacttcttgggggtattgtgctgtcatgattttggaaggacagatggctgggagtgcctttgtttgagtaaatcatctggtatagttctggcttatttttatttttttgagacagagtctcactgtgtcactcaggctggaatgcagtggcacgatctcagctccactgcaacctccacctctcggtttcaagcaattctcgtgcttcagcccctggactaactgagattacaggcacgcaccaccacacctggctaatttttttttgtatttttagtagaggcagggtttatccatgttggccaggctggtcttgaactcctggcctcaagcgatccaccttcctcagcctcccaaagtgctgggattacagacgtgagccaacgtgcccagcccggttctgttctgttttgttttgccgtattccccaaacatcatgtcaagacttactcatagagaatgctaatatttgtatgacactatggtgaacccagaggctgctgggcaccagaggtaaccagccaggggcagagggaatttatgaattcctgttgtgttctgcatgcaacgtagtgtttcatcatactgcccaacttcactgtttgctgttctttgttttttcttttatatgtatcttattttccaaacaagattatgtcatgccttgcatgggctggtattatgtcgtgcttttgtgtttgcctcagcatatcaatatacagtacgaggtacaaagtaggtgtttattaaatacttgatgggtgataaccatccaacttgttaaaacaagtaaaaaaagacaaacggtcgggcacggtggctcatgcctgtaatcccggcactttgggaggccaaggcaggcggatcacttgaggtcaggagttcaagaccagcctgaccaacatggtaaaaccccatctctactaaatacaaaaaattagccggacctggtggtgtgcgcctgtagtctcagctgttcgggaagctgaggcaggagaatcacttgaacccaggaggcggaggttgcagtgagccaagatctcaccactgcactccagcctgggtgacagagtaagactctgtctcaaaagacaacaacagtaaaaacaaccaaatatactcctccaaatgcttactcctcctcagtgctttttttcttattaataacataattccttttttttttcagaaagcataaaggatgttattggcagaaagataaaaatttcagtgaagaagaaagtaaagttggaagttaagggagacaaagttgaaaacaaagtgctggtaagtattgctgtttatttttattaaatgtttggaaatgaaagtgtgttttcattgtttagattgcttaattttcatgcagcattacttctgtgttttatatattgttcaaaagttctgatgaccattttgtcttaggttaattggaatatttctttgtcaaaagttaaaaatagggtaatttgaattttaaagatcaaaggcttttagattgtatttctcaaagttgtaattgctgcctatatttaggtaatctcttagagcctgttttcataatattcagagtttgatgttaaatggaacttttttatttggtgtgtggtgggtgatcctatgactttattcataaagtcttatggaggagtttaaaaagttcatctcatgttggtttaattacttaattagattttctcagatgttatatatgagtccatctaaggggtgatgagctaacaaaacattgtcattttacttagggtgttggtgctttggagggaaactcctgctgaaggcagtatctgctagtgttgcgactggacttggggttccttctagtttgtgagaggagatgctgagggattgggccctgctgcagaaaacttcttagagaggtgtcagtgacagagttgtacctttagagaggtgaaaacattttgtgatattttaatggtttctaggttgagattgtggcaaatctaaatttaagcttaggtggaaagaatattttgatggagagaatactgtttaactttttatcatggatattttcaaacatatgcaaaaagcagataatagtatatcgaactctgtgtacctgtccttcccagcttcaaccattttcagcattgtactaatattaaatatcttccccatggtgtttgtttgttgttgctgttttttttttcctctggagaattttaaaacaaatcccaggtatgttattgaaagagtataatttcttaattttttaaagtctttttgagacaggatttcagtctgttgcccaggctggagtgcaatggtgtgatcttggctcattgtagcctcaacctcccaggctcaagcgatcctcccacctcagcctcctgagtagctgggactacaggtgtgagccatcatgcccagctaattttgtttattttttgtagagacagggtctccctgtattcccgaggctggtctcaaactcctggactcaagcgatctgcctgcctcggcctcccgaagtgctgggattacaggcatgagccactgtgcgtggcctgaaaaagaatatttttaatattccattgcttcagttaaagttgccaaagaatttgaagtgtctttctgatcacatctgtcttgagaatcttctaaaatatctaactccaggatatgtgattgtcttttcttgttagtaaggattatgcttgtgatggatgacttctgtttctatgttgtctatatatacaagtcgggatggtaaaggcattgaatgggaaaacttgaatggcttttgcccagcaacaaaatgtgcttatgtaaactgcatgattaagttatcagtagaagaaatgattggtgccattgttctgttgtatttaacttcagtaaaggtgagatttccttaagttatgtttttcttgatgttgttcaacaatgattgtgctattttttggaagtggtagtgtagagaagaaatattgtttctgtcatttgcttttttacaaatttaaagtaagtttttaataatgtagtaactttataagatgaatcaacttctctacaacttaaatataaggtagtggttgctatgacagtctaaaaaattggggcttggtattatttgatatggaaattattattatgctaagaacaaacccacatcatgagtgcaatttaccatgttaaaatttcaaagacaaatttaaatgtccagtataaaattagcactatttaaacatgcttatgattagtacttaattgtaagtttttttggcctcatctaacagctggaattgattaaagttgtaaccaaattaaaaatgtatttgagtttaagcatttatctccccaaatatggaatctaagcagtttctagaagcatggccggaactcattgtggctgttacttacttgcatgggcaggaattattaatagaaatactcaaggtctggctttctttgacaggcttcaagttagaacaagaagatgtatgaagtaacctcaaagttgtggatttctgagtttctgagtttagagaaatttaattgcttaatccattgttagcctactaaaatggttcataaatgagttggctgaatatctacagtacgctttttgagttgtgcttttgttacttcccccattgcccaccattcactccttttcttcttataaaagtaggagtgtgctgtattttacgtggttctttcttcttacacttgagactttatactatttctagcttatcttttgtagagggcttatcttcatcttcctataatcataatagctaatatttctaaaaatctgtttttgaagtctagtcaagtgaagcaatgggattggaggaagagcaaagaaatctataatgagttgtgatcaattagttgtaaacacccctacactcagaccagccatgatcataatagctaatatttattaaacactggccaagtgccagagactgtgctgagtacttaattacgcattgccttgttatatccccactacaacgctatgaggtaggcactttttacatctccattttacagatgaggaaattgagatttggcgaggccaaagtaaattgcttcacatcatttggctagttaataacagctgggattcgaacccagctctgcctcactcagagcctatctgctttgcctttgtggtcaaaaagaaggcagctgttactttgttccatggttgctgacttcaaacaatgataggggagatttggactttagagtctctctgtctttgattgattgatttatacactagttttatatttattgagaacctgctgtgtcccaggcacatggtgtatacaaaatagtcctagtctttgacttcatgggactcgaagcttacagtctagttggggaggtaaacatgtagccaggcagtggtttcagatgtgctatgagtggatgaatcggggcttcaggagcacggagaggaactcccaactcaggcctgagaatcagggaagacttcagaaggaagataagcttaagctggcgttcactggatgagtaggagttagccaagcgaagagagtggagacatgttctggacaaagggaacagaatacgtctggaagcctgagagagcttatgttagagaaacatactaaggtacagctggggtaaggcatatacagggtagagaatgggcaggtgtaaagcctgagtcctgtccttgcagttgggatgtcaggtgaaagttaggactggttaaacaggtctcttcttgccacctgtgtataatgaaatattaaggctcagtggttaagggcccagattttgggttcacactgttgctcagtaactttgtgacaatgttaagaatcaggttttttttttttttttttccgtatggaaaaaatcttatgttataacagtatctattggtatgtggttgctttgcatatcaagtggaatttatttaaatactgcatagcacagtggctgcatgcagcaaacacccaaaaaatgataaggcaagaggaacaaaggggtcctgcattctgttttctccgtggtgcggaaagtgccattccttctgaagcccaagtatctgctgcctccattgacaggttgaggtcagttcaccataaggccaagagggtttattcacagtttgtggcaccttattagcaggatagagggcaacaagctggatctaaaattcctaaggtatgctctcctcaagtgaaatcagaaatgctagatgttctggggcaggagtgttctattctcaaataaatttggcagagtgttaaagataaatcagtttctttactgcatgagttttcagagccattaatacagccctgtgcattgtaaatttctaagaattggataaagtatgctgttttttccaaacttatttagccagagaccctaatgaccatgggctaagaaggaacaggccagagatgatgcctcttgggacagttaagaaaagatagaacaggcttgaataggctctccatcattaggagtgttctcctgaggaatggtcctttagccatgttttttaaaatctacattgtgagtagttccactctgggctacgttggcttgacatgtcatatgttgttgaaatacctttctctgttgtctttaggggatgtcattagaaagtgattctatgtttatttgactctaattcccttctcccatttgctaaatgaatcttcacccaatttttatagtacttggagtgtaaaaaatgtattttaacttatgtattttttaaaattaaactttttcatttttaaataattgtagatttgtctgcagttatatcagataattcagagaggttatcttatgccctttatttagttttccctttttgcaaaattacagtataatgtcacaaccaggatactgacattgattgacactgtaaaatgcagatttccatcaccacaaggacccctaacattgcctttttatagccatacctagcattccccacttctctgatccctggtagccactaatctgttctccatttctataaatttgtcattttaagaacattatataaatgtactcatacagtatcccctttttgggattggttgttcttgctcagcataattccctggaccttcatccaagttgtatcaatttagctaaggagtacttcatggtatggatgtaccacgtttggtttagccattggctagttgatggacatctgagttgttttcagtttttgtctattaggaataaaactggtgtaaacatttgtgtacagatttttgagtgaacatacttttccttgctctgtgataaatgccaaggagtgcaattgctggtttgcatgggaattgcgtgtttacttttataagaaactggcaaactgtttcccagagtggctgtaccattatatggttttaccagcaatgtatgagtggtctagtttctctaaatccttggcagcatttgtcattgtctggacttcttttttttctgagacagggtctcactttatcacccaagctggagcacagtgacatgaacacagctccctgcagcctcaatctcccaggcttaagtgatcctcccacctcagcctcccaagtagctgggactacaggcgtgtgccaccacacccggctaatttttgtactttttgtagagatgggtttcaccacgttgtccagctgcttcttgaactcctgggttcaagcaagctttctgccttggcctcccaaagtgctgggattctttttttttttttttttttttttgagaactaagttgaaggaaaaacaatgtctggcaggagcaagagccctgatgacctcttgtttcccacagttctgctgttgcctgtttgggggagaggaatgtggcactcctctctccaggatggtggccttaaagtgtatgaaaagtcattcctagtctccactttggtttcttctgtttgatttggaatttgggttacatcatctttgccaaccccttcttcttccacaccctttgtaaaatgggtcagaagcaggacttcttttcttcttaaactgagcaagtaggggaagtggcatacaaatcgaactattctgttttgtttacctattctctttaaaactgcccatctgttgtccatttgttttcttttgaaaagttaatctgaaatccacccccccggcccctgaacgacagggtctcactgtgttgcacaagctggagtgcagtggcactatcacaatcacgagccttgctcaagtgattgcctcttgcaatcacttgaactgagccttgcccagttcagcctcttgagtagctgggactacaggcacatgccaccatgcctgcctaattaaatttttttattaattaattttttttagagacagtctcattattttgcccaggctggtcttgaacttctggactcaagcgattctcccacgtcggcctcccaaagtgctgggattataggcatgagccaatgcaccaggcctgaaatccctttaacatatttttttccccttggctatttatttatggcttttgaacatcttaattagactggattggagtaactataagttaacttaaaaaaatgtcgaaaggcataggggtattattttgggtaacgtatccctaaaatattttggtggcagtgctgtatttcattaacataaagtataaactctattccacctgctttttttttaagaggacatgaaaaaagaaatatctctcatatagaagttttggaagtatttgacccacttagtcacaaattatcttcaactcagatattctgcaatatggaaactattgttcttttgcagtaggccatactcattttgcatgaccagtctgtttaatgcttttctagtttgccagtctctagtacctaacttgattcagcagtatgacctgtgccatagtcacttttcagacggatattcatgctgaaatttgtgttcagcttcttaaggcaacatcagccttggccagtggttttcagacttagtgcctgtttaaaacaattttttttttcatggaacccataatgtagtaatgttttgggattgtattttgggagttcatagttaaacctataatagtgtaaacctaatcactgatttcagtgaggctgttttgatgaacacaaattagaaatagtaggggagatttggtttttgctctggttgcatggaatagagagactcccgattcaccagttaagcagtacacatatcacagtttttaaaataactagtcttgcaatctcaggatgctttccaagtaaatagagacggtaggggaagctttattctgagatctgcacaaaagtgggttatcctggcagcacagtgtacctcgtagttgttctctgatgtgtaaaacttggtgtaacacatctgagtgtgtgtgttggtgttttattccagtagttaaaatagacataagacaaattcatataaaatgtttgtagactgcaatgtcttctgaagaatgctgtcagaaaatcattattctaggtccccaggtttacatccctctgtgagacgctcttgtaccagttgttgggtaatttgaacagttgcctttgtggtaccattaggagtctcaacttttaaggatcacttacagttctgtgcataggtgattttcaaagcacctgggtgaagttacatggctctagaaaattgagctttagaaaacagcaataacactgaaacaatctttgggagtgagttatcagagaacgtgcattgttgccaaggatgctggcataaattctgggaacctcaaaataaaagaatccatatttaagcacttcacaatttacctgaaccgaacactggagtcagttcctacctgtttccactaatctctgggtaggggctgggggcaggctctggccctgggtgtgcgttttcaggaggcagttctggctgacttgaacttgttacctgagctgcatttacattctactctctcctcatctgcaactgccccagtttcttctgtagttaggataggcgagtcaaatgaccttaggcaaagaagctgttgaacatacaccaggctcggtgtaacttttcattgttctaaaaagatactctttttccagtctctgggatttagccacccttggaccagggcaattaggtatataccctggagaggggaggaaggtaagtgatgggggggagtaggagagtagcatgaaagggacattgtggacattaagaagccaggaaatctaatcaaaatatggaatgaatagggagaactcttctttttttcatagttataaaatagttacagagaaaaataaagactttagtaaaaggttactgtaaaaactttaggtttcatttcattggaaacgctgttaatatctttgttaaaatagatgaaaaatgtagctacaatctgaaggataaaagatttttgttccctctcttatcccctctgctttctaaaatgctttttttttttaatagaatataagaatttggattggtatatatggggtatatcattgtctaaatctttacgttactgtgttttatttatttttttccctcttgatagaccactttccccagctctttgaggaaagaggggcaaagaggggaaagaaggatgcttggtgtgtgtgtgtgtgtgtgtgtgtgtgtgtgtgtgtgtgttttgtagcagtagtagtagtggcagtaggtaaaagagtgttcactgggttattttcctcatcttgtttcttaggagaaggtttttcttatttatttttgagacagtgtcttgctctgtcatccaagctggagtgcagtggttcaaacacagctcaccgcagcctcgatatcctgggctcaagagatcctcctgtgtcagcctctcgggagctgggactacaatcacatgccaccatgccgaatttttttttttcctagagatggggtctcactttgttgcctaggccagtcttaaactcctgggctcaagcagttcttccaccttagcctccccaagtagtggggttacatatgcgagctggtcttcccttcccttcctctcctttcccttcctttcccccttcccttccctcttcccttcccccttcctcttcccttttgacagggcctcactttgtcaggctgatgtgcagtggcatgatctcaactcattgcaacctgtgccacccaggctcaagtgatcctcccacctcagcctcccaagtggctaagactacaggcatgggctgccccacctggctaatttctgtattttttgtagagatggggtttcaccatgttgcccaggctggtcttgaactcctgagctcaagtcatccacctgccttggcctcccaaagtgctggaattatgggtgtgaaccactgtgcccaacccaaggtttttctttttttgaaagcattatcacttggtgaacattggccagcaagtgtcttggtttctttagatatgtgtagatgcacaggacgtcctcttagaggtaggaagcaggcatgtacacatgtcctgagctgtacttacagcctcaccagcctttggcaagggtttgagacagatgtgcttagttcctgctaagaaggcaaatgtgtctatttctgctgatccctgggccctggagtctcaggagacatttatggacattgactgggattagtaggtatatccaccagacaggatctggtgtagacagattgactcaaacagactctggggaaatttattgagaccttgccctcattgattgctgcctagaggatcttggggctggaggactcttggcagccatctaaccatgtgtcctaacctaggagaagtttcttctgtagcacctccgacagctaggtatctactttttgcttcactattcccagtgatgagaaaagcaaaagcccccaaaagccctgtcttcttttgaactgggatctgcttctcactctccatttcttcttgcatagtctactggaatatcacagaacaatttttctccctcctatccatgagtgcagttcaagtatttgaagaaggttatcatacttttctttggtcttatagtcctcaggctaaataggctcacatcctggagtctcagtccttggaagatgttgttttcagacttatcactattctgatcaccttgctttggaatcaccctactttgtccatgaaccttttaaacaactgttggtgtttggggatcacacatgcttggcgaacacccttgaactgaattaaacagactttctcagtctttaatgggctcctgtggattgtgccttttgaagagggtatggagcctgtggcatcacagcatctgtgttcctccaggcagggtggggaacatcaagctaagtgcaacctgcctggtgaagaatgctacctatgcattgcttggacaaaaggttttgttattgttgttttttaaattttggaagtatccctgatatttgcattactaaaacaataataaaacataggaaagaaaaagcgaacatcacctaatcctatcaatttagatataatcattggaaaaaaaatcagtatttttcatatttttctgtgctaacttacataaaatatatgatatattttaaaaaatggaatcatgaatactattttgtggtatacttttaaaatttaatttttgaggtcaaagctttctagggcagtagaaagcatgatactccatttacccactgtagaggagtactgtagtttatctaaccatgtcccttattgtcagataatttaggttatttccaatattttgccttataactgtccatgtcctcatatttatttctcttggataaattcgtggaagtggaatcattgccatcattgcctaataggcattttgaaggatgctttttttttcacctgattgttatttaggaagtctcaatagagaataaatcctccaccttgtcaatttcattgtcttaaacaagagtctacttggcagaatggcttgttctctttgcttggatccgtgtatttcttagaccagtgctccttggaccctagctcctgaggcaaacctttttcatgcaatttagggttctttcagatctccctgtgtggaagtgttgtcttctactacagtatgtttgctggaatgagaaagtcctgtgacttcacttgtggtttcagagtcacagcttccaagtatcattgtcttggcagaatcagccatagctttttccttggctgaatcctaggtaggtgtgagcctgtattatatgattcagatctttgcccttgtcgtgggactttcttaccttgggcctttgaatgctctcataaatggtagttgagtagattcacaaatgataaggcacatggcactttcattagatgaaatgtaattaacaagaaccataagctaatatgcatgtagaactagtccaatgtcttagaagataatttagtatcataatgaaaggagacattgtttttcttcccagacagttctgaaggcagttgattttatctgtatagccaacaacaatttcttaagtctcatggtccttccccactccactagaagctgcagagtagtccttctcattctcatttactgtcccaatttcctgaccctttcactatctccctgtcctgggagaggggtgtccaggtgatgaggacctatggcctcttttctgccatgaggagctccttgtggagccctgtcctccttgctgaggccctcaagagtgcagcctgcttttctgtgtcctttcaaagctaccattgtgtactatgttgcttgtggctgtcttttctttcaagcctggcagataggatgatattcctcagggacctccttatttgctgtctcagaaaacaagcacagaggactttcttagttaccctgtagaacagacaaagaaaatcaagacgcccagatgcggggaagtgactgagaaccttgcaaggttcttttaaggcaatctctctgctctttgatgcctaaccttatggggcacagccacactcacttgcagaatctgagctaaggtgtggccaggagaagtccaggccagtgaatgttatcagtggtcatttcttggtttcctgaatccatctgtcttaaatcagctgtcactagcaaccaaaaaaagatcttatcatctgtcataggcatgacctgaagagaagcagctgtgctttgttttttgctaagtcttgggcagttcagtttggcacttagagtattccagctccttttcttataagaatatctatctttatctatctatctatctatctatctatctatctatctatctttaactaactaactaactaactaactaactaaagcattttaaaacgtggcatctcgctttgttgctcaggctggtctccaactgttggactcaagcactcctcctatcttggcctcctgagtgtctgagactacaggcacaggccaccatgcccagcctcagctccttttcttttaaatctcttggtccaatttatattctttgccagcatccttgggacagcacaaatgttgaagtttggggaaacattttgtacaactttgttcactgaatcacagtcactgcttgtgctgttgataatcaaaactaggctgcacagagtgacgtagtcacatatttggcttgggtgtacagatgtttcccttcaagcatcttggatgtcttgctccttatcagaattttatctcccccaaattcattgtttgtgaattaactgtaaagttctgggagcgatttccttttcaacagtttgcctttctagaaaaaaacttttggagtttaaatagcacttaaccctctatcattttactctctctgaagtggtctctgtggagaacatgttgggtcttctctgttcaatatctctctctctctttcttggcaaagcctggatgcgagaagttggtccaatctttcctgtccagggttgcttgttaatacagcatctggagcaaaggaaaggctattagcaccttgtcacttggagtttcttaagcattgttccatttatgtgttctttctgcagagatttaatgaaagtggcatctgtctttacacctgacatatgcaggttgtccgcagaactgaacaagtggtgtcagcaacactgtatatgcaggaaggcttcatgctcacgtcgttttttctgtgttctctgggagtagccaacttctttattcatcagagtagggctttacattttaatattctagagagagatgcttgtggtgatatatttagccttaaattcaggaatggcttcttttttcaatgtctttacattttacgcctcccattttctgtgttaataggtaagtgtgcctacatttaaattctgaaatggcatttgctaacatttaatcttggccaagttatttaacttctctgtgccttactttcttcatctgtaaaatgggtgtaataacaaaaaactacattgtagctttgttttgaaaattaagtgggatattacatataaaatatttcataatagtgcctggcacatagtaagtcatgagtaagtcttagctgttattgttaggggtagtgtcgtgataatgctaaatgctttgattaaaagaatctaattgtatatttgagtcacagattattcagatatattttatataaatatttcaaaagaaatacctcaactttgcatgtcttcctggccctgtacaaggtacatgttgttatgttttctctgctcagagctattttaagccagtacagactgtctacagaaatgggtttagaatgttttttcactctgctgttcttaaagagggtacactgcttttgagaaatcttttttaaagaaagggttcaagttcagtgttgagaaatttgtctctgaggacaacgctgtgcatttccaatacgtatctgtttttcatcttgctttcattgcagatctgcatgtatttagatatatgctcaagtccctctttcacttcccagttacttagagtgaaaaaaagaaaacatcagtagttggtgcctgttcattcacttagggctttcttggtcctttcagggcactgctgtctgttgctgttgcctcactcagtttgcttcctcttggatttcagttatgattgcttttttttttttttttgagacggagttttgctcttgttgcctgggctggagtgcaatggcgcgatctcggctcaccgcaacctccgcctcctgggttcaagcgattctcctgcttcaaattcccgagtagctagtattacaggtgtgtgccaccatgcccagcttattttgtatttttagtggagacagggtttctccatgtttcagggtggtctcgaactcctgacctcaggtgatctgcccgcctcagcctcccaaagtgctgggattacaggtgtgagccactgcgcttggccgattgcttttattttatagccggtccttgatcgggggtgcagggtgcattatctgagttcattggtgtgtgtggctctgtgtctccatagtcagaaggattcctgggcatgctggattcttttttttttttttttttgggaaagagtctcactctgttgtccaggctggagtgcagtggtgcaatcttagctcactgcaacttctgcctcccgggctcaagggattctcctgcctcagcctcctgaatagctgggattacaggtgcctgccaccatacccagctaattttttgtatttttagtagagacggggttttaccatgttggccaggctggtctcaaagtcctgacctcaggtgatctgcccgcctcggcctcccaaagtgctgggattacaggcctaagtcacagcacccggcccatgctgggttcttaatctccaggctgtgctggactctcaccttctaaccaaccttgaggtatttcagtcccagcactattgacattttggtcaaaacaattgttgtgggggctgtcctgtgcatgataggatgtttaccagcatctgtggcccctccccactagatcctggcaccatcacccactcttcccacagttgggataattaaaaatgtctccagaggctgggcacggtggctcatgcctgtaattccagcactttgggaggccgaggcgagcggatcacctgaggtcaggagtttttgagaccagcctggccaacatggcgaaaacccatctctactaaaaatagaaaaattagctgggtgtggtggcgggtgcctgtaatcctagctacttgggaggctgaggcatgagaattgcttgaaactgggaggtagaggttgcagtgagctgagattgtgccactgcactccagcctggggcgacagagtgagactccacctcaaaaaaaaaaaaaaaaaagtttccaaacattgtcacatgtcctttggattgtagaattggcccccccactgagaatcattggtttagatcagtgggtttcaaatgtcagagagcaggtgtgtattttatcatatttagcttctagagttatgtctaagtctcgaaatttacagttttatgatatagccattgttgatttatctaaaagtctatatgcatttaaaatgcttatttttgaaatatttagataaccaaatctgtatgtaacaaaaataacaaatcccaccacatagcaatttgtcttgttttaagatacctaaaagatcagaccagtggttctcaatatttggtcctgagaaacagcaacattaacatcacctgataacttatcaaaaatgcaaaagcaggccaagcgtggtggctcatgcctgtaatcccagcagtttggaaggccaaggagggaggatcacttgaggccaggagttcgagaccagcctggccaacatggcaaactcctgtctctgctaaaatatggaggcacacacttgtaatcccagctatttgggaggctaaggcatgagagtcacttgaactcgggaggtagaggttgcagtgggctgagatcgtgctactgcactccagcctgggtgacagagtgaaacttttcctcaaaaccaaacaaaacaaaaaagcaaaatcaaagcataggagacctatctagacctactaaatcagaaactctggcagtggagccctgcgatctgttttaacaagcccttcaggtcattttgatgcacactgaagtttgagaaacacttggttagttacttaggtaactaggtaactaagtatattactaagttacttagataattaagttagctccagttagagacccatagaataaaccttattgagaaataagtataacctgctatatacagaactttgaaatctgcttaggaaaatgacttttaccagacagatcatgctaagtgtgtgctggtcatattggcttccctgcaagagcctgccatgtccacagctttctttacaggatttccttttgttagtatccccaagcttggtgcatgcaacttcacagtttggtggccatagctgcttgaactaggtatgcttatgcctgactcccaaggtacgcatcgataggctaaccagcagcatgtattgggaagagattgatcctcttgggagtttgagacagagacaaagaaatgggaagacagcaaaaggcatgaggaataaaagcccttagttaagcagaaaccatgaggagatgaagaggctcttaatgagccagtggtaacaagaacaataggaggtggaattgggtgacagagcacaggatggctgctttggaaagggtgacttttagaatcgaagttgagtcaatgtacttaaactaatatgtgcacagtatgttttagttttctagaaggcccaactgggcagctgctcataggggttcctgttttgtacttccctattttgcttgcttctctagggagcctcatgttaaatcatcattaactgaggcaatttcataatatgtctattccttgttgcctggatgaacccattgaatatataactatattagaagaccaagtggtttcagatgggttgcaggtgggtttcatggcatgctgcttcgttgaagcagtgactctcagcctggctgtgcctcagaaacacctgggtagcctctgcctctttatttaaaaactttctgtatgtgagattctcacgggcagttgaagtctgtattacaggagagaatgggagatagaagctgttactttcagcttgttgatgggttgactttcccaaaataaagctgcatagggcgtacttcagaaaacttcaggccttacttcattcatttccttagatcagaccaaataagccagctcaccatatttattccagagatgtgttgctttgcctccaataacattttccttaacatttcctgttagagcctctgggtactatttcttttgagggagatgctaagagtttgaaaagccttaaaaaaatcattaaaaatacatggaatagagtgttgaaatcagcattgtaaatcattttctgaaaattcagtaagtctaaagaagtttttctgttttgaatgatcggcactgaccctatccagttggtcagtgcctcccttatcctgctagtcacctcttcctcctgtctttcctattagaaccaaggaaagtatacaagtacctccatgcagcaaatccactggattctctgacacaaatcaatccagaggggaatgagtgaagatacagaatactttacattgttgctcagatggttggctgagttccattagggtaatatattctgggaatgtggtccagtgcttggtttcaaggccagcttaaaagatttggggcctgaccaagagcataatcaggattctcttattctccaacctagtatccttgaggagattgtaaactactcgagagtccaggactgtttacctattgtacttttatgttaagtacctctacccctaaaagcaatctctttgtgatatacacagaatatttgcccagtaagtcactcagccttgagtacaaattttaagcccgagctgctttcctcaggggcccagccagtctctttactcagcagccttatctgacatagcccatctttaatttagctttgttcacgatgcagggatcaataacagcgatgctgggagggagggagaatggccaactgcaaacagccgcccatctcagcacttgaactgaactctactttggtcaggatgattagtgcagtctggagagccattaagtgctctctgactagttcatctgagttctgcttcccactacactcaatgactaacccaggagattacagatgcttgaggagaaagagtgtcgtgtctccctgtgtggtactgagtagtgtttgtaccactgtctcaggaatgtgaattacagtgcaaatgagctgcctctcttgtttccttttctgcacgtcattttagagagagtgatttattttctgtttgcgaaggcttggtctcatcatttagatgagagagaaattgcatgtactttcaacttttggctggttataggcatctcctttttttttttttccattgtgagagttgtttatgctgattgaatgaaaagattcgttttcttaggctttcagtgatgacactccatttcttccatgtgataaaattataatgcgtgattttattttattattttttaaaagtaaaactgtcacctaacatttcctctacagttgggtaaaaaactaagaaaagcatctcatttcctattggttccatgagcaaccctttttagcatacagatcagaagccttgtgtggctctaagcctatttcctcaattggggaagtaacagactctgttcccaagatatgaataggtgtgctgggtgagaagtgctctgtgctcaaggactttgacccttcattttccaaacttaaacaagtttctccatttctctgttcttagaacctttggtattcatatacttaacatgtacatttcttgaagcgccaattatcatctcacaggacactggtgttccagggaacttggagaaaagctgacaagttattttagtgtgttatcttttacacaaagggactctgttttagaatttgccatatctgctttaacgctgtacaaattagccaactggagaaatatatgttaaataacgggtgaacaacacataatcacccaacctacttttaggaagattactaaaacattccatttaacaatcattcagcactatctgtttgtaaaggacacgtaagttttaaaggaagaagctggtgacttgggaatggactggaataaagtcagagaagtcctttgtccagggaacttcatcattgggtttgacttgagaagaacaaatcagataagattagtctcctcattataaatgtttaaggtaatttcagatcactctgctttaaaagtcttgtgaaatggggttgggaaagtttccttaaatcatttacacttgttgattgtgtgcagtttatattatgagcctgctgcccccacaggtgctgagctgtgctcacacatgggaggggacatcacagaaaagaagacgtagatttattacctatggttctgaactgggacaattgataaaaattacaggtgctgaggattggcttgaaacgcagaataatcttcctaacagagctgtccactcatagaatgtgcttattgtgagggtggggatagaggatggggaattgaattccttgcagctgggtaagttcaagtatagattgcttgccctcttaactaggatgtcctatagaacagccgtccccaacctttttggtaccagggagtagttttgtggaagacaatttttccacagaccgagtgggtagggggatggttttgggataaactgttccacctcagatcatcaggcattagattctcataaggagtgtgcagcctgcttccctcgcatgtgcagttcacagtagggttcacgctcctatgagaatcaaatgccttggctgatctgacaggaggcagaactcaggtggtaatgtttggtcacctgccgctcacctcctgctgtgcggtctggttcctaacaggccacagactggtactggtccacagcccaggggttggggacacctgctatagaacattcaagtaggaaaatacttcctttggtctaagattctgaaatttacaatgttccctgctcatatatcaaatgatgtattagctagagcttattgaatgtcacagttttactgtcaagaacttaaaacttctattatgaggcagagcatttggtaaggatagttgagtccctcagtgactgtttggattggttctatgtcctaggattgagtacatgatatcattttgatgaggttaaaatccaattaggaggtctgtccctttggctgctggctgggtttgttactttttagttccagtagagatatgtgaagcttttctgaacatgtttagcaaggtttgattttggcatttctgaatataactgtgagaagaattatcttcctgctgtcctggtggcagaagacattggactttgtttgcttgtctctttgggggcagatacacgggcatttaaagagccattctaattttaggaacttgagaatcaggagtcctgagggttagtgctaatactttaaaaggttcttaggtctgcaattttagttaatagtgtggggctgaaaaagcctttttccaggaatattgtgagagtaagtgggaagtagagcttttagaattttaggagaaaagggcatggctatttcagttaataatacatgaagagttttctcctttcagagtcctcctttctttgggtttcaaaaggtaagacaatccacgggttttttagtttgtctttcaggtgaattgtaaagttttcctgtaaatactgtcattgcactgacatggatattgctgagcagataaaacaaatagcaagttgaggaggcagttaattcacactcttccttctctaatatggtctgcggctctaagaattgttgtctcatccatggcttttagacccttaaattttagtgagtttcatcacacggaaactattgataatttcttcttctgaagttttttgtaagtggtccctgctagctaatggtgcacaaaatgaagcaatacaacatttctcttatggggactgggagagaactgacatcctttataaatatgtagctgatatataggttaccagcctaagggctgcctggtggggaaagtgaggcctgtgcctgtctctaccactgaagacatgttcatcaagccaatatatgcctcagacattaaaaatatcctttttttcattttaaaataattgccattaagtatacataacataaaatttaccattttaaccactattaataaatatatgttcagcggcatgaagtatattctcaatgttatgcaacgtatccatttccagaactttttcatcccaaacagaaactgtatcaaacactgagtcctcattccacctccccatcgcccctgacaatcactaatctactttctgtttccatagaaacagaaaatatccctatttggcatgttttatataaatcaattatataatacgtggccttttgtgtctggcttgtgtcatttagcagaagggtccccaaccccagggctgcggataggtactgttccatgaccttttaggaacctgggtcacacagcaggaggtgagcggcaggtaagtgagcattaccgcctgagttctacctcctgtcagatcagcggtggcattagattctcatagttacgagaaccctgttgtgaactgtgcattcaagagatgtaggctgtgtgctccatatgagaatctagttgatgctcgatgatctgaggtggaactttttcatcctgaaaccatctctcctcccccccacttttattgaaaagttgtcttccaggaaaccagtccttggtgccaacaaggttggggactgctgacttagcatatgttttcaagtttcctctatgttgtagcatgtgctagaagttcattcctttttaatgctgaataatattctgttgtatgcatataccaatttttaaaaaagtcattcatacttcaatggacctttgaattgtttttattttttggctactgtgaatactattgtgaacattactgtatggctgaacattgctgtatctgagttccttctttcagttcttttgagtatatacctaggagtggaattactggatcatatggcagttctgtgtttaaccacctgtttcctgcagtgccttggctttttttttttttttttttgacgagtctcattcttgtcgcctgggctggaatgcactggcacgatctcggctcactgcaacctctgcctccccagttcaagtgattctcctgcctcagcctctggagtagcttggcttacaggcgcctgccaccacgcctggctaatttttttgtatttttagtagagacaggttttcaccatgttggccaggctggtctcgaactcctgacctcaggtgatccgcctgccttggtctcccaaagtgctgggattacagctgtgagccaccgcgcccggtcgccctggtccttttgaaactgggcagtaatacctgtgcttgtaagagtgtttacaaatatttatcagccttttggaactttaaattagaaaagtgaacagactgtatttgttagcactttatatacttacattatgtcatggaacttattattcgtgtttcctgaatgtctgttgtttggatacctgtgtgtgtttcctactctattagaaattccttgacctgatctgcagttctccatctttgtccaccttttttgtaccttgtactcaataaatgtttgttgataaattgattagatgtgcaacatattctaaagtattatttttaaaaaagagatccatttacaagaagcacattggaattatttccaggttttgttttgctaaagttaagatctgacattatttgttaatttctcttggttatggaatgaaaagtattcccactgttaaaaataaatgttagatgtaggaagtaaacagagatgtatttagacattggggaaaggcttccactgggatctgaaatattgtgggaagagaatcgctattgttagagtagttctgtgccgtgttagtctttattttgtttagatactgcttttttgggggaccactctgcaggcatctaaatctgaagtgtaagcctcttttttgataaatgagggatagctaaaagatgggttattttggttattggttttgcttttaatagataaccagaatttttacctcttgggagagaatgttatctacttatttatagcaagcaagtgttgttacggcaggtggctgtggatgttggcattcaaatggcactgataagactttaaacaaggtagccatccagttatgcttaggctaaaaaatggctgtgtgcagattaggctacatatttcacatggatataaagttctacttttattaacaaacataacagtgcattgcttttgtgtttttagtttctcttagcccttatttcttgtctcttttggtggcttgctgttgtctatagctgagctgaaactttctgtgcaggaattaagcttaaaatatcagtttgtagtcagctgtggagtatgataaaactttgagcaacacagtttccaacaacacccctttgtcactgtgcctgagaaagctcttattaatagaatttcatgtgaggttccgtgagaaggactattgtacaaccattttttttttttttttttttttgagatggagtctccctttgtcacccagactggagtgcagtggcacgatctcggcttactgcaacctctgactcccagattcaagtgattctcctgcctcagcctcccgagtagcagggactacaggcgcgtgccaccacacctggttaattttttgtatttttcatagagatggggtttcaccttgttggccaggctggtctcgaactcctgaccttgtgatccacctgccttggcctcccaaagtgctgggattacaggcgtgagccactgttccggccatttttttttttaacagtgaaacagggaaacataatatttttcttactttaaaaaatccttcagtttataatcatcaggagtattggatatcttttaagtgaaggtggaagttcacttaataaaaaaggaagctcatttttccttctttgaatggttaacatgggagtaccccaaggtggaagctttacatgactgagaaagcccatccactcattgtcatagaatcaactattaattcaacaaatacttatggagcctttgccatgcctatgagccttgtgctagaagccagggataagtaaaataaattctgcacctgcctcctgcaacttagtccaatttccaggtctcccttagatttttctctgttttaatttttattttgaaaatggagacagggtctcactatgttgcccaggctggtcatgaactcctgggctcaagtgatcctcccgcctaggcctcttaaagtgctgagattacaggcatgagccatcacacctagcctctctcttaaaacaactttattaaagatgtaattcaggctgggtgtggtggctcacatctgtaatcccagcacttgaaaattacttgaagttgggaggtggaggttgcaatgagctcagatcatgccactgcactccagcttgggtaacagagcaagagtccctctcaaaaaaaaaaaaaaaaaaaaaagtaattcacataccatacatttcacctgtttaaagtgtacaattcagtggctattagtatattcacagagttgtgcatctattaccagaatcaattttgagcctttttttttttttaaccccaaaaagaaacctcttccctttaacacttatccccagtccacctatccttctcagcccttggcaacagctagtctactttctgtctctatggaccggcctagtctagatattttatataaatggaattatataatatgtggccttcatgtctggcttatgtcatttagcataatattttcaaagttcttccatgttgtagcatgggttagaacttcattcttcttttattatggttgaatgatattccactgtatgaatataccacatcttttttttttttttttttttggagacagaatcttgctctgttgcccaggctagaatgcaatggcacgatctcggctcactgcaagctccgtctcctgggttcaagggattctcctgtctcagcttctcgagtagttgggattacaggtgcacgccaccgcacccggctaatttttgtatttttagtagaggtggggcttcacctccttggccaggctggtcttaaactcctgacctcatgatccacccgcctctgcctcccaaagtgctgggattacaggagtgagccaccccgccgggccacatctttttttaatctattccttcactaatagattgtgggttgtttccaccttctcactatgtgagtaatgctcttatgagcgtgcatacaagtttttgtgtgggcatatgtgctcaagtctctgatcccctagatgtcttgcctatcctacagatccaggcctaccacaaaaaagtgtagaaggatcatataccatgagaacataaaggagggacatgtagacttaattagggagtcagggaaggctgcccctgaggccaccatatccaagctgcggcttgagagataggttgaatagaaaagtttttcaaactgcagctgatcacccattagtaggttgtgaattcagtttagtgaatcatggccagcattttttaggaggtgaactaaaatagaatagtagatgttagaggacattccatgtggtaagggtaagtattgttgcatgaaatttattttcagtagctatatgagcgcatctagcaaattgtgacgtaagaagtattctatattccgggttgcaatcagaaaaatatgaaagccactgctctagggattttttaaaaggagattatttattaatctggagctttaaatatggttccactagaagattggagagatacaggagagagaagaacctagaaagctgaagatcctttgaaagcttaaagttctgtgatttctacacttttaaaatgattcatttattcaacaaatattaaaatatttaccataggcctagattgcactaaattctgggagcatatgtaagatttgtgtgattttgttttttttgtgatctggcagagaagatgtacaagcaattaaaatgacttctataaaacatggtgggttgaggccgggtgcggtggccaaggtgggtggatcacctgaggtcaggaggttgagaccagcctggccaacatggtgaaattccatctctactaaaaatacaaaaaactggccgggtgtggtggtgggcgcctgtaataccagccactcgggaggctgaggccagagaattgcttgaacccaggaggcggaggttgcagtgagccaagatcgtgccactgcactccagcctgggtggcagagcaagactcttgtctcaaaacaaaacaaaacacaaaaaaaaccatgacgggttgaacgcataagtacctttagtttttccaaaatgtctctaaaatgaaataaaataaataatgaaataaaaaagacacaggcacctcaaaggtaggagaataggagaggagatcacagcagttaattgccatcaagatgtctttggaaggagtcactgactaagctgactggcttagtcactgactggctaagcagaggaagctggactctaaggatctcaaagaggatatcagtaagtgagccagttagctccataaaactccagaaaagttcaggatttggaagctctaggtcttgcataaggctgtaggatatatagagcgggggaaaaaaagagcattagatggagatctgtaaaagctgttaagccccagttcccacccccacccatcagatccaggtgcttgcccctcctctcaccctgaaggttctattgtgaaaagctgtaaatcattagccatccatccccccaacctgcaaaggtacacacctaatagatatgatacacacccatcagaaacaatggcacacttagtttagaagggaaaagtgggcatacccttgtgggtgtgtcatgatcttagagggccaggggataagtagtttgaaagtgatctccaaggtgattttgaagacacaattctcccatcccactctcgattactagccactgattttgtctcaggaggcattagccgcctgtcaaactgctgggacattatttttctcttagtcaataaaagtagtttgacatccatcacatatagcatttgctaggtcttgtgggaggcaacgattacaacaaaagggtaaaatattgtcctgtgctcatggaacttcaaatctagttattggtgattatatacattctaaattaaacactttcaaaataagacatcttgtcaaggtgaaggattaaaaacctttttgtcctatcctgtctatatttcctct

SEQ ID NO: 383 - DNA, 469 bp, Homo sapiens
  source 1..469: mol_type = other DNA
ttcctccatttatcgtttcttcgtcatgtcgggacgcggcaagcagggaggcaaagctcgcgccaaagccaagacccgctcttctcgtgccggtctccagttccccgtgggccgagtgcaccgactgctccgcaagggcaactatgctgagcgggtcggggccggcgcgccggtgtacctggcggcggtgctggagtacctgactgccgagatcctggagctggcgggcaacgccgcccgcgacaacaagaagacccgcattatcccgcgccacttgcagctggccatccgcaacgacgaggagctcaacaagctgctgggcaaagtaaccatcgctcagggtggtgtcctgcccaacatccaggctgtgctactgcccaagaagaccgagagtcaccacaaggccaaaggcaaataatgtctccatagaatcactttccaatacaacggctcttttcagagccaccta

SEQ ID NO: 384 - DNA, 789 bp, Homo sapiens
  source 1..789: mol_type = other DNA
aacctgctctttagatttcgagcttattctcttctagcagtttcttgccaccatgtcggaaaccgctcctgccgagacagccaccccagcgccggtggagaaatccccggctaagaagaaggcaactaagaaggctgccggcgccggcgctgctaagcgcaaagcgacggggcccccagtctcagagctgatcaccaaggctgtggctgcttctaaggagcgcaatggcctttctttggcagcccttaagaaggccttagcggccggtggctacgacgtggagaagaataacagccgcattaagctgggcctcaagagcttggtgagcaagggcaccctggtgcagaccaagggcactggtgcttctggctcctttaaactcaacaagaaggcggcctccggggaagccaagcccaaagccaagaaggcaggcgccgctaaagctaagaagcccgcgggggccacgcctaagaaggccaagaaggctgcaggggcgaaaaaggcagtgaagaagactccgaagaaggcgaagaagcccgcggcggctggcgtcaaaaaggtggcgaagagccctaagaaggccaaggccgctgccaaaccgaaaaaggcaaccaagagtcctgccaagcccaaggcagttaagccgaaggcggcaaagcccaaagccgctaagcccaaagcagcaaaacctaaagctgcaaaggccaagaaggcggctgccaaaaagaagtaggaagctggcgtgtgaaaaccgcaacaaagccccaaaggctcttttcagagccaccc

SEQ ID NO: 385 - DNA, 476 bp, Homo sapiens
  source 1..476: mol_type = other DNA
ttagccatggcacgaacaaagcaaacagctcgcaagtccaccggcggcaaagcgccgcgcaagcagctggccaccaaggcggctcgcaagagcgctccggccaccggtggcgtcaagaagccccaccgctaccgccccggcaccgtggccctgcgcgagatccgccgctaccagaagtcgaccgagctgctaatccggaagctaccttttcagcgcttggtacgggagatcgcacaggactttaagaccgatctgcgcttccagagctcggcggtgatggcgctgcaggaggcttgcgaggcctacctggtggggctatttgaggataccaacctgtgcgccattcacgccaaacgcgtcactattatgcctaaagacatccagcttgcgcgccgcatccgaggggagagggcataaatattcctatcagcccaagaagtctgtccaaccccaaaaggctcttttcagagcccctc

SEQ ID NO: 386 - DNA, 466 bp, Homo sapiens
  source 1..466: mol_type = other DNA
ttcttgttatttgagtgctctttcactctcctccgccatgcccgacccggctaaatctgctcctgcccccaaaaagggctccaagaaagccgtaaccaaggcccagaaaaaggacggcaagaagcgcaagcgcagccgcaaagagagttactctatctacgtgtacaaggtgctgaagcaagtccaccccgacaccggcatctcatcgaaggccatgggcatcatgaactccttcgtcaatgacatctttgagcgcatcgctggcgaggcttcccgcctggcgcattacaacaagcgctcgaccatcacctccagggagatccagacggccgtgcgcctgctgctgcccggggagctggccaagcacgccgtgtccgagggcacaaaggccgtcaccaagtacaccagctccaagtgagctctcgcagctgccagcaatccaaaggctcttttcagagccactcac

SEQ ID NO: 387 - DNA, 8858 bp, Homo sapiens
  source 1..8858: mol_type = other DNA
ttttcaggagtcccttctgttatttagcaagacacactactacaatggagaaaaaagatgccccctccttcaagccctgagatcttcaggactttggcgaaaagtctgcgcccgaagagacccaggaaggattcttggaattgtagtccaaaggcatcccgccttctgcgcagactcacaagtccctgtggacggaattcttgaagtgtagcgccgctcagtccttccaccggaagtgtccgatcggaatcagccctgtccgagaggtgagtccgggtttggggatccagatgtccagccccgtgtccccctccaaacatccagtccctctcatattgcctttgaaattagcagcctctgggtgaccagaccttggccctcagaggaatcccggagaaaggtagaaccagcttcggcgttgggaacgcaggcgcgcttacgcatttagtgagggtttggcggtctccatagttaccgccgccgcgcgtgacgtcatagtggagcgctgagggcttggtggcgtggggtgggggctgtcctactgatcctgaatttggggtcactggtaagaggagttgcccattccagccaggtggaacggggaggggtgccacatgtctcagatctgccattgtctgcgaaaagaaactgctgcgaggaccatccccaatcccctgcttcccttgggaagagtaaccgccgttttgtaggacacttggggacaaccccgcttgtcctgaaatttattgacacggtaaatagtatttcctgtgtgccgaggatgcagttaaaccaacactgaccccctgcccttgagaaacacaaggtactatgggagcctttaccagcatgccccttgaagtctctgttctgctttgtggtctctaccggatttcccctgactgtctccctctccaccaacaaaactctcacccgtcttcccctcccgcaacatgcccaccaagacatgttcatccatcaggagccctgctctttaacctccaactttctcatcataattaattactcgttcctctctgttctcctagcgtttcttcacacatctgcttacccatttttgtaagtcctcctaacacaatattataaggcactagatgctcaatcaatatttattagtttaaagctaccagctttagggggactcggttttaaatagatgagaagtgataaaacacctggagatagtactgtcagctgagataacatgtcatagaaccagctgctcagcataattgaaatttcattcggattatatgggcctactttacacccatcttactatggtaaatgagatcatgctcattaagcattaggacactacttggttagcgcatctaggaaacataaccagaaatatcaaagaaatggcccagtaaaatataagggattgagactctctggttaatataccatggaactaaccccccttttttttctttatcattgataaattttgttcttacttatactcaaattgtttgttttccaaggttcagtctgaacctagtgatatttatttcatactcttggagaattaatactgttacatatcttcaactacccttttcatgaatcttgtctgccaagacaagctcggtcatggagaccctaacccagtggcgctagaggaattaaagacacacacagaaatatagagtgtggagtgggaaatgaggggtctcacagccttcagagctgagagccttgaacagagatttacccacttatttattgacagcaagccagtgataagatttactgaaagtattccttacgggaaataaagggatgggccgaaataaagggatgggctctggctagttatctgcagcatgaacatgtccttaaggcacagatcgctcatgctattgttttctgccctgggtgggccaggtgttccttgccctcattccagtaaactgacaaccttccagcgtgggcgtcaaggccatcatgagcatgtcacagtgctgcagagattttgttcatggccagttttggggccagtttatggccagatttgggggcctgttcccaacacttgtcaaaatctgtcttcccattccaaattcttttccattattgaaatatcattgtttctgttggaaatatttttccaagtagatgtcttattatcatcttaaatacagatcatccaaaacagaagtcatctgaaactttcctaatttttcctttcaatcataaatatgaagccttaagaacaattaataatgcatgatccttaacctcatggaacatcaatcagttgataaaaaaacagccaaacaactaaaaataatacaaggacttatatattcatatgtgtatgtgttaggaattgtaagaactcagactagagttgagcaatttcttaacagaggcagtagaattcttagtcactccagccatcacaccctgcaagttgatctcaccatcagtctgctgctcattcctacttcctctactctgttcctttcctttctgaatctttctcatcctttattgtccaatttaagccccatgttaaatacagtgagttctaaatttctcttcaaagaatcagtatgtcagtatgttcagttctttgttctccactttaaagtttaacctcatctccttgcccctagtttcagtaaacaaccttttccaccagttccaatcagtagttcacatctattcccctggtcacctgctctgtcctgagtcacccctggtcatctgctctgacctgcatcacctttaatcgcctgttctgtaaccgtccttcccactgaaactgctcaccccgccactgtggttcatacccctgctttctttaaaacagccagttggaattagcttagactatgcagtccaaccctagccaataggggaacgacatagcagtagggactacctgcgtcagagataagaaccccttcctctcccttgatcaggtatgctctcaccattgctccatctgcgagacacacctttctatagaagcaaaattgccttgatgagaaaattcatgttcgagtgctatttcttttgctgcaccgaaaatttatttctaatacccaccacctctaggaaataccttctaccattcacagtctcttcccacctcaggaccgttagaacattcagtatctccaccataaactcattttatacttcaacattcaacatttaacaaacatgtacaatgtatatgtcatgtgaaacgttttctcatttaaatcttttgtatccatgttttataatttcttcccaactagttcttcccactgaatttatttctttctctcccgcatccttgtcaaatcttttctattcttcaaactcaaagactttttgtttaatccattaagctgtatattagaatacagattttccaggcatatactatactgaccaagttaccatctctaggagcaggcccctagtctgcatctccagaggtagggcccaagaacctgtttctaccaaagatcccatatgatgattaggcagcaagcccagtgtcatattcagactttcttgtaaaccattgctgtacaacttctagcccaatgctttgcttgtgataagattcttaataaaatgtgtgttattgcatcagtcagtagtcaacttagtgaaatgtttagtaaaagaacctcaggccgggcacggtggctcacacctgtaatcccagcaatttgggaggctgagatgggcagtgggcagatcacaaggtcaggagtttgagaccagcttggccaacatggtgaaaccacatctctactaaaaatacaaaaaattagccaggtgtggcggtgtgcatctgaaatcctagctactcaggaggctgaggaaggagaatcacttgaacctgggaggcggaggttgcagtgagccgagatcgcgccattgcactccagcctgggtgatagagtaagactccctctcaaaaaacaaaaaaaagaacctcatacttgcatgaatacagtggcctctatcttttcatattgccacccaccctagaaatgaagaacatattcatctccacagtgtttagcaggtcattctgctcagaagaattgactcctcttcagtgactccccagtgcctaaaagataaactccaaattcatgaacttcacagttgatgttttctacaataacatctccaagctttgcctctataattttcttatacaaacctactaaacgttttgctttccctcttctgtattcctactcttacccaattgttcagactgtttctctgttcgtaatttcctatttctttccctcccacatcctagtcaaatcttttctattcttcagaatttcatgtttgcattaagcttcccttgaccattgcaaccatctgtatttttctcatctcctattttatgaagcacttctatcatttttcttttttatccttattttctctgtgacttttaaaatttaataacatgtacattgttaatatttagcattacatttaagtttattgtttctaatttatcttatttttaaatttaaaaattaagctatcttgaagtagaaatcattaacagttgtattctagaaaccaagtatgtcagtgcttttgcatatagtaaatgcccagtaaatttttgtgtaatggagaatgacgatttttattatgtggtctttcatcttcttagacagtaatagtaacttttgatccctcaggaggactcttgaaactaaagaagaccctttccaaagcagttctgataatatattctatccacagatggctacagaaccaaagaaagctgcagcccagaactctccagaggatgaaggacttctgatagtgaagatagaagaggaagaatttatccatgggcaggacacttgcttacagagaagtgaactccttaagcaggagctctgcaggcagctttttaggcagttctgctaccaggattctcctggacctcgcgaggcactgagccgcctccgggagctctgctgtcagtggctgaagccagagatccataccaaggaacagattctggaactgctggtgctagagcagttcctgaccatcctgccaggagatttgcaggcctgggtacatgaacattacccagagagtggagaggaggcagtgaccatactagaagatttggagagaggcactgatgaagcagtactccaggtgcacaggggatgggagatctaagacctccataatggataaagttccacggtgggaggagaggcccgagattgcatatctagcttgcaggagctgttggttcagtgtgcatttatgtctcctttcctgtctgtttgattccacactacattttacaattaaatcagactcgattcttccttccccagttttgcatttctatgggagtttctctttgttgttagaagacgtttaacacagggattcttttataagcccaaatgtactttatttttctcaggttcaagcccatgaacatggacaagaaatattccagaaaaaagtgtcacctcctggaccagcacttaatgtcaagttacagccagtggagaccaaggcccattttgattcatcagaaccccagctcctatgggactgtggtgaggggcagaatgccatatagtgcacatcactaaagaaacaggggaatgaatctccctccacaaactagtcttggtaactgtagatggtcctttcctttattacccaatgaaaagagagaacttgtggccaggtgcggtggctcactcctgtaatcccagcactttgggaggccaaggcaggtggatcacgaggtcaggagatcaagaccatcctggctaacatggtgaaaccccatctctactaaaaatacaaaaaattagccgtagcacctgtagtcccagctactcggaaggctgaggcaggagaatggcgtgaacctgggaggcggagcttgcagtgagctgagactgcgccactgcactccagcctgggcgacagagcaagactccatctcataaaggaaaaaaaaaagagagagagaacttgttttcctgtgagtctttggccaatggtaggggaaaagataattttgttccttatccagaatatttccaaaacacagaacatttttatgatatgaccaaattaaaggaaataaaagtgaatgagttgagaaaatatcatgaaaagagaaaagaaggaaaagaaaaagaaatacatggacagaagcaaaatatgttcatagagaagtacatataatgatcaagagaaacagatacatgatgatatactgagaaatagtatataattcacaagtaacatagaccgtgatccatatttttcctgttatgctcttggtcttataaagctcttttacacttttatagaaagttagctatagttctagagactacttccacagaatactcatctctgttctaaaactcatctatttaaaagattcatagatgcagtatcacttaaggtgtgaattgtccctatagtaaacccaagaataacttaccgttaattttttggtttgtttgttttgttttgttttgtttttcctgacacagagtcttgctctgtcacctaggctggagtgcagtggcgtgatctcagctcactgcaacctccacctcctgggttcaagcaattatcctgcctcagcctcccgagtagctgagattacatgtgcctgccaccatgcccggctaatttttgtatttttagtagagacggggtttcaccatgttggccaggctggtctcaaactcctgacttcgtgatccgcccgccttggcctcccagagtgctgggattacagacatgagccacggagcctggccacaattaatttttaataaatttctacatattctgccttcagttttgttctggaaacatctccatctgtcgtatataaaattgtaaatttccctcaccccatgaacagcactccctaaccctctttcctgccctagcgtattgtagacaaaggacagcttataataaagaagggcggttcaattccagcacagtatagagtgggatttgtgaagactggatcataaatggatcttggaaaccaggcttgggaatttagacttgaacaaaaaaagagagagagagattcaaggtttttgagtagggtatgaaaggatggcagtgtttaatgaccattagtctagtaaggatctttaggataactaggaagaagaaaagtgcagagtcaaaacagcaaggaggcagttaaagtctagataggaaatggtaaggttcgagactatggcgatggtagcagaaatataaaggaagggatttatacaagggacacttagtggacagtgatgacagaatttagaagactgattaaccatggaatatgaggaagaaatagacaataggtggatggaagttttctcacacatacttcacagtcacttatagctttacttttctctcttgtgttctcatctgctttctttgaggtagtgcctccattttccctctagaaatgtatcatagacccaaggttcccaagatctgctgcagtcaacattgtagagttccttctccgtactctatctccccctatctcttgagttcttgctgatgacaatcctcccaatcttttctaatatatatgcttcacgtctgattcctctctctgccaaccactgcaggcattacttgctcttaccaatgtttctttcattcctatcatcctctttcattctatcattcctctcatgtgaaaggtcatatattaaagtgggcatatcaatatgtaactatcttgagcatgctataaaattttcttttcgtgcagcaaacaggtaatatttccctttcttttttattttagataatgagagtgaaaacagtagatccatgccaaagctggaaatttttgaaaaaattgaatcacagagaattatatctggaagaatctcaggatacatatcagaagcatctggtgagtctcaagacatctgtaagtctgcaggcagggtaaagagacaatgggaaaaagaatcaggggagtctcagagactctcgtctgcccaggatgaaggttttggtaaaatcctcacccacaaaaatacagtcagaggtgaaataataagccacgatggatgtgagaggagattaaatctgaactcaaatgaattcacacaccagaaatcttgtaaacatggtacctgtgaccagagcttcaaatggaactcagattttattaaccatcaaataatttatgctggagaaaaaaatcaccaatatggaaaatctttcaagagcccaaaacttgctaaacatgcagcagttttcagtggagataaaactcatcagtgtaatgaatgtgggaaagctttcaggcacagctcaaaacttgctaggcatcagagaatccacactggagagagatgctatgaatgtaatgaatgtgggaaaagctttgcagagagctcagatcttactagacatcggcgaattcacactggggaaagaccctttggttgcaaagaatgtgggagagcattcaacctgaactcacatcttatcaggcatcagagaattcacaccagagagaaaccctacgagtgtagtgaatgtgggaaaaccttccgagtgagctcacatcttattcgacactttagaattcacactggagaaaaaccctatgaatgcagtgagtgtggaagagccttcagtcagagctcaaaccttagtcaacaccagagaattcacatgagggaaaacctattaatgtaaggaacttaaatttgtaagtaaatgctgaggaaatggcacaatatgaaaaatattaaataaaaaataaatattgggcaagatggaagactgaa

SEQ ID NO: 388 - DNA, 1351 bp, Homo sapiens
  source 1..1351: mol_type = other DNA
ctcacttggccttacactccgctcggctcaccatgtgtcactctcgcagctgccacccgaccatgaccatcctgcaggccccgaccccggccccctccaccatcccgggaccccggcggggctccggtcctgagatcttcaccttcgaccctctcccggagcccgcagcggcccctgccgggcgccccagcgcctctcgcgggcaccgaaagcgcagccgcagggttctctaccctcgagtggtgagtatcgccgaagtgggcattcgcggggtgcgctgccctggagtcactggggaacgacccgactccagaggcctcgacctgacctgtctcctgttttgtctccccttaggtccggcgccagctgccagtcgaggaaccgaacccagccaaaaggcttctctttctgctgctcaccatcgtcttctgccagatcctgatggctgaagagggtgtgccggcgcccctgcctccagaggacgcccctaacgccgcatccctggcgcccacccctgtgtccgccgtcctcgagccctttaatctgacttcggagccctcggactacgctctggacctcagcactttcctccagcaacacccggccgccttctaactgtgactccccgcactccccaaaaagaatccgaaaaaccacaaagaaacaccaggcgtacctggtgcgcgagagcgtatccccaactgggacttccgaggcaacttgaactcagaacactacagcggagacgccacccggtgcttgaggcgggaccgaggcgcacagagaccgaggcgcatagagaccgaggcacagcccagctggggctaggcccggtgggaaggagagcgtcgttaatttatttcttattgctcctaattaatatttatatgtatttatgtacgtcctcctaggtgatggagatgtgtacgtaatatttattttaacttatgcaagggtgtgagatgttccccctgctgtaaatgcaggtctcttggtatttattgagctttgtgggactggtggaagcaggacacctggaactgcggcaaagtaggagaagaaatggggaggactcgggtgggggaggacgtcccggctgggatgaagtctggtggtgggtcgtaagtttaggaggtgactgcatcctccagcatctcaactccgtctgtctactgtgtgagacttcggcggaccattaggaatgagatccgtgagatccttccatcttcttgaagtcgcctttagggtggctgcgaggtagagggttgggggttggtgggctgtcacggagcgactgtcgagatcgcctagtatgttctgtgaacacaaataaaattgatttactgtctgc

SEQ ID NO: 389 - DNA, 18386 bp, Homo sapiens
  source 1..18386: mol_type = other DNA
cggcgacgtccacgcattttctgacgtagcgagcgacggcggggagccgagcggaagtccagcactattgccgctagaggaggggaggggtgagaagcataagtggcaccggaagtggaattaatccgcctacctctcctgcgcctgcgaaacagaaaagacaaggcgcctgtcgggcggggtgtggcttcgggtggcggagaacgctgcgattggccctcggctgtggcgacagcgacgattggtccctgcgtgcagagcgcggtgagagtgggtggtggccgttggaattcaaaagtggcgggtgtggcgcggggctggtagcggccggagccgtgcgagttctctaccctgcttcgcgagcgggcgagagaacgcgagtcccaggatccccggcacccagttctcttccactgcattcccccggcgcgtgtgggaccgaggtggacatggatccgcaggtgagtaggggcggcgcaggtgtcctgccctggggatggggacgaaggctgaccgctccgatgctgtcgcgcccccggctcccggtcggcctttgtcatgtctaccgggagagcgaaggtccgtgcgcccccgcacaagtggaaaggggcggaggcaggagtggagacggcttagagcacccggggaggtcggaaggcacgtctgtctgccctcccctagcttcaagtttctggagcccctcccttaactttcatgtctccgagatttctcatttcgaattctcaggctcgtctgacacatttccacttctttattcctactcagggtgtgattgcagtgtgtaagaagggagagttctgatatgacttcttccttttggggacatggtgtctgaggccacatccttgctgaggtccttttgtgttaatcgcctctccttatcactgctgcttcggagtgtaggaaagggagaaggagagtagggtaatctgggccaaaagacttctcattctctctctcctttcccaaattgtgcagattcctgcccaatgaaactgattgatttagttctttctcttaaatggtgccctgctgcaccccacaaccatatgcagcttcctgtctccagtgaagagagatgaatgtgtgtgacagctggagtgtacttatctctggtgccaggaaaggtctgcctgaatcctttgtttactagtatttcacgttcaggtttccctgaagttaggattcagccttaagagagattctttctctcgtgacaaccagagagcagagtagtattatgtgacagtaagaagtagtaaaagccttctcagatctattaatcaagtatttattgagcacctactacatgctaggcgtggttgtaggtacttaggatgcagcagtgaacaagggacaaatcgttgccatcgtggagctgccattctatggggatacagacaataaatgtaataaatgaattatataactgccagaaggccgtaagtgctgtggagaaaaggagaaattcaaggttgaggacataggggaggccaactggcgggttagagtattaaatagggtggtctcagtaacccccatggaaaagatgagttgaataaagacttgaaggaagtgagggagacagacaagcagatagtgagggaagaacatttcaggcagagggaatctgctagagcagagtccctaaagagttgtaaggagggaagtgtggctggaatgaagtgagcaaggggaaaagttgtgggaaaggaagtcaggtaatgggtagtggggttgctgatcacagtttgtccttgtgggggtcgttgtgaggacttttactctgagtgagatggggaatcattggatgattttaagcagagagataagatttgttgggtccaccagattttcgtaaccatagcaccattgcctttttttttttttttttttttttgagacaggttctctttctctgttcccaggctggagtgcagtggcatgatcatggctcactggagccttaacttcctgggctcaagtgatcctcccacctcagcctcctgagtagctgggactacaggcagctgccaccatgcctggctgattttttgtatttttaatagagacagggttttgccatgttgcccaggctggtctggaactaactcctgggctcaagcaattcgcctgcctcggcctccgagagtgctgggattacaggcatgagccaccgtgccctgcaacatttttttttttttttttgagaagtagtcacgctctgtcgccagcctggagtgcagtggcgcggtctcggctcactgcaacctccgcctcccgggttcaggcgattctcctgcctcagcctcccgagtagctgggactacaggcgcctgccaccacgcccggctaattttttgtatttttagtatagacagggtttcaccgcgttagcccggatggtctcaatttcctgacctcatgatcctcccacctcggcctcccaaagtgctcggattacaggcatgagccactgcacctggccaacattttttattgtcgtgactaggtggggggttgctactggcatctagtgggtagagggcagggatgctgctaggcatctgacagtgtacaggactgcattggacattgtcaaatgtcaccttggggataaaatcacccccagttgagaaccactggtttatgataatctaggtgccagatgatggtgtcttaggtcagggtgatagcagtggaagaaacagtaaaaagtgattggattctggatatattttgaaggtacaatcagccatgctttgctgacagattagatgtggtatgtaggagaaagagaggactctgggtttttggcttgagcaactgaaagatggagttatatcaattgagatggagaaagctgcaaaaggagcaagttcaaagcagggttggacatcaagaggtcagttattagacttccaaatggagattttttttgatacggagtctctcactctgttgcccaggctggagtgcagtggtgtgatctcagctcactgcaacttctacctcccagcttcaagcaatcctcccacctcaatctcccgagtagctgggattacaggcacgtgccagcacacctggctaatttttgtatttttagtagagacagggttttgccatgttggccaggctggtctcgaactcctgaactcaagtgatccgcccgcctcggcctcccaaagtgctgggattacaggcatgaggcaccactcccagccttaaatagcgatgttgacgatgcagttcagtataggtgcaggatcgaggtctgagctggacatataaatttggaaactgtcagcatatcaatgatatttaaaggcatgggagtggatagtgagtatagatagagaatgctgttaaaatctggagagatgaggaggacctgccagtgaggtaagaaagagtggtctcctggaagctaactgaagaaagcctattaaggaaaagggagtaatcagttgtatcagatgctgtttgatgggtcaagaaaatgaagataaagaattgacttagcaacatgaagttacttgtgatcttgaggatagcaatttcgatggaatggtgggaatgaaagcctgattgcaatgggcttaggagagaaattggccacgatgaatacactagaggtaatactttagagttttgctgcgaaaggcggcaaggaaaaaggatagtacctgttagggaaagcagagttcagattcttttagtttcgaagaaataatagagtttgtggtatgccaattggagtgatgccatagagtacaaagctgatggtgcagaggtgagaagggaggattgctggaggaatgttcctgaaactgggaggatttggcgagtccaggatttggtgaggagggatgggaatgtgatgcatatatgaaagggttgccttaggagcagggccatccacctctgatcttgtggtgaggtggatgtaggcagggttgcatgaatatctgttcttatagaaggttaagtgcttatgcttctcactgtggaaagttggagggcatcattctagctttatattaatagatgggaaaaatatatatactgtggtctttggagttgtcctgaataaacaaacctttaaacacattttctgaaccggcataaattccaaggaggtaggtctgtagcagatccactacggtagtgtagagaggaggaagggcacaggttatttttaaaaattagtgtttgactttggaatacttaaagaaaaatttggtttccatactatatttgattacactaaattaaaataagctttctttgtgcacacttctgtaggtggcaggaaaaatgctacctctttttttccctttttatttttatagaagccaatggtatggatatatcacagtttaagtattgccccactgatgaacattcaatttcattccttcaaaaactgtagagtcctaccatgtagcagacattgtactaggccctctggttatatagttatgaacaaaacagatgaattcttatggtgctcacagtcttatgtaggggttatgataataaaaacaaaagaaaacagtgtatcaggttgtttcatgatttttaaaaataatgatgctctgtgaacttccttgagtaaatctcactgtatcacgggtagctcaaactcactttcccaaaattgaacttagcatccatgaaaccaatcctgctgggtccagtggcatgtgcttgttgtcctaggcacttaagaggctaaggcaggaggagcacttgaactcaaagttcaaagccagcttgggcaaccctgtctcaaaaacaaataaacaaaaaacaactcttcaggtactcagatctctgtgttatttcttttctttttctttttctttcttttcttttctttttttttttttttttttgagacaggatctcaatatgtcgcccaggctggagtgctggagtgcagtggcatgatcacggctcactgcagccttgatctgggcccaagccatcctcccacctcagcctcccttgtagctgggaccacaggcaaatgtcatctggttcgctaaggtggatgtctgcctagcttagccctcaagcttctagaatagcccctttcaactaggttccatgagaattaatttcttttttttttttttgagaccggagtctcgctctgtcacccaggctggagtgcagtggcacaatcttggctcactgcaagctccgcctcccgggttcacgccattctcctgcctcagcctccccaggagctgggactacaggcgcctgccaccacgcccggctaattttttgtattttttagtagagacgggatttcaccgtgttagctaggatggtcttgatctcctgaccttgtgatctgcccgcctcggcctcccaaagtgctgggattataggcataagccaccgcgcctggccaagttcttttttttttttttttttttgagacgtagtctcgctctgtcacccaggctggagtgcagtgttgtgatctcggctcaccgcaacctccaccaatcgttcaagcgattctcctccttggcctcccaagtagctggattacaggcacatgccaccatgcctgggtaatttttgtagaaacagggtttcaccatgttggtcaggctggtcttgaactcctgacctcaagtaatctgcccgcctcagcctcccaaaatgctggaattacaggcataagccaccgtgctcgcccagaattaagttctaatgccctttttttttttttttttttgagacggagtcttactctattgcccaggttggagtgcagtggcgtgatctcggctcaccgcaacctctgcctcccaggttcaggcgattctcctgactcagcctcccgagtagctgggattgcaggcatgtgccaccacacccagctaatttttgtatttttagtagagacgggatttcaccatgttggtcaggctagtctcaaactcctgaccttgtgatctgcccacctctgcctcccaaagtgctgggattacaggcataagccactgcacccggtccaggtgaaacatttcaaacatggctcagtaaatattgcctgattctcccaagcagtcttcaacactcacatatcttccactctctcccttgtttatgattctcagctccagccaaaagggccagttggtttcttagccatgctatgtacatatttgaatttttgccttccaggaagagcatccattcctctctgcttgtttgagtcccacccttaaagttagtcaagtccagcttttcccctagaggttattcccacttttaggttatgtcctcacttctgttcatgctgtctggcacataattcagcttttggcacaagtggtgctcagtgcttggtggtggtgttgacaattgaggctgggggccaagacaggaagttcttgggacatttgggctcctgggtattgtcttaagggtctcttttcccaacagaggtcccccctattggaagtaaaggggaacatagaactgaagagacctctgattaaggccccttcccagctgcctctctcaggaagcagactcaagaggaggcctgaccagatggaagatggcctggagcctgagaaggtgagctgggcatggagagctgtgcatgtgtgtggggggtgtgtgtgtgtgaaagaaaggagagagagagtataaaccattagggagggtgactatggaccttgtctttatctttccccagaaacggacaagaggcctgggtgcaacgaccaaaattaccacatcccacccaagagttccatccctcactacagtgccacagacacaaggccagaccacaggtgggctctcaggatggatagactccaaggacatggaagtccagtgctcttcaactcacttgtttcttttctttcaattttattttattttttttgagacagagtctcgctctatcgcccaggctggagtgcagtggctcaatctcactcactgcaacctcctcctcccaggttcaaacgattctcctacctcagcctcccgagtagctgggattacaggtgcccacaccatgcccagctaatttttgtatttttttcagtagagatggggtttcgccatgttggccaggctggtcttgaactcctgacctcaggtgatccacccgcctctgccttccaaagtgctgggattataggtgtgaggcaccgcacccagcctattttgaataggtaataacatttcatttggttcaaaattccaaaggcacaaaggttgttgtatagtgaagtttgcttcctatttctgtcctccagccacccaattctgctacccagggcaactgtgtgttcttccagggaaattctattggtattcaagcaagtaagactatactcccccaccttttttacataaatggtggcatactttagacatggtcctgcttttacttatcttaatccaaattgctttttggcatatggagtacagttggccctctgtatccgtgggttctgcttctgcagattcaaccaaccatcggttgaaaatattcaaggagagtgggcacagtggctcatgcctgtaatcccagcactttggggggccaaggtgtgtagattacctgaggtccggagttccagaccagcctggccaatatggttgaaaccctgtctctactaaaaatataaaattagccagacgtgatggcccgtgcctgtaatcccagctactctggaggctgaggcaggagaattgcttagaacccaggaggtggaggttgcagtgagccgagattgtgccagcctggcgacagagcgagactcggtctcaaaaaaaaaaatgagaaaatattcatggaaaataaaaaataaaaccaaaaaatacagtataacagttatggtcatgtgtcacttggcaatgcagatacattatcagaaatgcattattgtggaaacatcatagaatgtacttactgaaacctagatgatctagcctgctacacacctaggctatctgcgatagcctattgttcttgggcaacaagcctgtgtggcgtgttactatactgaagcatggtaggtaacataacacagtggtaaccatttgtgtatataaacatacctaaacatagaaaaggtacagttaaaatataatataaatgataaaaaatggcacacctgtacagggtactaaccattaaatggagcatgtttgaatggaagttgctctgggtgagttagtgagtgagtggtgagtgaatgtgaaggcctagggccttactgtacactgctgtagactttagaaacatggtacagttaggctacatcaaatttataaaaaatagttcttttataataaattaaccttagtttactataactattttactttataaacttaacattttttttcccacttgccaaggctgatgtaacattttaatctttttttaacttttttttttcgaccagttgtcaaatgatcctttattgaaatattttcctttgtgcttaactagctgggcattccacagcaccactgttgatgtcatctatgatgtcatgagggtggtggccatcaacattacagcccatagactgggcagtccccggaatctctttaatggttccagagagttctctggctaaggatcggtgccgcatctgtcgagcaatgttgacgatctcatcaaaagtgatattcccattgtgtttaatgtttttctgtttctttctgtctcttggtggtttcttgagggctttgatgatcggggcagaggcagaaggcaccacctcaatctgggcctgtctgttctcaatggtcagtttcactgtaatcctcaggcccttccagtcacccgttgccttggcaatgtcatcaccaaccttttttggagacagacccagggggccgatcttgggggccagggcagaagtggcaccgacttcacctctggtgcacctcaggtatacgaccttgatctcgttggggtcgaacttcggtggcatggtggaggcagctggtgtcggatgaacccagattcaggatgaccgaagaaagttgcaccttggcctcctccgagccgaaagccgagagcttctctctcttttttttttgagatggagtctcgctctgtcgcccaggctggagtgcagtggcacaatctcggctcactgcaagctccgcctcccgggttcccgccattttcctgcctcagccttccgcgtagctgggactacaggcgccctccaccacacttggctaattttgtttttttgtatttttaatagagacagggtttcaccatgttagccaggatggtctcgatctcctgacctcgtgatctgcctgcctcagcttcccaaagtgttgggattacaggcgtgagccactgcgcccggctaactttttgactcttgtaataacaactgaaaacacaaacattgtatagctttacagaaatattttattcctttatatccttattcctcatgctttttttctatctaaattttgttttgggcggggagcatatattcagggcaatatgaatctctgtctcctggcttgaaaataaaatttttgttttttgttttttgtttttgagacagagtctcgctctttcgcccaggctggagtgcaatggcgtgatctcggctcagtgtaacctccgcctcctgggttcaagtgattctcctgcctcagcctcccgagtagctgggactataggtgtgtgccatcatacccagctaattttttgtatttttagtagagatggggtttcaccgtattagtcaggatggtctcgatctcctgacctcgtgatccgcccgcctcagcctcccaaagtgctgggattacagacatgagttactgcgccccgcctgaaattctttttttaatttaaaattttatttatttgtattttttccaagaaataagcttaaatttgaaaaattttaaatattattttgcttttcaaactttttgttaaaaacgaagaaatatacacattagcctaggcctacatagggtcaggatcatcaacatcactggctttcacctccacatcttgtctcactggaagatcttcaggggcagtaacacacatggagatgtgacttcctgtgataacaatgctttcttctggattgcctttttttttttttttgagacggagtctcgcactgtcgcccaggctagagtgcagtggcatgatctcggctcactgcaagctccgtctcctgggttcacaccattctcctgcctcagcctccggagtagctgggactacaggtgcccgccaccacgcctggttaattttgtttttgtatttttaggagagacggggtttcaccgtgttagccaggatggtctcaatctcctgaccccttgatctgcccacctcggcctcccaaagtgctgggattacaggcgtgagccacagtgcctggcctggaatgccttttgaatgacatgcctgaggctgttttatagttaactgtttttgcaaatagaaggagtataccctaaaataacaataaaaagtacagtacggtaaatatataaactagtaacatagtcattatcattattaggtattatgtactatatgtaattatatgtgttatacttttatacaactggcagtgcattaggttcgtttatatcagaatcaccacaaacaggtgaggaatgctatgacattaccatggctataatgtcactaggcaataggaatttttagctccattataatgttacggggctactgttgtatatgcagtctgtcattgaccgaaatgtcattatgggcacatgactgtattaacatagcatttacattgtgttagatattataagtaatctaaagatgatttaaagtatatgcggctggatgtggtggctcacgcctgtaatcccagcactttgggaggctgaggcaggcagatcacctgaggtcaggagtttgagaccagcctggccaacatgctgaaaacctgtctctactaaaaatacaaaaaaaaaaaaattagccaggcgtggtggcgcttgcctgtaatcccagctactcaggaggctgaggcagaagaattgcttgaaccctggaggtggaggttgtagtgagctgagatcgcgccattgcattccagcctgggtgagaagagtgcaactccatctcaaaaaaaaaacaaaatggaggccaaggcaggcagatcaccagaggtcaggagtttgaggccagcctaatcaacatggtgaaaccccgtctttactaaaaatacaaaattagttgggcgtggtggcgcatacctataatcccagctactcgggaggctgaggcgggagaatcgcttgaaccctggaggtagagtttgctgtgagctgagatcatgccattgcacttcagcctggacaacaagtgaaactctgtctcagtcaatcaataaataaagtatatgggagcgtgtgcatagactatatttaatactatatacctatttatgtaagggacttgggcatccttggattttggtattcttggggggtgctggaatcaaccccttttggatactgagggatgactgtaatttctggttctaggggaggtatcattaggagctggccagacttagggataagggaaggaagttatcctatttctaattctgagaaaagcacttcttctgcccctgtcctagcaagtgtacatgccatcttaagaatgatcattctacctttgctctctcccatctcctgggcagctcaaaaagtttccaagaagacaggaccccggtgttccacagctattgccacaggtaactgtgctcaagagctgggtctgagaagggatttggggtatgtgtaaagggagaatgatggaggtggagggacactggtcctgtaattcctaagtcacctcctcaattctgtagggttgaagaaccagaagccagttcctgctgttcctgtccagaagtctggcagtaagtgacaaacataaccactgggtgagaggctgggatagggaagagaagatggtgagtgaccagaaaaatccatttggtctctaaggggaaggagatgtagcatcaggtgtggatcccataaaggctagaagggaggagggatagagagcctagacttcactgacctttgtcctttctgtgttcatcttagcatcaggtgttcctcccatggcaggagggaagaaacccagcaaacgtccagcctgggacttaaagggtcagttatgtgacctaaatgcagaactaaaacggtgccgtgagaggactcaaacgttggaccaagagaaccagcagcttcaggaccagctcagagatgcccagcagcaggtcaaggccctggggacagagcgcacaacactggaggggcatttagccaaggtacaggcccaggctgagcagggccaacaggagctgaagaacttgcgtgcttgtgtcctggagctggaagagcggctgagcacgcaggagggcttggtgcaagagcttcagaaaaaacaggtggaattgcaggaagaacggaggggactgatgtcccaactagaggagaaggaggtaagggccagattttcaccagatgtcagccccgctttcctggcagaggtcatgcctcccctcccttccaggtacccctcaagtctgggctgagaactcctgagcacctatctttagcagtataggtgctgctgaagatacctctctcttgacctgtctgcaccccagcccactcctgactgtcttgctttctgccacgcttcttcctacccttgactgtttgcaaagctctcatttagatctgtgtctttcttagtcctccatccctctttctttgggttcccatcctgatcacaaattcctgtggtactctctttccctcctcccatgtccacttgactccttcctggtgagcaccaactagattaagttatttgcagtctcttaaatgactcaactttcacttctgggcattctgcatatgtgcttccctctttctggaatgttctttgtatactacatccttccttggttcactcctgtacttctgggtgtcaccctagatatcatcttccttgtgctcctctttgtgcttggacatacccatagcactccctgtcttagtaccatgattccttattttctcatctttctttgtttaccagactttgaggtccttttgagcagggacctcacttccacccactccatacgccccacagtttgttcttcttcttggttgcatcttaccctctgtgtatgttgtgttctcttctgggcagaggaggctgcagacatcagaagcagccctgtcaagcagccaagcagaggtggcatctctgcggcaggagactgtggcccaggcagccttactgactgagcgggaagaacgtcttcatgggctagaaatggagcgccggcgactgcacaaccagctgcaggaactcaagggcaacatccgtgtattctgccgggtccgccctgtcctgccgggggagcccactccaccccctggcctcctcctgtttccctctggccctggtgggccctctgatcctccaacccgccttagcctctcccggtctgacgagcggcgtgggaccctgagtggggcaccagctcccccaactcgccatgatttttcctttgaccgggtattcccaccaggaagtggacaggatgaagtgtttgaagagattgccatgcttgtccagtcagccctggatggctatccagtatgcatctttgcctatggccagacaggcagtggcaagaccttcacaatggagggtgggcctgggggagacccccagttggaggggctgatccctcgggccctgcggcacctcttctctgtggctcaggagctgagtggtcagggctggacctacagctttgtagcaagctacgtagagatctacaatgagactgtccgggacctgctggccactggaacccggaagggtcaagggggcgagtgtgagattcgccgtgcagggccagggagtgaggagctcactgtcaccaatgctcgatatgtccctgtctcctgtgagaaagaagtgaggacccatgggcactggaactgggaaatggggaggagtgggcagggtgccacgagatggaggtagagggagaaaggagcaagagagaattgaaggatgaagtgcaagttatcaggctgggttaccacatccggttttggcctgtgggctgtcggtagatctgccttaacctgggagtggcgagggagtgatgcatctgccaaaacgaggagggtcactacatctcatgtctcatcttcttgctcagctcatcctagccatgctggcctcctggctgttcctcaaccagctagtcgtgctccccatctcagggcctttgcctggatgctctttcctggagatcttggctatcctgtcaaaacttgtgttccccaccccgcctttatacactccctattctatgtattccttaccattttcagacatactgtgcatcttattttgtttcttgacaggctagaaagcttcaagagggtgggggtgggctcttattcatttccatacatattactatgtactgacttctgcctgcctttttgccccttctgctcccatccccaggtggacgccctgcttcatctggcccgccagaatcgggctgtggcccgcacagcccagaatgaacggtcatcacgcagccacagtgtattccagctacagatttctggggagcactccagccgaggcctgcagtgtggggcccccctcagtcttgtggacctggccgggagtgagcgacttgaccccggcttagccctcggccccggggagcgggaacgccttcgggaaacacaggccattaacagcagcctgtccacgctggggctggttatcatggccctgagcaacaaggtgggaatgggagtggggtgagatacgggacctgggggacagttggggttggctgtgcagaaccctgcctattcctaaacatctgtccccacctcaatcatctaggagtcccacgtgccttaccggaacagcaaactgacctacctgctgcagaactctctgggtggtagtgctaagatgtgagtgaaagggacagatggaaggggtcaggtaggaactgtgttggggtgaggggtagaaaggggaacagtggagacctgtccaggctctgctggcccctaatgctggggttgggcacattgtcttttcataggctcatgtttgtgaacatttctccactggaagagaacgtctccgagtccctcaactctctacgctttgcctccaaggtgcgattaccacccgtcagccttgtcaggacccgtgggtggttgtaggcttctccattccaatcccttttgtcttctagggcagggagcacatttgtgcagaaaggttttgcaggtatctgaggcactgctcacctggttccatttttaattattagcttttgagttaagttttttaaaaaacgggtgattaatttaacctgagaaagctgattaaaaaaaaaagaaaaggtgactaaaaggtctaaactggttgggcgtagtagctcatgcctataatccgaacacttcgggaggccaaggcaggaggattgcttgagcccaggagtttaaaatcagtctgggcaacatagtgagaccctgtctctacaaaaaataggaaaattagctgggtgtaatggctcacacctgtagttccagctactcaggaggctgaggtgggaggatcacctgaacctgggaggtggaggctgcagtgagccgtgatcctaccactgcacttcagcctgggtgacagagtaagaccttgtctcaaaaaaccaacacacaaaaaatccctaagattcctccctatcagcatacagagatcattatttttaggtctgcctagactccactatgtagctgcaccaaaatttatccaccagttccctctactggacacttggattgtttccacacttttttagtcacaaacaaggccacgttgactaactttgtacatacatcattttgtatttttcagttacatctaactagggaaatagtccttgaaatgggattactggatcaaagacttagaggtttttcagactattccaaatagtgtgaattcagactccaaacctcatgagggtcagccagtggctatatgaattctcactaatgagaattccttccactagaatctccttccactagtgttaagcaagtcagaaagtttccttactgtctgcctccacagtaatttttttctctggtacaccctcctcctgcgcgtatagccctttgatgggctctggctttatttgaggtctgatcaggtctgtcctgctgtgcgcttgggcctcctcccagtcagcactgattgttgctgtggagtagccagcacctgcaccctgatctggtattctactttgatgagggtttccctcactatcttgcaagttcaattttagagggtggtgatgttttttctaactttttattaatgttataccaatgtaacatccaacaacatgaactttaatatcctctaatacccagtttatgttaaatttcacccaactgtctcagaagtgtcttttatacataataggtttgttcaaatcaggatccaggcaagggccacccacttggttgaaatgtctcaagttccacaaccctatcccacactgccactattatgtcgtttgttgaaggtcatttgtcctatagaatatactattctggattttggctggttgcttcctctttcccccatactttcacttatttatcatatttgggtgttgtcaacctgacccatccatttacaagctccttattgactttttcacctagtgattttatccagcagtgaccatacctggatctttatttcattaaggggtttctaaatggggatttttctaatcttagttgttctgcattggttagtcacgattcttttatgaagacatttgccttgccatctacttggtttctctgaaattcaattcatacaggaaaaacaagataaatgctgaattatttattgattttcagtattgagttgatatcctagcagcttccaaaggtgaccaatgaatgtttatctgagggttatttttatttttattttttttgagacagggacttgctctgttgcccagactggaattcagtggctcaatcatagctcattgtagccaccaaaagtgttgggattataggcgtgagccacccagcccggccacagtcgttcttctttctgatgctcaaattgccccatctttagccaataggaacctcctggccgggcgcggtggctcatgcctgtaaccccagcactttgggaggctgaggtgggtggatcacgaggtcaggagatcgagaccatcctaacacggtgaaaccccgtctctactaaaaatacaaaaaattcaccgggcgtggtggcgggcgcctgtagtctcagctactttgggagtctgaggcagaatggcttgaacccgggaggtggagcttgcagtgagccgagatcgcgccactgcactccagcctgggcgacagagcaagactccgtctcaacaacaacaacaaaaaaaagagcctccttcagattggtgccagtgtcctttagacagaactctagtagtcttttcagattcaacttgtacatttccttccccagacttcaactgatccattttctaaggagtcctagttcctaaatgggtgttattactattttatctcggtttaagtgttttacagtgggagaggttggaggtctctagtacagggtattgctggaaatgaaagcctcctttctctgctcctgtattttcttctggggcttccatctcttctcaagccttttcacctcctccaaacctagtgtgcagaggagaacaaaccataactggcaccagcctgaaccagcctttggaggccttatttcggtatttctgagggcagccctagcattggaggatgggagatcttgggaaaaatgttgtattggttacgctgcaaacttttatcctgtctaaccccctgcccccaggtgaaccagtgtgttattggtactgctcaggccaacaggaagtgaagacggatccagatctgtgtgtgtgtgtgtgtgtgtgtgtgtgtgtgtgtgtgtgtgtgtgtgtccctatgtctatgtatcgggtgaggggtgggagggttgctggagggtgctttattgggtggagggcaccatgtcccagggctatcaaataaagaatagtttggttttttttttaaataaaggttttattagcatttgcccaagaaggcagatactttcatatctgtaa

SEQ ID NO: 390 - DNA, 14990 bp, Homo sapiens
  source 1..14990: mol_type = other DNA
agtgcgcaagcgccattcgtcggcgccgactcctcccgctaaggcgggaacacgcggggcccaagatggcggccagccggtaccggcgttttcttaagctctgtgaggaatggccagtggacgagaccaaacggggccgggacttgggcgcttacctgcgacagcgggtagcacaggcctttcgggagggagagaatacccaggtgaccggcggggaggcggctgggacgaggggaggaaaggacgaggcaggggcggggccaacgagcgcgctagcagggggatctgcgcatgcgcgcgccctctttccaggcagcacgtgagcgcggaccccctttttcccccagggagctactgatagcgacgcccgttgtattcagcgctctcccccggctgcaccttggaattgccgaagaagctttttttaaactccagatgggccgggtgcggcggttcacacctataattccagcactctttgagaggccgaggcgggaggatcgcttgagcccaggatgacctcctgggcaacatagtgggactccgtctctacaaatcaaaaaacaaacaaaaacttcaaatgcagaatctctaggggtggggtcttgacctcagagttttaaaagctctccaggtgattcaaggtgcagagagagttgagacccacaccaccagtggcagctggtgacagcctcagctttttgcttccttgtcacggtagcattacctcattatttcgcagtgttgtgtattgactgagctaatccccagttaactctgcaggtccccgctaagcgtttgcgttcttcctgagcccctgtaagcctgtgcagcaggtttgggtcctcagctcacgcagctgtgtgtgagtagtaggcctatgttcttgctttcctccaggttggcgctgcagctctgggattcattcattcatatagctcgtatttattgagcacctaccatatgcctggaacggtgctagggaaacagcagtgttaaacaggtgaagtcctgcccgcatgaagttttacattgtagttcaggacacaataagcaggtaagtgtacgtaagacagataagtactgtgatcgatagaaaatagggtagcgtgataaaagggtaatgttattagtggggcctttctgaggagatgacacataggtgagacctaaggcaagaggatgagccagccatgtacacttggcgggaaggacattccagacactgcacatgtccagaggcaggaggcagattgacatgtttgaggacagaaagaaagccagaatggctgcagggtagtaagtaaggtggagtttgctaaggtgaaggtccggagccaggcacagtaggatattatctgttctgattagctttagacctcattataaggccagtgagaagtcactggggatgtttagtgaggggactgatgtgccctaatttactttttaaaagactattctggttgtatgtggtgagtgggctatagggggcaataacaaaaaaagaggctggagagaagccgattatggtactataagcgacagatggtggggggttggatgaggacggcagcacagaagatggaagtggttggattcaggttatgcgcaggttgagtcagcaggacttgctgatatatgggatgtgggataaaggaaaagagaggaaccaaagatagcacctagatattttttggcctgggcatctaggtctaagatggtgccatttactgaggtaggaataggtgaagtgtaggaagaatatctcgagttcggtgttaagcaggttaaacctgagatgccaagtacactgatttccaagtggcaatgtcaagtaggcagtgctatatttgagcctggggctcgggcaagagaccagaaatgaaatgagataatgagatgcatatacacacagtctgaagaaatgacttgtgaaacttggccaagacttgttacagaaggaacatgggttttttttttttcagcttagcccgaaacagagccaagccagcccacctaaaggagcaggagcacgcccagtggcatcattgtgactgtactgctgattggctggcagcctggggagtgtctggcccaggttatacgatacccagggccctcacattattcatggtggtcttcactggcccaaagtgtaaagatctttaaggcaagaatcttatctagtcccaattctacaaacccgtgaactttctaaagctgtactccctgcatatttttagtatgagcttcctgaaaatagagatgatgccatttttatctttccctctctcccctacgagtgtctagctagttcttggcccataaaaaaacactcagtaaatgtctgaatggataagtaaataattggttgtggctcatgagacaaagataatttgaatatagtttcagatgtagcagaactagatgaagagaagttgtgaagagtgagaaaggaatatttgtgtgtcctgagtggtgagaattgatttgagagcttaccatgtttgggaaattgcaggatctatggaggaaggccataacctggccttcaccactgaggagcttacagttgagcagtcagcggctccatccttggggaggtgagagagcgtaacattcacttgcttgattgttagtgtaagaggagccagcaaaggaggaaagagttttctctttcggagttgtcatcacctagggcaatcgtttctgatcagtcaaaggcccacacaggtttgagtcccagctgcagatgcaactcatggctgtgttagtgattctgtagcagctgatgaatgcattcctggtagagtgaaccagtgcacaatggcagcaggtgcattactcaggaccactgttgcggtacctcatcctaatgtcacctgagaatgcacctggccttagtaaatctttgtggtaatttttgaagggcgcaattccttgctggaattgaaaacactattgtgagtcactcctactgacacccccagatcatttataaagaccttgagaaagcaagatgattctggtaggctcttcattaaactggcagcaggaggtggggcttagatccagttgactgactagtatggagctcctccttggttaagccggttgccagaagacagaactggaggggaaagtagctctgctcatgccgtctttccatttccgtagaggagagaggcagtcagtcctcctctcagcctcttggcttccttcgtcctaatgatcaccctgaaaggtgcacagtgcacctttgccggcgtgatctcatttaatccttagtacagctgagtggtagccattactgttcccattttacagatgaggaaacatcagaaaaacaagacaacgcactgggggttccgtagccataagagacaagccaagtgagaaacagacccagcccctctggccctagtgtgcatcgtctcctgggtgcctggcctttcctcagctgctgttccaagttattgttagaacaacctcttattccatgaacgtcaaaccacttccttcccctggttgcccgttcaaacctttttgggccatagatagtttgggcagcaaatggaactccctgtgtttacccacctattctttgccccagccactaccagtccagatgggaagaaagatggtcctgggtgggacaccaggcggagaaaagctgggttaactaaagggcaaatcaataattcatacacaaaaccagagtacaaaaaccactgcctccatttattccacctcaaattgccctctggggagtcttgtggtccaccctaaacccaccaagtggggaggtggtggtgggagcgggaacacatgtaactcctcttacaccccatatcctattgtgtagttttaaaaagtcagtgtttatgggctttgccaattttgaatacagtttgtctaagaacacgtgtttcctacagcgctgagagcttaataaaagaattgcaacgtgggggaaggtggcacaacaaatgtaattgttgacctaacaacagagaaaggagcagatctttctaatgagttcattaggtgcttcctaaaagatcccggactgcacaccagcacccacttatgtagcacaaggtgcaactccgaggggcgtcctagaagagctgctgctcttcgcccaccagggagttctaactgtattgtatgcaagtttaagtataataatattggcccagtttgaaagaagttaaactttttcttgggtttctaataaggtaaatggtatttccaccttctcagaggagaattcaaaggtttttttgattctgttttctcagtcatccatttgaggcctggtccttggcattcctcagtgtggcagggagctagctcccaagccacctggcatatgctggccacggtgaagccatctcaacgttgctcacccccacttgtgggccccctgaagttatgcttttgaagagtgtcctaagaacagattatcctatttttaattatgtattgagcccatcgaaaacctggagttgtaaggagaatcatctctaagagggaatacaaacatctccatctttttttctctcccaattctgaatggcgccagtgtgagctagggtagtattcacaccaaggggtggcgtttatctctgcatatgtaaagctgcagtgctccacctgaagggataaattcttggccacttctggtgggtcactactttattcaaagatgtttggggtctgcccattgcctcctgggcaggtggcaggcaactttgtgagacctgcagtgcctctgatccttggtcccagcctgtgtttccaaccttgcctcgcaccaccctaacatgagccccaggctcagcaagggtgtcttctcatggtctcccaaactggccatggtacaagcaattctgatcctttgagacttaagtgcgctgtggatcactgcacccctacaaccgcaaaaaacccaaacacagagtttgtcaagaatttggtggcttcccaggctcttggagccctccctgggttccccttaaaagccctgtctgcctaaaacactcttgtcctgtgcctcttcatgcctcatcctcccagtcatttctggtccctgtgtcactcatgcccaggttggcactcctcactctctgcactgtcgctgcagtgaaactcagccctttcctgccacacctccccatcagcacagccaggtgcccaactcccacctcgggtctcgtgcagcggcccgtgctccgcagatctggctctcacttacacattgccccgggcagggttggtttctaattcatgtgtatcttgtctctgtagtgtgcctgccagcttctccacagctggcctgggtcgtcgtctttgtggcccctcaccgtcccctagtggagcactctttctatagtaggtgctcaagaaatacattttcaactcaattgaagggaataggctcccataacagaatgaactcatttcagaagttcattaccaagtcttgaaaacctttttttatagatcctcctggaccgaatccagctctaccttaattagcaaagcaatttgcaacaccctttcccaaaagtgcttatgcgtccctttgtgtgactagaataggggccgctgtaccaattgctgtcaccacccaaaattcaatttgcaaaatcgaaatcagtgcctgcagcactgatgtagatttgtatgtataaaagtttaatatggtaaagagaaatttactgacgactgaacaggggaaatgcaaaaggagcaaaaatagagctataaaggacactcgtcagatgaacatctattttattcacatttggggagcagtgctgaatttttcataatgtccccactgctgccttttcaaacccagcactgctattagtcctaaaacgtctgtgatctcattaggtgtgaatgcaaaatcaggtaatttaaagcatgtattaagaatatttctaaaaatgcaccgtccatttcatcagaaaaactgcatttcagagctcaggaatgttagtgctggagtctgtgaataaagtgtaagctataggaacgtggtgaggcttctggaattcgacagatgtctccactgacatccttttaagtagtaagcatgacttttttaattgctgagcttgagttatctgtggctaggaacccagcattgaccaaggcttcatcactcctcaagcagtaagaacttggctagaaatgggcatgtctcaaactcctgtcacctccactgagctgcttttacagcctcagttagacaccttctgacctcagacgggaaactggatggcaagtctgttttaggactcaggtgtttggttttctttctcaggttacagctgagtccaggaattctgggaactctctaggagactgtctctttcacacaggaagtttcagaagtgagagtggtcgggtgcggtggctcaagcctgtaatcccagcactttgggaggccgaggtgggcggatcacaaggtcaggagattgagaccatcctggctaacacggtgaaaccccatctctactaaaaatacaaaaaattagccaggcgtggtagcgggcgcctatagttccagctacttgggaggctgaggcaggagaatggcatgaacccgggaggcggagcttgcagtgagccaagattgtgccagtgcactccagcctgggcgacagagtgagactccatctaaaaaaaaaaaaaaaaagaagtgagagtacctgagggtcactttgctttttgcacttagactttgtacattttgctcttataggagcagcactctgcaagggtgacccgccccccatgcccctcctgtctgtcctgctgctcatcagggatgggactacgtggcaaggaaggacagcaccttataccacacctgcttgagggtgtgatacaaggttgctgagcaacctactggtgacttctcactgctagagaagttggagcaggaagggaacttgagttgaaaggtatttgagggtggggatctggtcagaatgcaggtttatcaggaagcagtgttaggagcccaggagagaggcagaggctatgggaggaaggcagatcagcttgtggactcctttcctaagagcttggttgggaaggtggtggggatggtggcaggacgggaaggtccagataagcggccatcaggtgaagaccaggtacagcaaacagctgctctctcggcagaccatggagagctcagtgactgctgagagccaccagggtcagtcaggagtgaagcctcagcagtttttcatccttcctcacttccgtttccagcgccaccctcggcagtgcacaccagccatgctgatccactggtaacatgctgacccattccctgggcacgggctccacctggtcctgtgcctggagcaccccactcccttgccggtacatgcgcccatcctcagccactcattgtccagcacttcctgcctggccccataggcccatagcaccttgtacatgccccttcattccactcccaccagggtggttctgaactgttctgtcctttcccctcttattttatgagacaggggcctgtgtttactacaactctttactactaataactgtgagaaaaactaatcgctcacatttatcggcgttccaggcccggaattcagagcagcccaagcgtcacctcatttatcctcacaccaccggggacgtaggggctattattatattttcttttaaaagaaaggttaagttggccagtatgctttaaaaatgttcagtgcatgaaagacaaaggccgaggaacggtcccggattaaaggagactaaaagatacatgactgttaaatgcagcaggacatcctgtttttccatagattattattgagacaattgacagaattggaatatggactgtgcattagataatagtgttgtatcggtgttaagtggcctgaatttgatcattgaactgtggttatataagagaatgttcttgttcttaggaaatgcacactgaaatattatggggtgaaggggcattatgctcctactttcaagtggatcagaagaaggatatgtatgtacagatacagagaaagataaactgtggcaactttttttttttttaagtgtatttcatggggaagagtgagtggtttgcctgacatcacatagctgataagggatggtgccaggagtcaacccaggcagtttgactcccctgctccctacagccttggagatactcattcacccaagcgtcccctgctcatagatgggccaatcatgctatagggtctcgatgaatgtctgttaaatttataagtgagcacactttgggaggccgaggtgggcaaatcacaaggtcaggagttcgagaccagcctggccaacatggtgaaagcctgtctctgctaaaaatacacaaaattagctgggcgtagtggtgggtacctgtaatcccagctacttgggaggctgaagcaggagaatcacttgaacccaggaggggagtttgcagtgagccgagatcacgccattgcactccagcgttagctcttggctgtgcgtgccctgctgaagaaatgttccagatgtgttcgcccagatgtgtgcagaattccattctaatgggactttccctggacaagctgaccagcagcagggagaccacagcctcatattttccattcattctgtccactcagataatgactttattattcagcaaacgctggccacctcctcaggccataatccttcctcttctgatgtatctgggtgtacattctcatgatgagtagcctgaacgcaggaatgggtcaggtagaactaaatgatggattgtcttttttgtttgctgtaaagtagggacctcatttgacatgcacagagaggcagcagtggagctgcctattaaaccactttactactgatttatttatgctctgccttctccaaggaaggatttaagttaggaaaaaatccatcatttgaattctgggggaaaaaatataaaagagaaagttttgttctggggagcttttcaaaattcttggcagaaaaatataaagaactatacataaataataggaaggacagagtaaagggaaagttagaagaggtgcaagagaaaagaccacacctcctctgtatgctgcctgtctccctgagaaggtccagcaggggcactgctgtctctggcaccagagaattgacttacatcaccctttctatggcaaggcctcagtgttctgggccatctcctttctagcaggacctaactgtggtcctggcttggttctcctcagtttacacattttatcttaaatgttgccttcttcatgtttctttccttcttgtagagtttcagcagctccccacttatcatagattgagaactcagatgattttttttttttttgcctttgctaaaagaatctgttggtctgaggccgggcatggtggctcatgcctgtaaccccaacactctgggaggctgaggcaggtggatcgcttgaggtcaggagttcgaaaccagcctggccagcatggtgaaaccctgtctctactaaaaaatacaaaaattagctgggtgtggtggcacatgcctttaatcccagttactcaggaggctgaggctggagaattgcttgaacccaggaggcggaggttgcagtgagccaagattgcgccactgcactccagcctgggcaatagagtgagagactgtctcaaaaaaaacaaaagaatctactggtctggcctgaagcatcccacaggattcctgcctcctcttccttgctgacggcatctcctcccccaggaaggcctgcccttctcccttctgcttgctgaccttctgcttgctgaccttctgctgtgcttccttcagaacctagcattgtctcacttccatcatgcactgaccacttgagcatgcggggactcccccactgagtccctgtagcccactctgcccagcaccccctttgttaggcacgcctttccaaccttacatttctattgtggcatctcccactgcagctggtgtcgtggctcacaagtcacagatgctcaacaaatgcttgtttgctgattaattgatctgatttttctgtaggttggggagttgatgaggcagagctatgcctccaaaaagtagtttctaatagcagagctgtagtccaggtttgcttcccgcagagtggagaagccagtgctagctgcaggcctgcttcatgtgaacgctttattaagtatggtctttcctcaaggtacagacactgtgggaggcaggactcctttgctcacctcctttgggattctttgcttttcaggttgcagagcctgaggcctgtgatcagatgtacgagagcttagcgcgactccattcaaactactacaaacacaaggtgagtgggccacagtcttttatatacccagctttctgacgggacaactaataagaatgagtgaaaatctgattaggtaatgttttgtaaagacttggctttgctgcgttcaaatgaaaccagtaatttcaaccaagccaacagaggtgcctggtagaggcttttaggccacctaaataaaagctatttaaaattgtgaatatagggaagaaacaaaaccaattatgaatagaagccatgtatttgatatgccagtgtgtgctcctgggaatgtctgacagccattggatttatacctattttcccatccactctgacggaactgacacctccccacattctggtgataaagatgggatgattgggaaagtgccctccttttacggagctgggcccaacatgattactgtcaaattccatttagagtggtttttcccatacttgaaaaatatgctcattaactccacaaacatttgtggccatatgcctatgtggaaaattgattttttctaaatcctccctgctaacatgtgatccatgagcagcagcatgggcatcacctgggaactggttagaaatgcagaatcaggggccccacccatacctgcgttttccagggaggactcacgggtacattatagttggagctgcctcctggagactgtactggttcttgcgaggccaagtcttgacctcgaggtggcgctgctcttctccttgctaggcctcctggcctctggttgcccagggcctaggtgaaatgcagttagagagcagggcttgtgtgctgatctctcccctcccttcacttcctttctgccccggtgaccagtaccctcgccccagagacaccagcttcagtggcctgtcgttggaagagtacaagctgatcctgtccacaggtaatgaaagcacagctgccttttctcattggtttgcaaatgattctgagtttgagtggccaaggggaattgtctaagaagacagttttgcttgatggaaagtcttgtagaacagcccagaggaaattctgaagctacagggcgcatgcattttgaccatatactgtggagaaggtcaaaggcgttatttaaaaaagaaaatctatctttagggcttttaaattcaaggctgggcatcagggaacagaggaatacctatttgccaaatggaagtagttgaaatcaggatggaaggaaaataattttatttttatggtcttaagagggctttataaacaatgaaggttttaattaaaacaaaaaaccattcaataaacgtgtttggggatatccgcctaagagttatgtgacccaggggacgtggtctgtgggttagatatgagtttaactaggtatgttttagagtcattgatagactctgattatcaagaaaggaaacatcctgccaagcccgtcctttccttacttccctatctccattgtccctaaggaggggggccggagagccagggatgaagtaggcaggtactggaaaattactatttttgttgccaagtatattatatacaaaaataggttaaccttttctgggagggcatggccctgacacatttccttctggtattctagaaatgtgtctttcctcttcttctggcagccttcagcaacttaagttttgaggatttgggcttctagaaaactctcttctgagattaaaacctggtggtgtcacctgctattacatgtcaactctaaccctatttttattccagtactctctgggaaactgtggtgaagatattttggccaggcagaatcactttattggcaattttttttaatgtgtaaatttactcctatatccctgggtccgtgtaattagcagcattgatgcacattattgtgagggccctggacagtttgagcaaagtttgaacttgaagtgagggcggaagtaagttccagaggccctgcctctgccctctgttttgttcacctcagggcagcctctgcaagtggaaaacaggcagcaacgaaggctgggagatagtcccgccattggtccgcgctgcagcttgttctggcagcgagtttagttcaggaaatttgctgagaatttgttttcacagcaagcctcatatttttgttgcaaattgtgtggcgtaagcttaccaaatgtttcctctgacaggacaagaaaagacctgcagcaccttgtagtgagaggctttgagggcctggcaagtctgaaatgtgctgtgttctgggttatgtgtgtgtccaccctgggattggggtcatggaaagcgcctaagggaggcctcagtgtccacctggacactggaaacatggacttctggaaaagctccagagcaggggcttttttctgttaccttttttggtcagaaaagatactctttttttctccagtagttttgttaacgtgaaaatttaggctggtaaagcaaaacaatattataagaatatctaaaatttaacatgcacgtaaaattagatttcatggaacattagccctagagactttagacaaatggttccgtactggggggatggttttgccccccaggggacatgtggcaatgtctggagacatttttagttgtcacaactggtggtgcgggcagcggtgctactggcattagtgggtagaggccaggatgctttgaaacagccttcagtgatgcacaggccagcccacgacgaaaaattatctggcccaaagtgttggtagtgccaaggccaagaaaccctgctttggttcctgggtgtagggacgtgtatgttcttaaacaagagcccctcccgcctgcattgtggtggatgatggctgccttttcattgagtgcgggctgtgtgccaagcgagttacctccatgcttttctttaatccttacaacttttgaggtacgtgtggttttttttttcttactttttcacctctccccaagttgtctgcagatgtgtgtttttatcttcattttacagatgaggaacccgaagcgtagagggttaagtaatttgcttgaggggacccagagtgggagatgatgggctcggattcaggcccaaggccatccccctcccagtgcctgctcaactccacagcatgtgctgagtccacacaccaggattcaaatccctgctccacttcccagctgtgcaacctgagcaagttacttcactgcctcctgcctcagtttccacacctgaaaactggggacaggaagggctgtgtggagcaggccaaattttgcgatgaagcatctgggtctgtgggttgcacagcggacagcgcagggccatttctttgccctcatacggagcagggcaacgagcagcacatcccgctttgatgccgagggtgaggagagggcaggagaccactgacagcgtgctgggcacagagtctggcacacagtgctcagtccccgcaagcggtcacttctgttacctgtttgatctgctcttcaggagctgggtctccacctttttcaggaacacactgtgtgaaaagcaagccatgcttgtgtcgggaaagcccagtgggtccaatctatgtcatcaagttttagacttcagtccctctctctttttgtcttccccttttgcagacaccttggaagagcttaaggaaatagataaaggcatgtggaagaaactgcaggagaagtttgcccccaagggtcctgaggaggatcataaggcctgagctcaggccttacctcgtgcacatacctaggtgtggagtcttgtacattgccatcgtcaataaaactgccccagtttccccttgaccttacggtttgggaatctcctctagctttcccagaaaggaagcccttgctgctctaaagaaagtttcagcctgagaagggatggtgattgagctatctgctgtgactgctgctcagggtagggaaatctcctggggagaggaaatgcaggtttccctctgggcctgatgagggtaatggggcctcggcacaaggtgcttcctgcattgccacgggagcccccgcccctctggcacgggtctggtgtctcctggcaagatactcaggctcccttttgttgtaggagctcctgggaggaagccaaaaatagcagtaaatactgaaaagggcatcctgttgcaaacagaaagcagtagggaggtgtgaggccgagagaggcaaaaagcctgcttggccctcatccccactgactcagagaaggatggaccttaggcctctatccctgaccttgcaaaaacccacattgcccagttggcttaagggacagggaagctatagacaggccttggccaagcggggcctcagctgcagttggcttcagcactgtgggcaggttctgtaggtggccacaagtcagaggccctgctggctgaggacacacacagggtcacctcattattccatggaaccttggctcttactgatattgagcatccttctctctggaaccgtgagggacagggctgggcccacagcggccctggtgggtacaaagtggaagtgggttcttaacctcgtctgtgtctagactcctcaggatgttctgaaatgcataaaataaaatcgacaggactgccgtagaaacc

SEQ ID NO: 391 - DNA, 32744 bp, Homo sapiens
  source 1..32744: mol_type = other DNA
ggcggggggcgggtccacgccagcccggaagagacgcagcaccgcgcatgctccttcctttccagccccggtaccggaccctgcagccgcagaggtgagtttctgtggcgttcgagttccatcggctcccatccgggctatcctgccgccttagcggctgcttctccccaggatgcgggcagggggcctctctcccactccccacacaccgatttctgagtagcgataggggctggaggcttattttatggggtagggggccgctggtaggcgaagattgtccgagggagagggggaggatgaagccagtgagtggcggagacttgccaggtgagactagcgagacggtgtcccaccgacacgcttttttcttgggaacaggactcccccgactgcctccttgcctggcactggagctctagtttgggggagaagtggtaggtaggagacgagggtgcgaaggccttagccctttggtttggggtctgccgccttcaagaagccggggctttacccctccgggccttccctgcgtaccttatggtacagccgcgagattccgcgctgggtacggtcgctgatggcctccaactgctcccgataatacagggtttgctcctctcccccccattgacctttgtaattgatgagaacttaaggaagtttggcgcgaatgtgcaccactatcctggttttaacatactgtcaacttttccacctgaattgtgtttgggggtggggactgacggagctggcctctgccgaatctgttttgtggagttgagtcttcccaccagcatgttgtctacggttttgtgtgggtcactttaggatcaagaacttgattaccgggccccggcctcgttactcagaagtgctcttgacaatcgtctccttcttgcagatgttgatgcctaagaagaaccggattgccatttatgaactcctttttaaggagggagtcatggtggccaagaaggatgtccacatgcctaagcacccggagctggcagacaagaatgtgcccaaccttcatgtcatgaaggccatgcaggtaggagggtgaggaggaagatgggatggatcttcctccccgggatcccatcccgggatgggatggaatgggatggagggatcttcccctaaggttcaaggcaagttcaaaaagggaggtcaggactgcgggggctgcttgctaacttgaagggctggctgggactggagacttgcctaggatgatccaagcttctacttaacgccttaacagtagttttctgccttacagtctctcaagtcccgaggctacgtgaaggaacagtttgcctggagacatttctactggtaccttaccaatgagggtatccagtatctccgtgattaccttcatctgcccccggagattgtgcctgccaccctacgccgtagccgtccagagactggcaggcctcggcctaaaggtatggttcccacacaaatcccttcagctatttgaagatagtttcttttgtgtaagggacaaaagcattcttagctgatgtcagctttagagggctctggcctgcaggcatttggtcaagtgctagaacctttgtcccatggcttgggacttggaatagaactagactcagttcttcaggccatccatgagatggccttaagcacagatagtctgtcactttcttcacccacacctgtacaaacatccagatacatgtggtatagaatattgagtaacttttcccgcagagtgcgttgtactattcccgagaagtccaaagcaaagccatttaccacctcgaaagaaacaagagtgttgtagttttcttgccaacaggagaagaaattagaaactggagtggagaacggatggtgtataccacgatgtgaaaggatatgcatgcatgtgtggtgtgaggagaattatcttctgattcttgggatcattgctagctcacagttgcttttttttttttttttttttttttaacggagtcttgctctgttgcccagcctggagtgcggtggtaagccaccgtgcttggcctgtattttatctaggttatggttctttgttacaaaactctgtaggagctgcagagagcataggttgaggtgaaaaaatgcgcagattcctaaatgtgatcatcagagggcccaggttcccctggagagttaccttatggagctcaggaattcgttatgaaagctccccaagggattctggtgattaggtagacataattttttgagacagagtctcactctgttgccgaggctggagtgcagtggtgcgatctcagcttactgcaacttccacctctgaggttcaatcaattctgtctcagcctcccgagactgggattataggcgcccagagcgacacccagctaatttttgtatttttagtggagatggggtttcactctgttggccaggctgggctcgaactcctgacctcaggtgatccaccacctcagcctcccaaagtgctgggattacaggcgttagccaccgcgcccagcccataatacgtctttttagcaaaagttgtctactacatcttggaatctcctgggagaaaaaaataccagtgcctatctgtgcttgatatattctgatttagttgggcctgacatttgtttttgccactcattacatgattaatttatttctgctctaaaaggagttcattctgcctgagtgcagtgactcattcctgtaatcccagcactttaggaggccaaggcaggaagactacttgagtccaggagtttgagaccagctaaggcagtatagtgagactccgtctacaaaaaaataaattagccaggcatggtggtgcacacctgtggttaagcccaggaactccaggctgcattgagctgtgattgtggccatggcactcagcctgaacaacaaagcaagacactgtgtcaaaaaaaaaaaaaggagacatagttcatattctaatcatatggactccgggtaagttccagggtaactggctagagaaaatacttgattaaattgttactgattgtgtttgtttgtttgtttatattctgtcacctaggctggagtgcagtgtcacgatcccaatttactgcaacctctgcctcctgggttcaagtgattctcctgcctcagcttcttggtagctgggatcacaggcgtgcaccaccacacccggctaatttttgtaattttagtagagacagggttttaccatgttggccaggttgttcttgaactcctggcctcaagtgatcacctgccttggcctcccaaagtgccgggattacaggcatgagccactgcgtctggccatttatgataatttttttaaggtagctcttaaagtttgtgccttagggtgtggtggctcacacctgtaatcccagcactttgggaggccaaggcgggaggatcacatgagaccaggagttcaagaccagcctgtctaacatggtaaaaccctgtctctactaaagataccaaccaaaaaaaattagcctgggcgtggtggctcgtgcctataatcccatcactttggaaggccaaggcgggagggtcacttgaggtcaggagttggagaccagcctggccaacaggttgaaaccccctttctactaaaaatacaaaacgtagccgtgcgtggtggcacgtgcatgtaatcccacctactggggaggctggggtgagagaactgcttgaacccaggaggcagaggttgcagtgagccaagatcgcgccactgcactccaacctgggtgacagagtgagactccgtctcacaaaaagataataaataataaagtttctgccttaatatatatcccacagcctaacaggtatgtgaagaagcccaagaggaactcaacgattcttggtaacccctagattatgtacttaatattggagttgggactttcagcttaggatgcttccttttctgtttgcatatactaagttttccacttaacgtgggtcaggttcaaaagtttagctattcagatgttcatagaaatagctagatacctagattggtccaataattggaaaatagttttatgttgaaacaaaatggaagccttttttttttttttcagatttgcagccaagattgtcaataagtttctatggagaaataattatttctagctgacattgtaggtttaaggagttcctgtccccattaacccatcttaaccaagtggttgctgagagtgacaacaggagagcaatgccagttttcttggctttaagggacagagttctcacattgccctgtgttcacagtgtggtttgatttacataggtctggagggtgagcgacctgcgagactcacaagaggggaagctgacagagatacctacagacggagtgctgtgccacgtgagtaaatgcatcacctatattaggggtgttggggtgaaatgtctggattctcacagctggctctggctgggtggggctcagcccttgatgatgacaaaatgaccaggaaagattcttggtttcactctgcagagcatcagaacagctggagtcctttgtgcttctttcttcatgcagtgatttcatagatgagaattaggaggaggctgggattttttaaaaaacaaaactcaggccgggctcagtggctcatgtctgtaatcccagcactttggttggagggggggggtcgaagtgggcagattacttgaggtcaggagttcgagaccagcctggccaacatgacgaaaccctgtctctattaaaaatacaaaaattagggcggtgtggtggtgggcgtctgtagtcccagctacttaggaggctgaggcatgagaattgcttgaacctgggaggcagaggccgcagtgagccgagatcatgccattgtattagatctatggctcacactgggcacgaggatagggggaggaaagcaaatgccaataacaaatatggtttcagtaattgttaaagttgtcactccagcctgggtgacagagcaagactgtctcaaaaaaaaaaaaaaacctcttcggtaaaatgtggagcttttgttagtatttttgcaaaggaataataggattcaacttttttttttttttaattttctttcatttttgagacagtctcgctctgtcacccaggctggagtgcagtggcaagatcttagctcactgcaagctctgcctcctgggttcacgccactctcctgcctcagcctcccgagtagctgggactacaggcgaccgccgccatgcccagctaattttttttgtatttttagtagagatggggtttcaccgtgttagccaggatggtctggatatcctgacctcatgatccgcccgcctcagcctgccaaagtgctgggattacagatgtgagccaccgcgcccacccggataaagtcactcgttgttgattgtaatacaaaagcaaggtgtacaagaagagtttttactaacttctaccactcttagcttttttctgtcatcttttggagaagtgaccacttgacctgagtaccatacagggtagtagaaggaatgaatttctccagcccttggttcagaggaagttggtgatactggaagtttaacgattatgggccaggcacagtggctcatgcctgtaatcccagcactttgggaggccgaggcaggtggatcacttgaggtcaggagttcaagaccagcctggccagcatggtaaaaccccatctctactttaaaaaattagctgggcatgatggtgtgtgcctgcctgtaataatctcagctactcgggaggctgaggcgggagaattgcttgaacctgggaggcggaggttgcagtgagacaagatcatgccactgcactccaccctgggcaacagcaagaccctgtctcaaaagaaaagaaaacgattactgaaaccatattcgttattggcatttgctttcctccccctattcttgtacccaatgtgagccatagatctaatacaaaatttcctcgtagccacacttgaaaaagcaagtggaaacaggttatttgagtactaatgtcttttatttaatcaaatatttgtaaaagtgagttgggaatggtggtatgtgcctatagtcccagctacttggaaggccaaggcaagaggattgttttgagcccaggagtttgagatacagtgagctatgatcttgttgctacattccagcctgggcaacagagtgagaccctgccccccgcaccaactcaaataaatcagggccgggcgcggtggcccactcctgtaatcccagcactttgggaggccgaggcgggcagatcacctgaggtcaggagtttgagaccagcctggacaacatggtgaaaccccgtctctacttaaaatacaaaaaattagccaagcgtggtggtatgcacatgtagtcccagctactcggagcatgaggcaggagaatcgcttgaacccaggaggtgaaggttgcagtgagctgagattgcatcattgcactccagcctcagggacaagagtgagacttcgtctcaaaaaaaaaaaataagtaaataaatacaaataaatcggtttaaaaaatatctaaacgtgttaatttaacatgtaatcagtataaagagtagtgaaatattttacattctttttttcttaagtctttgtaattggctgggtgcagtggctcacacccgtaattccagcacttagggaggctgaggcaggcagatcacttgagctcaggagttctagaccagcccgggcaacatggcagaaccccatctctacaaaaaatataaaaattagggctgggtgcggtggctcatgcctgtaatcccaacacttcaggaggccgaggtgggcggatcacttgaggttgggagtttgagaccagcctggagaaaccaacatgaagaaaccccatctctactaaaaatacaaaaaaattagccatgcatggtggcgcatgcctgtaatcccagctactcgggaggctgaggcaggagaatcgcttgaacctgggaggcggaggttgcagtgagccgagatcgcgccattgcactctagcctgggcaacaagagcgaaattcagtctcaaacgaacaaaaaatataaaaattagctgcctgtagtcccacctgaggtgggaggatcgcttgagcccatgaggcagaggttgtagtgagctgagatcgtaccactgcactccatcctgggtgacagagtaagaccctgtctcaaataagtaaaagaaaactggtgaattttgcacacgtctccatttgaactgtgactgggatataggaccgggcagcatcttgtctgcttttctcccatggtggtaattaaggcttttgtgggcccttccctttacatgttagttcttccataattacactccctttgttatctagatgctgctgtgaagtgggtaagtcagtcagtgtgataggaagtaggaatcctttgggaggatttatagtttgggctgtgagtattgaagggtgacataaggaaggctgagaagggtgccccaggagagacaaaggtggctcagaaggtattccccaccactggtgtaatttgcttatatttaacggagtggtacttggcttttcctgcaagattggagtcagtgagttgtcttcccttgttctatagtagattagatcatatgatgattctaaatcgatgtttcactttctagctggtgccgacaagaaagccgaggctggggctgggtcagcaaccgaattccagtttgtgagtatcttcctatttgttttccatgagccatcacttgttctggcctcagtctggttgctctgcaagttgtggggatgtcatatagtatgggtgggtcctgtcaaccagttccctcctcccacttttttccaaattccaaattttacattgagttgtagcatgcaaacttttgtaaatacataaattactgaaatgagtctcagaaatcagtacatgtggcctactagtattttctgtttcattaatgcttgacattgaactaaacactggaaggtgggtgggcttaagaaccaagatggtatgaaatcaaatcctccatcttttttcagttgatgtaatgttaggtaggttcccctctgcctcagtttctccatctataaaataaggtgataattacagctactaaggtagttgtgagattagttaatccaggcatagtactggcatatcatttttgtcctatggcaggtcctcatagcacacgattgctctcagataatgtcatttgtaaaaaggaagcatgtacagtagaaacggtccaatcctggtgctggatgctttcataggagtatgtatgaacacactctgggtgggtggccatactcccactttaccaatgaagaaatgggcctagatgttagatatggccccacatccagtaaggggcagtgctgggatttatagcctgtactcagctctctcccagctgtttacatttgggggcctctggagttataatgaggcctgaaagttagcaaaacctccaaagatcaaaccagagtgccgctcatgctgatgtgatgtgctttctcttacagagaggcggatttggtcgtggacgtggtcagccacctcagtaaaattggagaggattcttttgcattgaataaacttacagccaaaaaaccttaatcttttgtccattttgtttgcattgtgcagcctgaacaggaacagtttaagtgtcagaatgtaaatggggcagtacaggcttggtttggggagttgtcattgtcctgggtgacaccggctgctgctgtacttggctttggcgtgtgccctgctttctctaggcagtgcctccctgcagagtggtgtcccatatggtgctgcagttggaaaactgggtcccttctttagaccagccatgctgcctcagctcagcatggtgggaaaattgctggttggcctggagtcgtgatttgtgcctgctgtcaggaactataagaagtactggggagggaggatgaaaggtaacgaccaaggaaatggtgcacttggaatccttcaatttatggagaagaagcacaggaatggtgtttaggccaacgttactaatctaagtcttcaaggctcagcgtttgttgacaagaatcaagggagaaaacaatgcacaaaaaccactgttcaaagtggctaacgcctactcaggagcctgaggcaggattgcttgaggctaggagtttgagaccagcctgtgcaacatagcaagaccctgtctcagaaaaggaccaaaacatttgaaagtcatctgaaattcttttttttttttttttttttttttttgtgatgaagtctagctcttcgcctaggctggagtgcagtggcgtgatctcagcttatcacaacctccgcctcccaggttcaagcagttctgcctcagccttccgagtagctgggattataggcatctgccaccacgtccagctaattttgtatttttagtacagatggggtttccccatgttggtcaggctggtcttgaactcctgacctcaggtgattcgcccaccttggccttccaaagtgctgggattacaggcatgagccaccgtgcccaaccaacatttttatgtcttaacataataaggataaatactgggcagtaggagctttgctatccagggttcctttaaggaaggaatgagttgtagttttccttggactcagagtggtgatccgtcatcttatggcatgactaaatggactagaggtgtgtatacagttttccggtgatcaagtgtgatcttaccatggtacaggaaagggactgcaaacatatacctggcacaatgccagtgagagctgtgacaatcctgtggacttttgctgggcaggacaccaaccttggcttgcagatcagtcaccatgactatctgcttgcagtaaatacaagttactgggatggaggtggttaaagcatttgagataccagctctgaaccaaccagtggctcaagacaggcccaaggtaatgttttcagccagaaaagctggtagctaattggaagtgcatcttatgggttccggggacttgggaatcatatttgtgtagtactgtggggtaagcactgtgtacaaatggacaataattggttaaatggggcctggcatggtggttcacacctttaatcccagcactttgggagggcaagataggcggatcacttgagtccaggagttaaagacccgcatgggtaacacagtgaaaccctgtctccacaaaaaaaaaaaaaaaaaaaaaaaaatcatccatgcatggtggtgctcacctgtagttccagctacttgggaggctgagtcaggaggatcgtttgagtccaggaggtagaggttgcagtgagctgagattgtgccccactgcactccagcctaggcgacagagcaagactcaataataatcactggtctcatgaagctgagcaccgtggcacacacctgtagtcccagctactcaggaggccgaggcagaaggatcacttgagcccaggagttcgaaaccatccattgtgagacccaatctcaaaaaaaaaaaaaaaaaaatttaaaaaattggtcaaatgagattgatgataattctaaacaacacagaattctaaaccaccttcagtattgataggcagttgtaatgtagaccacgaggtggcagctgatgacaactccaaatatgcacttaactgttagtcctgggaagtgaactttggagtctgagccaccaataaaatagaagcttgctttggcagaaagaagcagtgtttggggaagcttgtttcagcacggccttggctcatttcaaagattgctttttatccaatttttctgctggcttgagtgatgtcaagtggtttgcccatgttcacacgctttgtgattgtttaacctggattccactgtgaaatgttagtagctcctgcctttctgtttcccactgaggccagctagtcaataggtttcctctacgatcttagtgattttctggccctaaaatgttactttttcagctagggctctttgccaacttctttcctcgtgattcaaattagttccgtaatacatactccaagatcacccatggactctggggaaacccgaggaatctataaaagagcatgtgaataaaaacatgcaggtagaagtggatcttggtgcctgccagctctgtccctaccttggtaggttaaaacataccttccaatcaataatcattcattagctgctcaaggatcattgctaataagagctctgagaaacaaggctcaaagtttgcccttaaccacctgacagtcgagttgggaaaacaaaaccaaagctatacattgaatccagaacaacaactattccataagtggtaaatcgtgtccagactgaattctagggaagtgtagggcaagagaaatgaatgaaggctcaagtggcccagaggtgagttgtggggtcagggaggggtgagactagtcagggcatcttgaagaagttttactggaaaataaaaatgtcaggttatgaaactggctgatgtcaaaaaattaagttcttttattttttcaagtgaagctaaaaaggaacatttcaagtcccactacacgtgcctgaggaggtcacttggagaaggttaaaagggacaggggtggctgtatgggcccagccatcactcagggaaagctttgaagaggtttaacccatcttccagggttggtctccaggtgcaccatagcctcgaatctacccaccagcccaatggttcatcagataatcccgaccaccactactactaccaaagggtttttcaagggattttggaagctgctggctgaagataccttttcctaatttaacaaacttcctgatagggacacaaatccccttccctgaaaaccagaatccccttgcagccagtgccaacaacagttttaagtctcagtgactttcttgaagcaccacttctgttttgattaataaacagaccaggaaacagctatcatgtaggcatgttagatgcttgcagacaagatagagcagcttaaaagatcccataagaggccgggcgtggtggctcacgcctgtaatcccagcactttgggaggccaaggcgggtggatcacctgaggttgggagttcgagaccagcctgaccaacatggagaaacctggtctctactaaaaatacaaaattagctacacatggtggtgcatgcctgtaatcccagctactcggaggcggaggttgcagtgagccgagatcgcaccattgcgctccagcctgggtgacagagcaagactccatctggttaaaaaaaaaaaaaaaaaaaaaaatctcctaagaggccgggcacagtggctcacgcctataatcccggcactttgggaggccgaggcgggcggatcacgaggtcaggagttcgagaccagcctggccagcctggtgaaaccccgtctctactaaaaatagaaaaaattagccagtcatgttggtgcatgcctgtaatcccagctactcaggaggctgagtcaggagaaccacttgaacccacgaggcagaggttgcagtgagccgagatcacgccactgcactccagcctgggcgatggagtgagagaccctggctcaaaaaaataataataataataaataaataaataaaaaataaagatcccataagagacttgtttttgaggaggtagccctgtagacatgtagccctgtagacacaagggctcactagaacactccttacttggtgcctggcatgggtgggcctcctgcagggcagtgtgggcctattgacgctaggcattgtcaggatagtttgcattttctagagttttatataaatggaataatacggtatgcattctttttagtccaacttcttttggcataattgttttgagattcatcagtgctgtgtgcatcagtagttccttcttagtgccgggtagcatcccattgtgtggctataccatgatttgcttatccatttacttatgcttgggcatttggattgtttccagtgcttggctattgtgactaatgttgtgaacatttgtgtacaagcttttgtgatgacatgtgttttcagttctcttaggtatatacctaggagtgaagttgctgggtcatgtggtaactctatggttaacacttagaggaactgccaaattgctttccaaagtagcagcatcattctacgctccctccagcagtatgtgagtttcagttgcttctcatcttcaccaacacttggtctgaccagtcttttcattttagccattgtaataggcatgaagagtttggattttatcccacaggtgatcatgagccagtgaacaatacgaaggtgggaggcacacagtggacggggaaaggggagatattagtcaacgggtacaaagtttcagttagataggaataagttttggtgtttgattgcatagcacagtgactctagttaataatactgtattgtatacttcaaaatagctaaaagagaggattttacatgtccttaccacaaagaaacgataaatatttgaggggatggacatgctaatcagcctaatttgatcattctgcaatatgtacatcacactgtaacccgtaaacatatacaattataaataaaacttaaaagcaatatggaggtgaggactgacacaaccaagaatgctggatgcttgggcaatacttgaccccacactgcagaatactgtaggctggattgggtctgcgcagtgatcacaccggggcagcgagtgctcatgggtaagccacttggtcagtggtgactacaatacacattcaggctgctaccgggaaagggaggggacaaaaatccatcatttgattgctcagtttttgaaagggaaactaggacagaatcagggcagtagggggggaaatgaaaggaattgtttaagaagttacagcccatagaaagcagggagcccatttctattgaaaagtgctttattggaagcccgtgataaatgcatggcaccagaccaagagaacagtcacttgagaaataagccctgcatggtttactgacatatcaaagagcccattgtgaggaaaagggcatctttaaaaatgaagaaatattaaatgagagaggatacccaagctgagggaattaaggaggcctcaaaatggggcaaaatgtatgaaagttacaaatcaaatgagagtaagaaattctgaagagtatctgcaagaaatgtcaaaggaaatagtttaagttctagttaatttaagtgtgtgaaaagcagaaggtcagtttgagaatctacgggcatccatttattaatgtgtaaaaagtacactgggaggctgaacagtcaactgactctttgacatctttgcctccatcacacagagatttccccttccactaaaataaaaaatatttagtatggaaaacttcaaacatataaaataaacataaaagtataataaaccaaggtcaggcatagtgactcacacctgtaatcccagcactttgggaggctgagggggtgcggatcacctgaggttgggagttcgagaccatcctgaccaacctggagaaaccccgtctctactaaaaatacaaaattagctgggtgtggtggcacatgcctgtaatcccagctactcgggaggctgaggcaggagaatcacttgaaccccagaggcggaggttgaggtgagccgagatcatgccattgcactccagcctggacaacaagagtgaaactctgtctcattaaaaaaaaaaaaaaagtataataaaccatagtgtacccatcactgagctttaatagtcatcagcattctgccattccttttttgtttgttttgagatgaagtctcactgtattgcccaggctgtactcaaactcctcacacctcacccttccaagtagctgggactacaggcacggcctctgccattcttgttacattgatacctacgtccactccccacccctaatttgattattattttaagtcaggtttattgaggtataatttacatacagtaaaattcactttgctttcttgagacaaagtctcactctgtcatccaggctggagttcaatggcaccatcatgactcactgcagcttctacctcccaggcccaagtgatcctcccatctcagcctcccaagtagttgggaccacaggtgtgcaccaccatgcctggctaattttttatttttatttttgtagagatagggcctctctatgttgcctagctggtctcaaactcctgggatcaagtgatcctcccaccttggcctcccaaagtgctgggattacaggcatgaaccatcacatctggccaaaattcactttttagatacagagttctgagttttgataaaaagatatacatcacagcgaagcaatggagctttcccatcaccctaaaaagtgtcacatgctgcccctttgtggtcaaccccctggcaaacacccttcttggtctttagtataattttgccttttctagaatgtcagataagtggaatcatatcatatgtactcttgggactggcttctgttgctcagcatggtgttttgagattcatctattatgttgcatgcatcaatagtttgttcctttttattgctgagtagtattatgttatatggatatattacagggtttttttgtttgtttgtttgtttgtttgagatgaagtctcactctagttcagtgatgcgatctcagctcactgcaaccttcgcctcctgggttcaagtgattctcctgcctcagcctcctgagtagctgggattacaggctcccgccaccacgcccagctaatttttgtatttttagtagaggcagggtttcaccgtgttggccaggctggtctcgaactcctggcctcaagtgatgcgcccaccttggcctcccaaagcgctgggattacaggcatgagccattgcatccagcccacagtttgttgattctttttttttttttttttttgagacagagtctcactctgtcgctcaggctgtgatggcacagtcttggctcactgcaaactccacccccttggtttgagcaattcttctgcctcagactcccaagtagctgggattacaggtgcctgccaacacgcccagctaatttttgtacttctagtagagacgggtttcaccatgttggccaggctgggctcaaactcctgacctcaagtgatccgcccgccttggcctccctaagtgctgggattacaggcgtgagtcaccgcacccggtctgtttattcattttttatacaggcatttttgagtcaaactgacattgaaatacacaaattttaactctaccctttgatgatggatacaaccatgtaactcatacccctgagaaagagaaaagcagctcctaatgtcaggaactggcctgatccttatagctaggccttggcatgtttgaagctggcctggtgcttacagcgaggccgtgccattctcccgtggacataaacaacatcatcaaacatcaacaatcagacaaggtcgctttgtgaccctgataaagtgcaccaaaaacatcaagactgccgggtgtggtggcttacgccagtaatcccagcactttgggaggctgaggcaggtggatcacatgaggttatccaatccagagcaaagcctcagtccctaagccttccccaaaaccacctaacacaagtccaaatcctatatccttcttatcaccctctttgagacaccctatgcttttccatgatacgtattctctttcatgacaaccagcaaaaaaccaactttgttcggctacagttatgcttctaatctttgcctggaaggcattgatcactgatgtacctgtcaagatacaaaatatttcacttttttttttttttttttttttgagacaaggtctcactctgttgcccaggctggaatgcagtagcatgatctcagctcactgcaacctctgcctcccgggttcaagtcattctcctgcctaagtctccaggtagctgggattacaggcacatgccaccacacccagctaattttgtatttttagtagagatggggtttcaccatgttgggcaggctagtcttgaactactgacctcaagtgattcacctgtcttggcctcccaaagtgctgggagtacaggtgtgagccaccgcaccgggccaaaatattttactttcccgtaacattctctcctctctcttctcagttaatccccccaccatcacagacagacatgtatgttgtttggctactatgaataaaactgctggccaggcacagtggctcatgcctgtaatcctagcactttgggagactgaggcgggcagattacctcaggtcaggagttcaagaccagcctggccaacatgctgaaaccccgtctttactaaaaatacagaaaaattagccaggtgcggtggtgtgtgcctgtaatcctagctattcgggaggctgaggcaggagaattgcttgaacctgggaggcagaggttgtggtgagccaagatcgcaccactgcagtccagcctgggctacagagtgagactttgtctcaaaaaaaaaaacagaaacaaaaaaacaaaaacaaaacaaaacaagcaaaacaacaacaaaaaacctgctataaacattttccacatctttttgtcagcatatgttttcatttttgctgggtgcattcatttcctattgctgctgcaacaaattatcagaaacttagtggcttaaaacacttatttttttttatgacagagtcttgttctgttgcccaggctggagtacatggtgtgatcacagctcactgcagcctcaacctcctgggctcaagcaatcctcccactatagcctcccaagtgctgggactataggcacatgccaccatgcctggctaattttttaatttttttgtacagatggggtctcactatattgcccaggctggtctcaaactcctgggctcaagtgatcctcccacctcagcctcccaaagtgctggaattacaggcatgagccaccatacccagcctattacgccattttaaaattgagttgtctttattattattatgtaaaaaaattcttttgtgtcagggtcttgctctgtcacccaggctggagtgcagtggtgtaatcatagcttactgcagcctcaatctcctgggctcaagcaatcctcctgcctcagcctctcaagtatatgggactacaggtgtgagccaccatgtgtgggcagttttgttttttttttttgagacgaagtctcgcttttgtcccccaggctggagtgcaatggcacgatctcggctcactgcaacctctgcctcctgggttcaagcaattctcctgcctcagcctcccgagtagctggggttacaggcgcccgccaccacgcctggctaatttttgtagttttagtagagacggggtttcaccatgttggccaggctggtctcgaactcctgacctcaggtgatccgcccgccttggtctccgaaagtgctgggattacaggcatgagccaccgtgcccagccagtttttaaaattattaaatggctaaagtcctttatatattactggttataagtcctttgttagtaataactcttgtgaatgtttcctcaaagtgtgacttgtaacttggttatttatttatgtatttattttgagatggagtctcactctgttgctcaggctggagtacagtggcgtgatctgagcttactgcaacctccttcttccaggttcaagcgattctcctgcctcagcctcccaagtaactgggactacaggcatgtgccaccacacctggctaatttctgtatttttggtagagacagagttttgccatgttggccaggctggtcttgaactcctgacatcaggtgatccacctgccttggcctcccaaagtgctgagattacaggcttgagccatcgcacctggcctatttgttttcttaaatatatcttttgattagcagaattttaaatttttgataaagtctaatttatcatatttctctttttttttttttgagacaggatcttgctctgtcacccaggctggagtgcagtggtgcaatcatggctcactgtagcctcctgggctcaagtgatcctcccacctcagccccctaagtagatgggaccacaagcgtgcaccaccacacccagctaattttttattttttgtagagacggggtttcaccatgttgcccaggctggtctcaaactcctgggctcaagcgattcaccgatattggcctcccaaagttctgggactacagacgtgagccaacgggcctggcctaatttatcgtatagtttttttttttcaagatggagtttttgctcttgttcaggctggacgcctgcaatggcgtgatctcggctcactgcaacctccttctcccgggttcaagtgattctcctgcctcaacctcccgagtagttgggattacaggcacccaccaccaaacccacctaatttttgtatttttagtagagacagggtttcaccatgttggccaggctggtctcgaactcctgacctcaggtgatctgcccgccttggcttcccaaaatgctgggaatacaggcgtgagccaccgtgcctggcccgtatttttttttttaattgttattgttttctgagtcctgctaagaaatctttgcctacccccaagtcctgaaaatattctatggtttcttccaaactcttcacagttttgttacaggaccaacagttttctgtgcccactgtacaataacatacccattctgagacagcagaaatgcaacagagagagagcttaataatcacagggtgccgaggaggagatggaagcagacgctgaaatccaactctccagggagttctgggttgggatttttaaggggacgatggcgggtgaggggctgagaaactgaggtcgttgattgatcagggcaaggggatgaaattatcaggatgtggaaactgcgttttttggtgagtcagtttctcatggggttcttcagaccagccgtgtcagtaatttcattagtatgcaggacctgaaggaatatctcaaagggaaaacttaacatttctttttttcttttttttttttgagacagagttttactctgtcgccccggctgcagtgcagtggtgcgatctcggctcactgcaacctctgcctcccaggttcaaatgattcccctgtctcagcctcctgagtagctgggattacaggtgcacgctgccacacccggataattttttttgtattttagtagagacggggtttcatcgtgttgcccaggctggtctcaaactcctgagctcaggcaatccgcccacctcggcctcccaaagtgctaggattacaggcataagccaccgcgtgcacccagccagcatttcttaaagttcaagttgttatctatagagcaggggaaggcaactgcaatcttgtaacagcatctatgtgattctaagacaataggcaccaaataaccatgaagaagcagctcagagagcaagctgaccttgtgattaatagtgaatgtgcggcaagcttggctgatttgcatttctccctccttcttctctgattaattttttaaagtttaaagggatgttttcagttttaacttttatatttatatttatgatctatcccaaattaatttttgtgtatagtgtgatgcatgagtcaaggttcattatttttccacatgaatatccagttgttctagcaccattttttgaaatagtttcccttcctcattgatttgctttagcatttttgtcaaaaatcaattgactatgtaagtgtggatcaattttggactctattctgtttcactgatctataatctatatgcccattcttagaccaatatcacattgtcttgattactacagctttagagtaagtctttttcttttcattttgagacagggtcttgtgctgttgcccaggctggagtgtggtggcatgatcatggctcactgtagcgtcaacctcctgggctcaagtgatcctcctacctcagcctctcaagtagctgagaccacaggcgcacaccaccacaccaggctaatttttaaattttttgtagtgacagaggtcttgtgctatgttgcctaggctggccttgaactcctgggctcaagtgatcttcctgccttggcctcccaaagtgctgggattacaggtgtgagccactgtccctggcctagaataagtcttaaatacaagtcaagtctccagctttgttcttattggagattgttttgggtattcttttgtttgcgtgtgtgtgtgtgtgtgtgtgtgtgtgtgtgtgtgtgtgtgtgtgtgtgttttgagacagggtcctgctctgcctcccaggctggagtgcagtggctcactgcagcctcgacctcctgggatcccttgagattaagcgatcctcccttctcagcctcttgagtacctgggactgcaggcccgcgccaccacacttggataatttttaagttgtttgtagagacaagtctcactatgttgcccaggctggtcttgatctcctgggctcaagcaatcctcctgcctcagcctcccaaagtgctgggattacaggtgtgagccactgtgcccatcttcaagttaatttttatttaaaattttaatttaaattaaatatatgtattttttgagacagggtcttgctctgtcacccaagctggaatgaagtggctcactgtagtttcaaactcctgggctcaagtgatccccccatctcagcctcctgagtagctgggattacagatgtgcaccaccatgtctaatttttttttgacacagagtcttgctccgttgcccaggctggggtgcagtggtgtgatcttggcttactgcagcctccatctcctgggttcaagtgattctcctgcctcagcctcccaagtagctgggattacaggcacccaccaccacactcggctaatttttgtatttttagtagagacggagagatggggtttcaccatgttggccaggctggtctcgaacttctgacctcaaatgatccacctgcctcaggcctcccaaagtgctgggattacaggtgtgagccaccacctctagccccgattttttttttttgagatgagatttttgagacaagagcttactctgtcacccaggctggagtgcagtggcacaatctcagctcactgcagcctccagctcccctggctcaggtgatcctcccacctcagcctcctttttttttttttttttttgagacaaggtctctgttgctcaggctggagtgcagtggcacagtctcagctctctgcaatctctacctcccaggctgaagcgatcctcctacctcagcctcccgagtagctgggactacaggtgcatgccaccacacctggctaatgtttgtattttttgtagagatggggtttcaccatgttgtcaggtctggtctcgaactcctgggctcaagcagtcctcctgccttggcctccccaagttatgggattacctgtgtgagcccttgggcctggccactgatttttaaatttttagtagaggtgcgttcttcctatattgcccaggcaaatcttgaacttttggcctcaagcaatcctcctgcctctgcctcccaaagtgttgggattaaaggtgtgaaccacgatgcctggcctcatctacctgttttttggaagcaaggtctttctgttgcccacgctggagtgcattgctacaatcatagctcactgcccacgctggagtgtagtggtatgatcatagttcatagcagcctcgacctcccaggcttgagtgatcctcccacctcagccttctgagtagctggggaccgcaggcatacaccaccatggccgactaattaaaaaaaaattacttgtagagacagggttttcctatgtcctcctctaccttttagtcatgaagacggcctatgttttccacagaagtattggttttggtttttatgttaaagtctatagtctaaagtctttagttttatgttaaagtctataatccatctcgaattaatctttgtgtatgatgtgaggtaggagtcatggttcctttctgtccatatggataccctttattccagcaccattagttaaaaagcacttgtcttcattggattgctctggtgtctttgttgaaaataaccacgaagtgtgggtctatttctgggttctctattctgttccattgatcaattaatgtatacttacacaaatgttacactgtcctggttaccatttttttttctttgagacagagtctccctctgtcacccaggctggagtgtagtagcgcaatgttggctcactgcaacctccgccttctgggttcaagcgattctcgtgcctcagcctcccaagtagctgggaggaggcgagtgccaccacacactgattgctgtcatcttatattaaatattaaaaataggttatataaatcctctgactctgttctttttcaagttttttttttttgctattttacatccttttcattttcatatgcactttagaatcgttttgccgacttctttccaaaaaactgccagaattttttttttttttaagacagagtttctctcttgtcacccaggctggagtgcagtggcatgatctctgctcactgcaaccgctgcttcccgggttcaagtgattctcctgcttcagactcccaagtagctgggactaaagcacctgccaccatgcccggctaatttttgtattttcagtagagatggggttttactatcttggtcaggctggtctcgaactcctgacctcatgatccacccaactcggccttccaaagtgctaggattacaggtgtgggccaccgtgcctggctgagaatttttataggaattgtgttgaatctatatgacaattagggagaatggatgtctttttagtactgagttacctaaaccatgaatatagagtatgtctccatttacttaggtcttcttgaatttctctcagcaacattttgtagttttcaatatgcagatcttacacaatttttttttaatttattttttatttatttatttttttttgagacagagtctcgctctgtcccccaggctggagtgcagtggcgcgatctctgctcgctgcaagctctgcctcccgggttcatgccattctcttgcctcagcctcccaagtagctgggactacaggtgaccgccaccatgcccagctatttttttttttttttgtatttttagtagagacgggtttcaccgtgttagccaggatggtctccatctcctgacctcatgatctgcccgcctcggcctcctaaagtgctgggcctttctaaattttttttttgagatgggagttttgcttttgttgactaggctggagtacaatggcatctcggctcactgcaatctctgcctcttgggtccaagcaattctcctgcctcagcttcccaagtagctgggattacaggcgcccaccaccatgtgtggctaatttttgtagttttagtagagacgggttttcaccatgttagccaggctggtgtcgaactcctgacctcaggtgatctgtctgccttggcctcccaaagtgccttttttttttttttttttttttttttgagaaggaatttcactctcgtcgcccaggctggagtgctacggcacaatctccactcactgcaacctccgcctcctgggttcaagcgattctccagcctcagcctcccgagtggctgggattacaggcgcccaccaccatgcccggctaatttttgtatttttagtagagatagggtttcaccattttggctaggctgctctcgaactcctgacctcaagtgctgggattacaggcatgagcccaccttggcctcccaaagtgctggaattacaggcatgagccaccgtgcccagccttttttttttcttttgagacagagtcaggtgggcacggtggctcacgcctgtaatcccagcactttgggaggccgaggtgggtggatcacctgaggtcaggagtttgagaccagcctgggcaacatacggaaaccccatctctactaaaaatacaaaaaattaggccaggcgtggtggctcatgcctgtaatcccagcaccttgggaggctgaggtgggcagatcacctgaggttgggagtttgagaccagcctgaccaacatggcgaaaccccccgtctctattaaaaataacaaaattggctaggcgcggtggctcacacctgtaatcccagcaatttgggaggccgagatgggcggatcacgaggtcaggagattgagaccatcctggctaacacggtgaaaccccgtctctactaaaaaatacaaaaaaattagccgggcatggtggcaggtgcctgtaatcccagctactcgggaggctgaggcaggagaatggcatgaacctgggaggtgcagcttgcagtgagctgagatcgcgccactgcactccagcctgggcaacagagcgagactccatctcaaaaaaaaaaaaaaaaaaaattagctgggcatggtggtgcatgcctgtaatcccagctactcaggaggctgagacaggagaattgcttgaacccagaggcagaggttgcagtgagccaagattgtgccattgcactccagcttgggggacaagagcgaaatgccatctcaaaaaaaaaaaagaagttaaggtgaaaggactcaaagtcatacataaaaataaggtatatttgtatacactagcaacaaacaattgcaaaattaaatttaaaacagaatgctatttataatagtatcaaaaaatatcaaatacctaggagtaaacctaacaagaattgtgtaagatctggccaggcatggtggcttatgcttgtaatcccagcactttgggaggccgaggcaggcagatcacctgaggtcaggagttcaacaccagcctggcgaacatggtgaaaccccgtctctactaaaaatacaaaaattagccaggtgtggtggtggttgcctgtaatcccagctacttgggaggttgaggcaggagaatcacttggacccgggaggcagaggttgcagtgagtcaagatcatgccattgcgctccagcctgggcaataagagcaaaactccatttcaaaaaaaaaaaaaaaaaaaagtgtctggctctgtcacccaggctggagtccagtggcatgatctcagctcactgcaacctccacctcccaggttcaagccattctcctgtctcagcctcccgagtagctgggattacaggtgcccaccaccacgcctggttactttttgtagttttagtagagacagggtttcaccatgttggccaggctgttctcaaactcctgacctcagatgatccattcaccttggcctcccaaagtgctggtattacaggcatgagccactgcgcccagcctaatttcacttattaatactactattttgggtatttggctagtacctgcctttggattttctacttaaaaaataggttgttggccgggcacggtggctcattcctgaatctcagcactttgggaggctgaggcaggtgggtcaccggaggtcaggagtttgagaccagcctgcccaacatggtgaaaccccttctctactaaaactacaaaaattagctgggtgcagtggtgcacgcctgtgtcccagctacttggaaggctgagaaaggagaatcgcttgaacttgggaggtggaggctgcagtgaaccaagattgggccactgcattccagactggttgatggagtgagattctgtctcaaaaataaataaataaataaataaaaataaaaaataggttgtgaatagcaacaattttacttctttgctagtctttatgctttctatttatttttcttttttttttttaatttatttttttattgataattcttgggtgtttctcacagagggggatttggcagggtcatgggacaatagtggagggaaggtcagcagataaacaagtgaacaaaggtctctggttttcctaggcagaggaccctgcagccttccgcagtgtttgtgtccctgattacttgagattagggattggtgatgactcttaacgagcatgctgccttcaagcatctgtttaacaaagcacatcttgcaccgcccttaatccatttaaccctgagtggacacagcacatgtttcagagagcaccgggttgggggtaaggtcacagatcaacaggatcccaaggcagaggaatttttcttagtgcagaacaaaatgaaaagtctcccatgtctacttccttccacacagacacggcaaccatccgatttctcaatcttttccccacccttcccgcctttctattccacaaagccgccattgtcatcctggcccgttctcaatgagccgttgggcacacctcccagacggggtggtggccgggcagaggggctcctcatttcccagtaggggcggccgggcagaggcgccccccacctcccggacggggcggctggccgggcggggggccgaccccccaacctccctcccggacggggcggctggccgggcagaggggctcctcacttcccagtaggggcggccgggcagaggtgcccctcaccccccggacggggcggccggccgggcaggggggctgaccccccccacctccctcccggacggggcggctggccgggcaggggggctgaccccccccacctccctcccggacggggcggctggccgggcagggggctgacacccccacctccctcccggacggggcagctggccgggcagaggggctcctcacttgccagtaggggcggccgggcagaggcgcccctcacctcccagacggggcggctggccgggcagagggctgacccccccacctccctcccggacagggcggctggccgggcggggggctgaccccccaacctccctcccggacggggcggctggccgggcagaggggctcctcacttcccagtaggggcggctgggcagaggcgcccctcacctcccagacggggcggctggccgggtggagggctgacccccccacctccctcccggacggggcggctggccaggcggggggctgacccccccacctccctcccggatggggtggctggccgggctgaggggctcctcacttcccagtaggggcggccgggcagaggcgcccctcacctcccggacggggcggctggccgggcggggggctgacccccccatctccctcccggatggggtggctggccgggctgaggggctcctcacttcccagtaggggcggccgggcagaggcgcccctcacctcccggacggggcggctggccgggcggggggctgacccccccacctccctcccggacggcacggctggccgggcggggggctgacccccccacctccctcccggatggggcggctggccgggcggggggctgaccccccccacctccctcccggacggggtggctgccgggcggagacgctcctcacttcccagatggggtggctgccgggcggagaggctcctcacttctcagacggggcagctgccgggcggaggggctcctcacttctcagacggggtggttgccaggcagagggtctcctcacttctcagacggggcggccgggcagagacgctcctcacctcccagacggggtctcggccgggcagaggcgctcctcacatcccagatggggcggcggggcagaggcgctccccacatctcagacgatgggcggccgggcagagacgctcctcacttcctagatgtgatggcggctgggaagaggcactcctcacttcctagatgggatggcggccgggcggagatgctcctcactttccagactgggcagccaggcagaggggctcctcacatcccagacgatgggcggccaggcagagacactcctcacttcccagacggggtggcggccgggcagaggctgcaatttcggcactttgggaggccaaggcaggcggctgctccttgccctcgggccccgcggggcccgtccgctcctccagccgctgcctcccgggcggcgctcgccggcgcggcggcaaagactgagacagctccgctgccagctgaactccatcctcccggcggtcgggcggcggcggctgccctgatttttccttagggaatcactctttccttgtcattagtccatgtggttctggagggattatttcacctctgactccagagggtgccataggactcaggagtggcccatgagatcagtgccttctatttatttttcatgtcttatttcactagctaggatctctaatacaatacttaataatagcagtgagaggagatattcttgccttgcttttgatcttaatgggaaaacatttattctttcaccatttcacctgttgttcataggtgtcctttatcaggtggtgaatgtttgcttctattcctagcttgctgagagtattgactgtgaaataataattttatttaaaagtcaagtgcttttctaggatcaagacaatcatatagttgttctcttttatgatgttgatgtggtttatttcactgatttttgtaaagttaaactaactttatattcttgtattaaatttttggtcataatatatttcactgtatatattgctggattctatttattgatatgttcttcatgatttgtgtgtgtgtgtgtgtgtgtgtgttcatgaaggatacaggtctgtaacttttttcttgtaattatcagattttcatatcataattatttcagcttcataaaataagtttaaagtattctttcctcctctgttttctgaaaaagcttgtgtagaatttgtatcccttctttcttgggtttttgatagatttcaccaatgctaccacctggcactggaattttctttatggcaagtttttttgattagacttattttagaatagctttaggtctatagaaaagttgtgaagatagtagagttcccatgtgctccacacccagttttccttattgttgacatcttacattaatatgatacatttgtcagtatattattattattatattactattatttttgagatagggtcttgctctgttgcccaggttggagtgtagtggtgcaatcttggctcactgcaacctctgcttccagggctcaagctctcctcccacctcagcctcccaagtagttgggactacaagtgcacaccaccatgcttggctatttttattttttacaattaatcttttcaaagaaacaacttttggctttgttgtttctattgtttgatttatatttcattgatttcttcttttattaacttcttcccctacttaatttgggtttacttttttctagcttattttatttattagtttgttttgagatagggtcttgctctatttcccaggctggagtgcagtggtgtgatcttggctcattgcaacctctgcctctcaggctcaagtgatcctcctacctcagcttcctgagtagctgggactactggtgccaccatacccagctaagttttgtatttttcatagaaacggggtttcactatgttgcctaggctggtctcaaactcctgggctcaagtggtctacgtgtctcagcctcctaaagtgctaggattacaggtgtgagccattgcactcagccttttcttgcatcttaaggtggaaatttataatattgattttaagcttttcctcctttctaatactagttgaatctatttatatccttctaagcactgctttttttttttttttttgcagcgatggggtttcaccatgttgtccaggctggtctccaactcctggactcacgcaatctgcccctctcagcctcccaaagtgctgggactacaggtgtgagccattgcgcccagcctcctttagttaagcctcataaatactgatatcagttagaaacattttatcttttgtgacttttgtttcatgggttacttagaagtagattatttaatttacaaatatttgagccttttctagatatcctattatggtgttttctaatttaagtccttttccccatgaacatattctatgcaatttcagtcctttaacatttattgaagcttattttatggacatgcttatggtctatgttgacagatgttctttcagatgttcttttttttttttttttttttttgagatggagtctcacaccgtccaccaggctggagtgcagtggcacgatctcagctcactgcaacctctccctcccgggttcaagcgattctcctgtctcagcttcctgagcggctgggattacaggcacgcaccaccacgcccggctaatttttgtatttttagtagacacggggtttcactgtgttggtcaggctggtctcgaactcctgacctcagatgatctgcccaccttggcctcccagagtgctgggattacaggcttgagccactgcgcccggccgagtataattttttaaaacaaatttaaatgtactacttacccattatcttcaaggaaaggacagaatcccttggttaatgctccctgaacaaagacaaagtaattattactcagtcaagggatctgggagtaatcttgtgggctcttgaaactaaacatgcccataggctgggagcagtggcttatgcctgtaaccccagtactttgggaggctgaggcagaaggactgcttgagcccaggagttcgaggccagcctgggcaacatggtgaaaccctgtctctacaaaaacatacaaaagttggctggacgtggtagcactccaggctgcatgacaggcgcctgtggtcccagttacttgggaggctgaggtgggagcatcgcttgagcccaggaggtctaggctgcagttgagctggctgagattatgccactgcactccaccttaattgacacagcaagaccctgtctccaaaaaacaatcaatcaaacaaaaaaccccaaacaaacaaaaacatgcccataaaaagtcagggtaaggaattagaaaccaaaagaaaacctccatctatctattcattcaacatttactgaactctaattttcttttcttgaagagaggaaagtttaataggcaaacaaactattaatagcatctggtgtgccctgagtgcttgctatgtgccagggccaagtaggtctctattttgcggaagttaaaatatgatgtaatcgggtggtatgagcattaaaaaaaatgtaattgaggttacaaccaaggtgtatttgctttcaaatccagatctttttgactatgctaaatacaagcaaattcaaaaaggggaattagccggctgctgtggctcacaccagtaatcccagtgctttgggaggccgagggtggatagcttcgaggccaggaattccggaccagcccgggcaacaaaatgttaaataaaaaaattttaaaaaattaaataaaaaaatttaaaaaacaaaaaagggtattaaacaactcacagacagatactgcacaggatttttggtacgtttagggcatctgcatggtacttggtttgttctgggttgctgagaacattcacaggtcatacaccagttttcctttctggagagcttctgtctgtatatcttttcctggagaatctgtttgaca

SEQ ID NO: 392 - DNA, 20194 bp, Homo sapiens
  source 1..20194: mol_type = other DNA
cggtatcgccacttggagaccaccgcgaatgaagtttgcattttcctctgttcttgagcccagcttcttctcgtctcccaccccagcttcccggcattggaagaagggaccgtcctcttccttgtcttggccacccaaatcctggtatcgaaagggttgaacggaccggaagtgtgcagcagcgacgggtccccagctaatcgacgccggaagtagcaattactagacaagcattccgccgccggcttcgctatggcggcaattcccccagattcctggcagccacccaacgtttacttggagaccaggtgagggggttcgggcgtctggggctggcagaggagacgcggagcccgggcctcaccacgggtctgcgttcctggcgcgttcctccgggaggccggcctccacgtggaggggcgtggagcagcggccgagacggcccccagagggttgagaggggaccgccatcgcccgcgtccaagctccgcggggtcttgtgctgaggtctcagcaatagctgcctgattgtcctccttcccccagtccgctcattcattcattcattcattcaacaaacgtgtaatgagtccgcaagccaggcatatggaatatgagttctgaggatacagaggtagataaaacacagacagccctgcctttaggagcttacggtataatgaaagagacagacatgtaaacattacgtgataagtaatacagttgtagaaacaaattccagtaaaatacaggaagaagcacattttccccactatcaaagagtgatgtggtaaccaacctgctggcgccatgccccgctgtatgtcatctcatttagtttaatcttagcaactcaaatcatgaaggtattatttaactttctccctttcaatattagcaggaggaaacgccggaatttacagcttaaagccttgaccaaagccacacagctagtaactggaagaacctcgtttggagcctggtgtgctcgtctcaccttgctagatcctttagctctattcattccattgcctctttggaaaaagctcaaagtgatctttacaaagtaggacaaggaagggatcctgctcaaaaaacctttaataacgtcttgctgctataacagtataaagtaaaaacgtattaatcctgacattcaaggtgatttttttcatctggcccttgtctacctgccattctcccctcaacagccagggaccagccaaggtcctctgcctttctgttcttgcccattgctgctttcagctaaagcagagttctgtcagtcctctctctatttgctcatgctgttcatttcatgctccctggccatcttccccaccttatatggcaaaattctacatcttcaggctccaacctgtaatttctgaattctcctgttggtattttttaaagttacaaaataaattgttaaatccaagcaatgtagacatacagagtaagaagtgaaagtcacctccttcctgaaaacaccatcaacagtttgttggatgattgtccagacttttttctatgtacatataaacctctctcatgtttttttaacaaaaaaatgggatcatatgatcatactgtatgtatgttttttctgtaacttggttttctttcactcagtaattcaggtagctgcccatagtatggatagttgatattttaggcatttcctatttcaaggacatttaagttgcttcctttttttttggctatgacaaatactgagatgaacatccttgcacatattgtatccttaggcacttttgtatattttcctagaggatacttggaagttgaaattactgaggtatgcacatttcagaattgtatacgtacttcctgattgtctttccaaaaggctactttctgtattttgaaaatatcctccagaatgtaagcttcatgagggaaagagtaccacacacagagtaactgtcaatctgtgttgaatgggagcagtgtgaaagatgaattggatgaatttcaggcagaaaggctgttagctattttctagcacactcctcatatacttatagagtgtttacactgtgcaaggcactgggtatccagactatacagagttgactcaattctcacatctggccaggtgccatagctcacatctgtaatccagcactttgggaggccaaggcaggtagattgcttgagcccaggagttcaagacaagcccgggcaacatggtgaaaccccatctctacaaaaaaatacaacaaattagctgagcttggtgatgcatgcctgtagtcccagctactcaggaggctgaggtgagaggatcacttgagcccgggaggtggaggttgcgataagctgagattgtgccactgcactgtaacctgggtgacagaggagaccctttctcaaaaaaaaaaaaattgtcacatccttggagcttaaagtctaggtatgtgctggagtagaggggaaggcactcgtcctttctcttgcctcttccttatcttttagtagtactggtgaggaaaaagcactcatcctattgggtaggtgcaaagattcaaagttaccaggttttgcctttgttatactccctcccaaacaaacacaaactgtaccttttattgaaattttttgaataggtaatgtatttacatggatcaaaaatacaaaagtttttaaaaggtattcattaaacatcttcctattttccatctacccagtccctacccccacccagaaacttctaaataaatatgaactcctgatattttaatgtctctttttttaaaaaattaaaaattaagtgtaagaatttttttcctaatttaggggttggttatattggtttcagataatcagatatagctatatatatatacatatgtatatatgtatagtattagaattttgagttctccatgcttgttattttgctgaaaagaagtacccagaacacctgcgtgttttactcaaaaaagataatgggtgtttatgttacttgcattgtggtgttttcctttgctgagcatgaaatccagtggttatcacaatttcatgacttacaagcttgaaaatcaagagtcctggagcagttccataatactcctgtctgccctgacctttttgtttactggagctgttgtcctctccctctgcagcatgggaatcattgtgctggagctgtactggaagcatgctccaaagacctgtaagaactttgctgagttggctcgtcgaggttactacaatggcacaaaattccacagaattatcaaagacttcatgatccaaggaggtgacccaacagggacaggtacagttaagccaacattagtttatgttttcttttttttttctccttttcgtctttttttctaaagccagcattagtttctgaagtctctgtcgtaaataggtgataaggcagccagagctctcttttccacttactaaggtctgtgttggttgattctggtgacaacgcctgccttcctcaaacacacatgtgtggaattgaccagaaaccaacctttactcctaggcttggtagagtttttcataacttacatgtactgctcactaagaacaaataatatttgtctgaattatagtgatgcaagtagtctgatcaataagaaggaaagactttataatattttgagaataataaaatcctgggttcttttatcgattcattcatttaacaaatactgagtacctgttttgtgtcagatacttttttaagctctagggagatacctataaacaaagagacagaattattgctctcaataaagcaggaaaagggtgtggggatggaattttagtagaaaagtcagggaactcctctctgacattattggagaagagatctgaatgaagtaagaaagtgaaccttgcaactgtggggagaacattttggatggagggaagagcaaacacagaggccctgaggcaggaacctgtgctggaaatcataagatatgataccttatagggcatggtagagactgggttttattctgagtaagatgtgatgtgagtcattggagagttttgagcaaaggaaagacatgatctgatctatgctttaaaaggatcactctaggctgggcacggtggctcacgcctgtaatcccagcactttgggagcccgaggcagttggatcatttgaggtcaggagttcaagaccagcctgaccaacatggtgaaacgctctgtctactaaaatacaaaaattagccgggcgggttggtgggcacctgtaatctcaggttcttagtcgggaggctgaggcagaagaattgcttgaacccaggagatggaggttgcagtgagccaagatcgcaccactgcagtccagcctgggtaacagattgagactccctctcaaataaataaataaataaaaggatcactctagctgctgtttagagaatagatgtaggggcaagatgtaaacactatgtaaatagttgttgtactgtattgtttggggagtaatgacaagaaaaatagttctatacatgttcagtacagatgcttccccccaagatgttttcagtcgcggttagttgaacccatgaatgtagaacccacatgtagggagggccgactatgctcatgagtaagtagttggataggaatatggggttcagggaaagacctggtatggaggtattaatttgggagttactggcatttagatggggtttattagtgaactggtggaacccttactcatttcaagggcccttgcttctcagtctgcttcttctctgctaatttctgctcgtttgcctttaaacaagtttggttttctctatagcagagtcttttctcagtcttgttcttttttgtcattcttaatcgtctcatgatttatcatctatggtcagaagcattcaggtttttgggtttttttttttttaatgtatatggatgcatttcaaaatacagaatatataagaaagcagagaaaaggggaaaaatcattcataagcatagctcctaaagatttctaaccatcattaactaatccctaaatatcccatctttcagaaaggaacagtgttaacttttggtgcccatcatgtctggtttaagggatgacaggataaatggaagtagtttcaaaaaaataggatatataagctattgtttttaaaacagaacatattacatttaatttcatatatatagaacagaatatttgacttcctacagtgaaagatgaggcaattagtacttaaatttctacccattcttatttttccccgaccttaatttttgttgttagttttattattatctgttctgcactcatcattccttcagctacagtgtgggtcctacgtttcagtgtatttagtgttcacaacttgcttcgcttttaccttcgcaagtgctggagggcaggatttcttgtctagtggttttttagtgtttttttttcagaatgctcaagaatcacaattgtccagtggttttttgttacaagagctggaatgtgttgtatttttaagttcattcatgtttcagaatttctgcctgttacttttatacttgaaaagagatagcatgttggcatgctcagccccctcactgtgtgatgcactgtgccactttgggacttcacagagtccccaccagcaagaaggctctcaccaaatgtggccacttgaccttggacttctcagcctccacaactgtaagagataaattacttttttaaaataaattttttaggccaggcatggtggctcacacctgtaagcctagcactttggaggctgaggcgggagggtcacttgagttcaggagttcaagaccagcctgggcgacatagtgagaccccgtctctacaaaaaataaaaaattagctgggcatggtcgcatatgcctgtaatcccagctactgggaggctgaggtaggaggatcacttgaacctgggaggttgagactgcagtgagccatgattgtgcccactgcactccagcctgagcgacacagtgagacactatctctaaataaataaattaaaataaaataaaaatatttaaaaggaagaaaaaaagaccataactgggtatagcattctgagatctttttagacatttctgatcaattgccttctggtttggttttttgttgttgtttgtttttgttgttgttgttgttgtttttggagacaggatcttgctctgtcacctaggcccaggctcgagtacagtgatacaatcatggctcactgcaatctccatcccctgggctcaagcatttctcctacctcagcctcccgagtagctgagactacaggcattcaccagcatgcctcactaatttttaaattttttatagagttgaggtctcactgttgctgaggccggtctcaaactcctgggcctaagtgatcctcctgcctcggccttccaaaatgttgggattacaggcatgagccatcatgcctggctgccttctcatttttgaatatggttttggagaatactgaggccagatttactccttcctttacatcagggttaattttttgatttctatttctgaatattttctctgttatacttactggattttctatttcaggaaatatagttatttgtttcatcacctttgccttccatatctatcatatttcttttgattgtgtgataggatttttttttcttttttccctgcattcactaaaataatctcagacctttactctgtgccttactcaattttcagtcatttttattctgttctttactgctctaatttatctactagctcattactgatgccatttgaatctaaatttgtttccttcactctgcaatcttttcatcttattctgtggtgtattatcttgtctttgagcttttgttatattatatttttacttctcttgaatcatccatagcttgagatagccatggagaagccactttctcccaggctgagttcctgggttttcttttcctttctcccctcctcctttctgtccttctgttggttgtggtatgtttgcctagtttccatgccatttgttttcatcttatccatgcttgatgtcaacacctacattatccccaccttttacttgctcagatacagtgtaagtggagtctccttgtcattctccccacttatgtggaactggttgtcttccccacttcaaatgttaggttgctttctctctattctattctagcctgaagaggtgtgggagagaactggagctcagctcatgctgagcgagccccttgtgggagggctagcctctgttctatcttcccagactcccttaaagtcttgtcccagagccccctccaccagccagtggtgtccctctgtcaccactccaggctctgggtagtccccaagtatggcccagcaccctggaaggtggccagccctgcgtgcctgccctgccactcccgagcccctgtgatatgtgtgggcttctgccctcaagggctttgttttcagagctgctcacccactcccctgttggctgttcagaatcggagggtatttgtgagaatctcagcatgacatttctttcctggttactggtttcagggaatacagatggaagaattttctattttttcctcttggctgactctttttacaattttagcatgtttggttcccttttcttatttggttgatgctggtgaacttttgactttttaatttttaatttttgtatgttcactttattgggtgttgggagcatgtggtaaacgtgcctgatagcaataactgaaacatacccttagaatgaccctgtatggcagacgcatctgaatgtgtgttctgagctagggaatccaggagtagccaacctggaggttccttccttgtctataaagggacatctgagcccctggctcgtcctgtgaaacatgggccgcacacgggttgaggccccgagttttgagttgaatgaagattgccaggtggagattgttagggagaaggtgctaagtggaaatgctatataaactgcatgctttttgcaagccattgtggttctccgccaccattggactctctgccctgtatgtaagtccccaataaaaccccatgtctcatttgctggcattaggtctcttcggtctattgaacctgatgccatccccattggagtcaatagaggttcggcacaacagggaggcagagtctagtcctgcttcattctactttctttgtctgaaagggttccgtcggtacttcgatgtacttctttcctgtcttcttcctctctccccctcatgttgttatgaaataaattttaattcttaataccagtgaactgagagtccatgattagggtacaagtattggaagtgactcaggtgtgagttgctcatgccacagcttttctgtatttctgtagttggttcatgatccttcataatgtcacatttccatggtgtaattttaatgaaattgaatcactcaaaagatcttcaaataactgcacccagcctcaagtataatgaatgactgagcagcccactggcaggtctatggtggaaggcaagcaggagttaggctctcctgggtcactagttcatattttctagctgattaggtgacacgttttttgttaaacatctcagatgggcagcaaatgacatcctgggctcttcagcaagttgatgtaccacttccattcccagctgtccctcagtctgactactgtggaaccattctttccacatgctttcttgtaatacatctttgccagatgccttgtcaattcaaataccctttgacttcctgcttcatttcattttaaaccatttttctaccttcaactttcccatattataataactatagaggctctttccttagccctctgagtgtcttttatttgtttctactaacctttctgtcctctctgtaagacataacatcctgtcaagttcttcctttagctcttcctgctctgcacttggcctcacagtgctcaccagctgctgtgattaattatatgctgattatcctgtgcgtcactctcactttgatttcatctctcctcttggtagccccaggaacacctgaaatgtaacgtgttgaacagcaagctctgttaattttattcatttgatgagtatttgccaagagtctgctgggtatcctgtgctattctaaggcctgggagaagcacttaagcattaaaagccaaggcattttctttttccttgcagttccctgccctgccaggaaacaaactattcattataagaaacaactagaatgggataatataaatatgcaaatgtatgatagtacggtgtggattatgtatataatataggttggagtaattcacaataagggaaaaagcacaatggaatgagattaggatgggaaggaggcatatgcgagatgggtcttgggaagtagagggaagggcattttgaatttaggaagaagggtgggtacagggcaggagtgacagaggcatgcaggggtagggagggagcccgccacccccggtgtcacatcttccactctagactggctcttgtgacatcacccagccacctctccacacccagaacaaatgcatcaaatgtgattcaaaggcccctgtaaaatttacagatctcggaactgcctgtttaggggacagtaaggagcagtttggggccagttaatggagactcctagacagaggagttcagatttgattgagcatgactcagggaccatttgggactcttgagtctgggataagacaaatctgaggaaatttcatccagctgtggactatggcaagacagtttggttcagggtagagcaggactgtggagcttgggcttgccttgtgcttcacatgaatacttactaaatgtagaggagttgccttaccctgctgagccagctcacctgtcgggagtgtggttacgtgcacctcctaggctggttgtgagtagtaaatgagctgatgttggtacagtggttagcatgggcttgacacaaagtgggagctcaaacaaatgtgactggttttttttttttattgttaattcatttaacaaatacctattagactccttctgtaggccaggcactcttctaaaagctggagatacaacagtgaataagaaagccctcgcggtgctctcattctggtgagagacggagaatgaaaaagtacataatatactctcagggatggcagatgatatggaaaaaagaatgtactgctgggatggaacaggatttctcaacctaggcactattgacatttagagctggatgattctttgttggagggggtgctgtcctgtgcattgaaggatggttagcttcgtgatggcttctaactgcttgatactgatagaaccactcagtgtgacaacccaaattgtctccagacattgcccactgtcgccaggggtcaaaatcactccccgttgagaaccactaggctagagggtgagggaagtgctggtttggagagtgtgattagggaaacctctctgagagcatttgaccatagttctgaatgaaatgaagtggtgatccatgagaccatccaggccaagggcactctgaagagaacagcagccagaggccttagaccagagtgtgcctggcaggaaacagcacaggggccagtgtagctggaacacctgagagagtggcaggagatagctcagagagtagcagagtgcccaatcgtggggggtgttgtaagctgtggtgaggattgtggattttgttctcagagtgatacagtgttgatggagggtttcaagcaggggagtgctgcgattaggcttgtttgaaaaggatccctgtggctaccatgtgaagaatagagggtggggaaagagggaggcaaggctggaagcaaggagaccagtgggaagcttttattcctattcaagctggagatggttgttgtttgaactagggtgatagcagctgtgttagttctggtcctctgggaagcaaacaccaagatagaggtttattgggtaacacctgtgaaagataaagggtcagggaaccaggtttggaagggaaggtcttcacacagcagcgcaggcctgagtaacacctgtgaaagcagaggggcggaggaggagcagctgccagtgagcagcgaggaacaccaggagaatgtggagtcgtggaagccaaaggaagacagcaactcaagcagaagggtgacatcgagtgtggatcaagtaaagtgagtgctgaggattgaccactgggtataaccacgtggaggtcactggcgaccttgacaagagcagtttcagcggagcggtgaggggcgaaagtctgaatggagcatgttcaagcaagaatggggagaagtagagacacttggtgttgacagctttttcaaggagtttttctgtgaagggatgtagagaaataggaggatacttggaaatagagttttgctttttaaaataggaaatatcaataacatgtttaaatgctgacaggaatgatccattagaaagagaaaaattggtctactagagggggaggttgtagttgctgagttctttaaaggtgagcgggattgggtacgtggtggtaggatagtcatggacagcttattcacacagtgtcttagggaagggaggtgggtagaggtgtaggaagggaaggggctttggtggtgagagcatgtgaaagttctcttctgataattccttcttctcagtgaaataagaagcaaggttctcctcaaagagtgagcagcagcgagggagtggtggaaatttgaggacagaggaactgaataaacccaggcaggctgcctcccgaggtggcactttgaatcatgaccagcagcttctcagagaaaatgctcgggttacctcagttaaaggggctcttcatcactgacactactgtgtgtttgcctcatgttacacaccagatagcttccatatgctgtctcatttaattctcataacaagcctgtgagacataggtgttactgctactcccattttgcagacaggggaactgaggcttggagagaaagtgtcttgattaaggttaaacagtaattggtggggtcagaactggaatccagacgtctctgaccccaaaggcaagtgagaaagagaagacagcatcttcagaaccacaaagccccttggaggactgtggcattgttcccgtctggtatattaacaaagtgtttgtgtcaggtagcactgcttttggctacaagtaacagaaaacctaatcccacgggctgttttttcttacacaacagaacgtctggaagtgagcagttattgtcatctcttcaccagcccagaagagttgtcagggatctaggcttgccatatctttccccacttcattcgtaatgtgttggcctttggtcttgaacttgttagtcttatggttgcaagatggctgctgctgttctggcatcaccctactttcaaagaaggaagatgggaaagagctgtagatgaaggacaaaagagtatgtctgtttttatcaggaaagctgtagctttctcagaagcttgactcagcgacttctgtttgtatcagtaagtcacaactgggtcatctggccacgcctgtctgcaaaatggacttgtcagcacctgccttttttgtctctgaggttgaggcaggctgtggaggaggaggctggggatgctcaggagactactgacggacagtgtctgttagaggcactcttgccagaagagaggctttgattggtcagttgccctctggtgtcaggtgccccactggctctccttataggccactgcccatctgtggggctggatattaatctattgtcccatcaactgtggggtgggaggggcggggacaagtagcaccaagtgtggtcatcttggtgtaagacactgcatgtcccatgccttagacatcattttgacaggtttccacagtgactaagaggaggaggaagggacatcacaggagtcacagggatgagaaaagggttttttgtgttttgtttttaagaaacaacacaggccaggcacagtggctcacacctgtaatcccagcactttgggaagccgaggtaggcagatcacctgaggtcaggagtttgaggccagcctgaccgacatggagaaatcccgtctctactaaaaatacaaaattagccaggcatggtggcgcatgcctgtaatcccagctactcgggaggctgaggcaggagaattgcttaaacctgggaggcggaggttgcggtgagccaagatggcaccattgcactccagcctgggccacaagagcgaaactctgtctcagaaaaaaaaaaggaattaaaaaaaaaaaaaaacacagatcataaagaagaaggttaagaaatgttaactgcaaaggttctgttcattggaagatcccattacaagagtgaaaaaagttaactgggagaaggtatttgcaaaacattcactgacagaggattagtatctatagtatatagttgagcctttaccaacatgggtttgaaccatggaggtccatacagttttctcagagcccacagcgggacttgagcgagcagggattttggtgtcacagggatcctggaaccaatcccctgagtataccaagggatgactgtatgtatcaattccaaaatgtcataccactgagtggccgttcacagaggggacaagctaaataagccagtaaacatgaaattatgccaaacttcagagaaatgcagtttaaaacaccacaagaggtctcacacttctcagactgacagaaggacctagagcagtaagagtgagagtgctgcggggtggggtgcatgttggttcatccttttcaataaggcacttagaaaaatctagcaatgatgaaatactcaaactatgaccctgtgtatcccctgtgaggtattggcccccgagagctcttgcacttggatttcggagacagtataagaatagtttttatagcatggtcgataataaccaaaacattggaaagatcctcagtatcaacaccagaaaagataagacagagcattatggtcatacagtgaggtgaacactacagagacctgcctggaacaaagtagatgagtctctcaaacagtgttgagaatatataaagtgtaataccacttatgtaagcttaaaaacatgcaaaacaacaatactttttttttttaggggtacatagatgtgtagtaaaaaagcttaaaaacatgcaaaacagcaatacttttttttttttttttttagggatacatatatgtgtagtaaaaaagaaaatgcatggaaatgccaaattcttgtcagaatagtggttacctgagaggaaaatgtgattctttgaatcagctgttagctctcaggagaatgagtggtggggagagatgcagtggggtgtatgcatggggtcttagctggatttgcaatagtttatttcttgggggcggaggtggtcatagatattggtcatattattctttgtatgtttgcgtgtctgaaataaatacattgaataaatgatcccaagagaggacagaggacagaagaggaaaagaatctctttttttttggagacagacaggagtgcaatggcgcaatcacagctcactctagcctcgacctactgggcttgagtgatcctctcacctcagccacctgagtagctgtagctgggactgcaggcacgcacaaccacgcctggctaatttttgtagagacgagtttcaccatgttgcttaggctggtctcaactcctgggcttaagagatccgcccccttcagcctcccaaagtgttgggattataggtgtgagccacttgtacctggccagaaaagaatcttgaaggttcttttctaacctgtaatcaaaggttagaaaacaggtcttggccgggtgtggtggctcacacctgtaatcccagcactttgggaggccgagcctggcagatcatgaggtcaagattgagaccatcctgggcaacatggtgaaaccccatctctactaaaaatacaaaaattagctgggcatggtggcgggcgcctgtagtcccagctactcaggaggctgaggcaggaaaatcacttgaacccgggaggcagaagttgcagtgagccgagatcgcaccactgcactccagcctggtgatagagtgagattctgtctcaaaacacacacacacacacacacacacacacacacaatagaaaacaggtctgcctatcttcattgtgtctgtgctagaccaggcacagaacctgcaaagcttccaaattgttggctttctaactgataattgacatctgagtagcatgctctgcactggagaactctttaatcattctctgtccctctgccacctctcacttattccacgtgcccagaggaatgtttgaattagaatgatttgtctttctgaaattttgccgcaaaccctactgagttgaattgggttatgaaaagataacatattatgagtaagatattatgaaaactctgcctattgagtaaaggtgatctccatgctctttcctcctgtatcctctgattcccacttcatctgtgactttttttttttttttttttttttgagacagggtctcactctgttgcctgggctgcagtgcagtggtgcgatctcagctcactgcaacctctgcctcccaggttcaagcgattctcctgcctcagcctcccaagtagctgggattacaggcacgtgccaccacgcctggctaatttttgtatttttattagtgatggggtttcaccatgttggtcaggctggtctcaaactcctgacctcatgatctgcctgcctcggcctcccaaagtgctggaattacaggtgtgagccaccatgcccagcccatctgtgactcttgactgacctattccttaatgcacttcttgtttgtggtgatgtttgtgtgatagtttaccattcctagagggcagggtcctggggggtttgttctggtagccctcaggttgcagggatcacactttgaagctcaggccacagactgacagcgtactactgaactgaatccttagcttgctcactcaagtcctgcacgcagagcctggcctctgtggcgtctggccccacagccctctccctagtctctggtaaccccagccaggaaccttgactctctagtggttgccaaaggaccaagcaaaggggaggattgagtcagagggaacatattggttatataattgctgtttggaagtatactgacaggttggaatttttggaatgagttttacacagtttagtgtggttcagtatttttccagaagcataggtagcctgggccaagtgggaggtttcccctagtctgttaggattcacccccatccctctttgcatgagaacagtgttttcttccggaaaagaaacgggggctgtgacaggctccctgtggtgaagccgactaaaaggtaaagcaaaggatttttgccatggaaacaccttagccatgcccaggggccttgggggtggacttggtgctacttttatagcaggcagtagaggaagtgagctgccagcactgggctgcagggcaagcagagtaccaatccagtgtttactttgttctaggctgttttgtcgtgaccgttcaacttggagaaaccaatgtagttcagtaaggcatatgattgactacataattgattagtattggttaggaaagttgcctcctgttttgacatgttttcctgtgagaaaaccatgtttaacttacatctttttttttttttttttttttttttgagacagtcttgctctgtcgcccaggctggagtgcaatggcatgatctcggctcactgcaacctccacctactgggttcaagcaattctcctgcctcagcctcccaagtagctgggactacaggtgtgtgccaccatgcctggctaattttttttttgtatttttagtagagatgggggtttcactatgttggccaggctggtctcgaactcatgacctcgtgatccacctgccttggccttccaacgtgctgggattataggcatgagccaccgcgcctggtctaacttacatccttttgctcttagagcaaaacctgcctgagcttagggtatccagcccagcaccctgctcttgtgggcataatataaataacatttggtggtgatgctgctagcaaataattcccaatcccatgtttcttcattttccctttattcatttatttagagtcaaggttttgcctcttgcctagactggagtatactgacatgatcatagctcaccgtaaactcaaactcctgggctcaaagcagtcctcctgcctcagcctcctaaggagctgggactacaggcatgtgctaccacatctggctgaattttaaaatttttttgtgagccaggtgcagtggttcacgcctataatcccagcacttgggaagccaaggagggaggattgcttgacgccaggagtttgagaccagcctgggcaacgtagcaagaccccatctctaaaaaaaaaaaatttatggagtcagggtctcgctctgtggcccagctcaaactcctggcctccagcagtcctcctgcctcagcttcccaaagtgctgagattttagatgtgagccaccacacctggccctgttttctcttaatgatgtactgcctcacctctcagtggactctgccgaccgtaatgtccctttctgccacattgccacttaccagctatttctccttcagctggatagctttaacttaaatgaattttattttccatcacctaggttaagggtggcaaataggtttcaactctggggctattactgattaattaataacggctgcctgagttctgggttgataacattcagaggcaaatctagctcagcagggaagaatactgattgattggcaatgtctgtgatgggcacagggataggacttggggcactcatgtctaaaatactcaaaaaaaggttaaaaatcaagaaacctcttaacacatcagattatgaatggtggttatctctagatggtcaggttacagaggattttaatgttcttttgataatgttctatgttttctacctttttgatagtgaacatgtattattttaatgtgcaggaaaaaatagcgttattttgaaaaggaaagtcttatcggaatgaaaccaatgatttgaatgtgctattagtgctagattctgtagttgcaatatacctagcagtggggtaggtgtcactgccttttcctttcctctactctgagaaatcctttgaccctgggccatcattcttgctgtgagatagaatgtgtgactggctgattcatgtgtcatcttccaatcgggcaggtcgaggtggtgcatctatctatggcaaacagtttgaagatgaacttcatccagacttgaaattcacgggtaagtgtataatttggctggactgggtaggaacggggattttaaaagctcactcttttggccatgattcaaggtgaatgcctgacaccgtggcatggtgccagatagctgcccagccatggcgccatgaagtgccctggtggattagagaaagcagcgcctctcacaaagttctgagcaattcagagcactggtcggtgtgttctagactctaactacttgttaaaggtcacaggatatcaaaagtgtcctcaaagaaacaggaaaccttgctgggtttttgagggcagtcaggaacatggtccacagttagtgaggagcatcaggggtcaaggctggggaataggtgaggacaaggaagatgaagtcgccagaatagtgtagtgatggcctttgtacagggcagagagactgccctgaggggttgtctgggtctggacagaggccagaacaaagtcctggctgctttttcatccctaggatggggcagcagctctacactggacctgtggggttatttatactctttcctttcttcctttttcccaccaggggctggaattctcgcaatggccaatgcggggccagataccaatggcagccagttctttgtgaccctcgcccccacccagtggcttgacggcaaacacaccatttttggccgagtgtgtcagggcataggaatggtgaatcgcgtgggaatggtagaaacaaactcccaggaccgccctgtggacgacgtgaagatcattaaggcatacccttctgggtagacttgctaccctcttgagcagctcttctgagatggccccagtgaaccagcttctagatgacatagaatgacatgtaatgctaaattcattttggctttgcaagtcatgaagcttaggaggcctggcatcttgggtgagttagagatggaagtacattttaataggatgcttcttttctcttcccccagtgcctaggttgccagagcatttgcacaaatgcccctgtttatcaataggtgactacttactacacatgaaccataatgctgcttcttgtgcatgtctgctctgatatacgtcgaacaatgtagcagccactgtcatttctcagtggttttgcctaaccaaacttcttcctaaggagatttatattctggcctacacagcagtccttgatggctgacagccacagaattccaaaccaagtagtgtctgtcagccctcttaactctgtgcacgccctatttcagtcttttacatttgttcttctagggaatgtatgcatctctatatatattttccctctcaaaaccagaacatcaacagtgctgtttctgacacttcagacatcccacgcaaagccacattgaatttttgccaaatgaaaaacacatccaacaatcaagtttctaagaaggtgtcaagtggggaataataataatgtataataatcaagaaattagtttattaaaaggaagcagaagcattgaccattttttcccagagaagaggagaaatctgtagtgagcaaaggacagaccatgaatcctccttgagaagtagtactctcagaaaggagaagcgccactcaagttcttttaacccaagactttagagaaattaggtccaagatttttatatgttcagttgtttatgtataaaaataactttctggattttgtggggaggagcaggagaggaaggaagttaatacctatgtaatacatagaaacttccacaataaaatgccattgatggttga
